United States Patent Application Publication US 2026/0191916 A1 - sequence listing, part 27

SEQ ID NO: 76 - DNA, 1561817 bp, Gordonibacter urolithinfaciens
  source 1..1561817: mol_type = genomic DNA
acgcgtccctgcgcaagcggctgccatcggcgagggtgcagggccgcacgggatctgcacccgcaccgccacgggcgcagggccgcgtgctaccctacttgcgcgaacaggtcgttgaacgcctcgctcatggtgggatgcgtgtacacggcgtcgcgcagcacctggtagggaagcccggcatccatggccagctttattgtgtttatcatctcgtaagactcctcgcagaacagatgggcgcccaggatgcggccggtgccggcatcgacaacggctttcaacagccccgtgggcttctgcagcagctgcgccttcgggatggccgcggcgggcagcttcgccaccttcacgtcgaagccggcggcacgcgcctcctgctcggtcatgcccgcgcgcgagagcggcgggtccaggaacacgctgtaaggcacggtgccgcggttcgccgtggttcgcgcgccgtcgcccagcacgtccgccttcacgatgcgggagtcgtcgagcgagatgtaggtgaactgcaagccgcccgccacgtcgcccagcgcccagatgttcggcgcggtggtgcgcaggtgctcgtcggtgcgcacggcgccgcgttcggtgagctccacgccggccgcctcgaggttgaggccgtccacgttggggcggcggccggtggccacgagcacggcgtcggcgggcaggcgttcctcggcgccggagatctccaccgtcacgacggcctggtcggcttcgtcgtcgatgcgccgcacgcccgctccgcggatcacccggataccgcgcccttccacgctgtccagcacggccgcggctatctcggcgtcttcgcggggcaggaacgcgtcctcgttctgcacgaccgtgacctgcgagccgaagttggcgtacatcgaggcgaactccatgccgatgtagccgccgccgatgatgaccaggcgctcgggcagcgtgcgcacgtcgagcagcgtctcgctcacgtgcacgcgcggtccgtcgacgccggggatgggcggcacgaacgggcgggcccccgtgttgatgaacgcctgcgcggcctcgatggtttcccgggtgccgtccggcttggccacggtcaggtgcgtcgcgtcggcgaacgaggccgtgccgtccaccacctccacgtttggcaggtcggccagcttgcggtagttcttgctgcgcaacaggccggtcacgcgatccttctcgtcgacggcggtcgcgtagcgcgcggcacgctcgctgaacgtgccgccttgcgctgccgacagcgcggcggaatgcacgagcgacttcgtggggatgcaggccacgttgatgcaggtgccgccgtacatcttcggagacttctcaaccagtgccaccgtcttgcccgctgcggcgaacgcgcccgccagcgtcttgccgcccttgccgaatcctatgacggctgcgtcgacttgtctcatgatgtttcctttcaggaaagggggatggttcgctgctcgtggtgctcgtggtgctcgcagggccgggggcgtcggggagcgtgccgccacgaccgaactcgtagttgtgtgggcaaacgcaacctcgacgagtcgcgccacgccggcacgctccccgacgcccccggttctgcgatcggcgtgccgtgcaagccgggagagcgggagggggttggaatgcgggaggacggtgcttgcgccgcggctaggcgccgtccggcgtggagccggccacggtgccgtaaggccagtcgacgataccgcccatgtcgtttacctcggtgaagcccagggcaaccagcttgtcggaggcctgcttgctgcgcacgccggtgcggcagtacacgatgagcttgtcgtcggtgctgcccagctgcgagggctgcgtcgacccgatatcctcgttcgggatgttgagggcgccgggcacgtgcccgtcggcgtattccttgggcgtgcgcacgtcaaccacggtaacgcctccctcgtcgatgagggccttggcctcttccgccgtgatcttatggtaggcgcttgcgcccctgccggcatccgcgcccgagcccgtaccggcatccgcgcccgatcgggtaccctcgcccgtgtccgggctgcccgtcatgccgccggtctgcgcgctgcaggccgccaacgcgagcgtcgccgtcaaggcgagcgctcctgcgaccatgatgagcgacctgcccctggtcctgttttttctcatatccgctccctcctacgccttcccatttattgtatccatttcagatacagttattgactgtaacaataaagcatacagttctaaaagtcaacacggtcagtaggatttctcccgcgagcgacgcaagcgaaaacaaagggggattctgctagattctcgttagctccccgcaagatctggcggaatgctgcgtcggaaccgcgcaaggttctcgcggttttgcacgggccttactgacggtcgcggtgcaaggttgcggcggtaggatacatgccacgaagcgcggaggcggcgcggttccacacccctttccactcctatccccgcgtgttgggcgaaacggaagggtggtggaaaccatgaccgatttggtgcttatggcggtggcaatcctcgagctggctgccagtacggtgcagttagtggctgtaatactggagcggctcccaatccgcaaggacggggagcccccaaagtaagaccaaaccgccgaagcgattcgagagccgtggggagttagcagctccctgcggctcgcctgcattatagcacggcctcgcgtcgtccgccacttataccggcaggggcttcggcaaaatcctcttccgaccgcggcgcagcctgcgtggctggccggcaacgccgacggtctgcacgatggccggcaacggcgccatcctgcatcaagctccgccgcccgtgcttgcctcttgcgcctaccccgccaccttcgcgaacaggttgttcagctcctccgtgacggtggggtgggtgaacacggcgtcgcggatgtcggcggcggtgcagccgtcgtccagaaagcgcttcgccaggttcacgatctcgggcgcgcccgagcagtacaggtggatgcccagcacgcgctctgtggcgttgtccacgatgcccttcatgagcagcgcctccttgcccaagagcggcaccttcggcaggtcgtcggccgtcatgacggcgcaggccacgtcgaacccctggtcgcgcgcctcctgttcggtcaggccgacgtgggcgagcggcgggtcggcgaagatgcaggacggcacggcaccgcgggtgcccttcgtcttcgtgccgtcgcccagcacgtcggaggccacgatgcggtagtcgtcgtacgacacgtaggtgaactgctgcggctccgtcacgtctcccatggcccagatgttcggcgcggtggtgcgcaggtgctcgtcggtgacgatggcgccgcgcccgtccacctgcacgccggcggcctcgaggttcaggccgtccgtggcggggcgccgccccgtggccacgagtgcgaagtcgccgggcaggcgcacttccttgccatctacgtcggctatgaccagcacctgcgccacatcgtcttccaggctcttcacctgcgcgcccagcatgagctcgatgcctcgctgctcgaagttctcgcgcacggcgcgcgccatgtcggcgtcctcgcgcggcaggaaatcctccccgccctgcagcaccgtcacgtcaacgccgaagtcggcgaacagcgaggcaaactccagccccacgtagccggcgcccacgatgaccgtgcgctcgggaagtatcttcacgtccagcagcgactcgctcgtgtacacgcgcttgccgtccgcaccgggaatgtcgggcagcgcgggcacggagccggtgtcgatgaacgtgcgcgccgcctccagctggcgctcgccgtcggccgtgcgcacggacaggtgcgtggcatcgacgaacgttgcctcgccgtcgatgacctcgatgcgcgggttgtcggcgagcgtgcggtagctccgctcgcgaaggcgggccgtggcctcgttcttctcgtcgatcacggcctcgtagcgctcggcacgcgccgggaactcgccgccttcgaacgcgctcacggccgctgcatgcacgagcatcttcgaggggaggcaggcggtgttgacgcaggccccgccgtacatgcggctcgagcgctcgatcacggcgacggtgaggcccgcgctcgccaagtcgagcgccaagggcttgctggctgctccgaatcctatgatcgccgcatctacctggtccatggctcttcctttcctcggggcccgcgcggccgggtgccgcgtgcacgcgcctacggcgcaacgggttgattctggtgggtgcgcgctttgcgcgcgctgtgcccatcgtacgtcttgctcgcgcgcataccctgtcgcgcgggcttccttgcgccgtgcgataaccgagccgttggcaaaccgcgatgcagcccgccgcgcgccgtccaggcaaccgcctccgaacaacgacgcacgcagcctgccaaaacctttatactgtcagtgaaggaagctcgccggcgacaagcgcgttcgaagcggacgtgcgcgaaaggagcgcgacatgaagatcaacaaggtattggtggccgtggacgagtccgagggcgcccggcgcgcgctcgagctggcggaggccctggctgcgcccgatcccgacatgcacctcgatctggtgtacgtggttcccatcccgctgcttgacgaatcgcagacggccagcttcaaggatatcctcgacatgatgatatccgacggcgaggacgtgctggccaagatggaggaaagcctgggcgaagacgtggccgcgcgcaccgagaccctgctcatgacgggcgtgaaccctgcgacggagataatcaagctcaccgagcagcgcgattacgatatggtggtcatcggcaaccgcggtctcgtcggcctcaaggagtacatgggcagcgtgagccacaaggtgctgaacggcacgagcctcccggtgcttatcgcccggtagcgtttcgccgatagcagctgcacgcaagcgcaccgctggggggcggtgcgcggcggcctcgcgtccctgcggggccgccgcaaagagcaaggaggagaaatttgagggaacgcaagaactcgttggtcctgttcagcaaaccgccggcgccgggattggtgaaaactcgcctgacaacgctcaaggacggcgtgttcacgcccgaggtggcctcggccctgtaccactgcatgctgttcgatgtgacggaggtctgctgtgcggcgctcgccgacctcgaggcgcgttcggccgagcgggccgaagccgagggcgtgcgcgacgtgtacgagctggtcatttccacgacgccggcgtcgaacgtcggggtcatgcgcgacctgtactacaaggcgggctcgtggccgcgcccgctcgcgttcatcgccgacgagggctcgagcttcgacgagcactacaaccatgcgttcgcgcaggcgttcgagcgcggtgccgacgcggtgctgtccatgggcgccgacatgccggcgctcacgaaagccgacgtcattgccggattcgacgcgctgcaccgcttggacgacgtggagggcggcggcatcgtgctggcgccggaccaggagatgggcgtatcggtgatcggatggacgcgcgagacggacttcgaccacacgggcgtgttctacaatcccgacggccttaccgtgctgcccgcctatatcgcgaaggcgcgcaagcaggggcttccggcgctgtacctgccgcccatccccgacgtggacaccatggccgacctcatgcacgccatcaccgtggtggaggcgctgtgctactgcgcgaagtacgacgacgtcacgccgccgtggcgcaccgccgacgccctgaagcagatgggctgggacgaggtgcgcgtaccaccgaacgatctgcacgacccccgcgaggggatcgactaaggagaagccgccacgagggcgatgctgtgcggaggagcgcgcgatgctcctccgcacagcgcacgttctcctggcatgctttcccgcctttcctcccgccgccatgtcctcctgtcttcgaaacgctggcagcgcgatttccgatgccgtttgcactgcgtcatctcctgcctgcgtcggatcctacgtcatcctgcgaaccccgcgttcggtgtgacaagtggcctcgtcctgtcaggatcgcgaaatgtcctggcggggcactcacctatcgttctcgagcttgaaatcgcaccgttttgaccgctgtgaagcgatttccaaggcttggaggccccttcgcgcggcgtggcggagaagacgggagcgttttcccagctcgccgaccgcgtatccttctcgtgcgagctcgatgagcttcaccgcggtcaaaacggtgactcgagagggtcgatatcgcgaagaacccatgctagaccgcgccagatcctccgcgaacggacgtgtggcgcattgctgatgggttggtgtccgctgtgtgcgaaggtcggcgtgcgaccgcacgggactgcatacttgaggttcgagattctgcagacgcgaaggagcggcgatggaaggcgtggatcgaacaggcggcacggcggccgatgaggcgcgggtgcgcgaagcggcagagacgcagcgaacggccaaggcggcggaggcgagcggccccgcgcgcccttcgacggtccctccgcccgcttcgcccaccaccgaaggtgtgcctgctgccgccgtgcgcgacgcgcaggaagccgccgcggccgagcgcgcccgcgagctggccgccgcctccgccaggcagggcgacgtgcccgccgccgagcccaagcccgagcgcaagcgcggcgtggcggccgtgttcgcgggcctgcttttggccatgttcgtgtccacgctgtccgagacggtcacggccacggcgctgcccaccatcgtgggcgacctcggcggcgtcgaccacatgcagtgggtgaccacggcctacatcctggcctccaccatcatgatgcccatctacggcaagctgggcgacctgttcggccgcaagtacctgttcatcgtggcgctttcggtgttcatcgtgggctcggccacctgcgggctcgcgcccagcatggacggcctcatcgcgggtcgcgccgtggaagggctcgggggcggcggcctcatcatcttggcgcaggccaccatcgccgacatcatcccgccccggcagcgcggcaagtacatgggcgtcatgggatcggtgttcgccgtgtccaccgtggtggggccgcttctgggcggctggttcgtgcaggtgacgggctggcgctggctgttcgctttcaacatcccgctggcgctcttggccatcgcggccgtggcgttcttcctcacgaaccccgagcgccgcgacgaccgcccgccggtggacgtgggcggcatgatggccatggccgtttccgtgtcgtcgctcgtgctggccaccgcatggggcggcacgctgtacccgtggctgtcgtggcagatcatcggcttgttcgcgctgttcgtggttgcggccgtggcgttcgtgctggtggagcggcgggcgaaggaacccatcatcccgatgctgctgttcaagaaccgcaacttcgtggtgtgcaccatcacgggcatgttcatcatgctgggcatgatgggcacggtgtcgtacctgcccacgtacttccaaatcgtggacggcctcgcgcccgagcaggccgggctcatgacgttccccatgatggcgggcgtgctgctcacggcggtgggcacgggctttttggccacgaagaccgggcgctacaagtggatgcccatcgcctcgtgcgccgtggcggcggtgggcttcgtgctgctgtcgcgcctgacgccggatacgtcgctgctgatgacgggcgtgttcctgttcatcctgggcttcggcatagggctggggcagcagatcctcgtgctcatcgtgcagaacgagttcccgcacgccatcgtgggcacggccaccgcggccaacaacttcttccggcagatcggctccacgctgggggcgtcgctcgtgggcgcgctgttcacgtcgcgcctcgccgccgacctggccgcgcagctgccgaagaccgacaacatcagcatgaaccgcatcacgccccagttcatcgatcacctcggcggtcccgcgcgcgacatcataaccaccgcgtactccgacgcgctcgtgcccatcttcctgtacgtggtgcccctgctggtggtgggcttcctcctcatgctcaccctcaaggagaatcccctggcaaagagcgtgaaccacaccggccacccaggggacgacgcgctgtaggggcatgagggcttttccggcttcacgacgccgaatcgggcccctcgtgccaaaaacgagccgttttggcaattcatatgaggtaactatggatatgttcgaagaacgccacctggtgaaacgccctcgttgctcgctgtatgagcgtcgggagcccccgaagccgtgtcgcgattgccaaaccggctcgtttttggcagaagcgggaaaaaacggcgtcactaccggcgcagctcccagaaggccacggcgctggcggcggccacgttcagggagtccactccgtgctgcatcgggatgcgcaccgtgtagtcgcaggcggcgatggtggtgggcgctaggccgtcgccctcggtgccgaacaccagcgcgagcttcggctcggcggccaggtcggcgtcgtccagcggcaccgagtcgtccgacaacgccatcgcggccgtggcgaatcccagatcgcgcagcagcggaaggccgtcctccgcccaggcgcccttgcccgcgcgcgggtccgcctcctcgccgatgcgcgtccacggcacctggaacacggttcccatcgacacgcgaaccgcgcggcggtacaacgggtcgtagcactcgggcgtcacgagcacggcatccacgcccagcgccgcggccgaacggaagatggcgcccacgttcgtgtggttcgtgatgttctccagcacggccacgagccgcgcatcgcgcacgacgtcggccacgctcggcggcgcggggcgtttgaatgccgcaagcgcaccgcgcgtcagctcgaaccccgtgagccttgccagctcctcgcgcggcgccacgaatacgggcacctcggggtgctcggcctcgatgcgtgcgatcacgggctgcagggcgtcgagccacttagcctccataagcagcgacaacggttgcattcccgcctcgagcgcccgctctattacgttgcccgactccgcgatgaacaccccgcgctccggttccagccggctgcgcagctgcacgtcggtcagccgcgcatacgcatcgagccgcgggtcgtcgagcgtcgagatctccactaggggcatggcgggtaccttcctcgttccgtatcgttcgcaaggactataccagaagccggcgcctctatgccgaagcgctcggacgcctcgccccttcggcaatcgctcggcccggttttagcacagaaatcaccgaatgttgcgcttgccggccgaatagttgttgctcagatttctgtgaactgcggaaatgctcgcagtacgcctggcggcggcaggttgagcctccttggaggcggaaatatgtgcaactttcggtgatttctgtgctaaaaggccctcagcgcctgttgcaggcagcgcggacttcggctgccacgtcgcgcacgttcgccaggccttgcgtgcagaactcgtcgcaggtgagcatctgcgcgccgatgtgggccatgtcctctatgttcgccgcctgcacggccggggtgcgcgacgaggtgcaatcctcgatgacggccacgttgtagtcgagcgagagcgcgtcgtagcaggtggtgcgaatgcagttcggcgtggtggtgccgatgagcaccaccgtccccacgcccaggcgacgcagcacgttgtccagattcgtgttgaagaacgcggagaagcgcggcttcaccaccacgcggtcgccgggttgcggcgcgagcggcgccggctcgtcgagcgagtgcggattcgcgcacgcccgcgacacgggcttgccgccgccatcccaggcagcgtggcgcaccgcctctacgtccgagccgtcctcggcgtactcgcgcacgacgtggaacacgggcatgcccagctcgcgcgcgtggtcgagcgcgcgcgagcacgcgggcaccgtggccgccgccccttccacgcacagggccgatgccgggtcgatgaacccgttctgcatgtcgatgatgataagggctgccttgcacggatcgatcatagcgtgctcccttccccgagctcgaacacgttcttgtggaagtctatgataccctctttcctcatccgcgacagctcggcgcacatggcgctgcggtcaacggacaggtagtcggccagctcctggcggtcgaacgggatggcgaaccggctcgcttccgcagctttggcctggtcggacaggtatgacagcagcttggcgcgcgtcgtgcgctgcgacgtgtgctctatcttgcgtgtgagcgcgtgcgcgcggcgcgccacgatgcccagcaggttgcggacgaggcgcgcgtggaacgcacacgacgcagggcacaggctggtgacgcgccgcacgtccatgagcaggacaagcgcgtcctcggccgccaccacgttgaggtcgaggggaaggccgggctcgcaggcgtacacctcggcgaacgattggccggggccgaacgacgccaggatcgtgcggttgccccagtagtcctccttctccagccgcaccgccccctccagcaccagccccatgcacgtggtcacgtcgcccacgcgcagcacggccgacccttgtgggtagcggcgctcgcgtgcgcccaggcagtgcagcagcgcctcgaggtcgttgtggtcgatgccgtcgaacagcgacgagcggctgatgacgggaagatggcggtccatcgatctccttcgttggaattacaacggaacatcttatgccagtatcgtagggtggggcgtgtcaggcaagaaggaattcgcgcgatcgcccggcatggggccgcgagtggcgcgagacgaagggaaggacgacggtatggacaccacgatgttctgcttccaatgcgagcaaactgccggatgcgccgggtgcatgggcgcggcgggtgtgtgcggcaagacggcggccacagcgcaggtgcaagacgagttgaccggcgcacttgtaggtctcgcactcacggtgcaggcggcgaaagcggccgaaggcgtgaaggcggcggtgtgcggcgaggccgataacgtggcaatggaaggcctgttcgccacgctcaccaacgtcgatttcgatgatgcatcgttgcgtgcgctcacagctcgagcgcacgccgagcgcgaccgcatcgccgccgcgctcggcgtggaggccgcttccgactacgatctggccctcttgtggaacgcgccggaggatgtgcgctcgcttaagtcgctcgtgttgttcggcttgcgcggcgtagccgcctatgcctaccacgcggccgtgctcggctaccgcgacgagacggtgtcggctttccttcaccagggtttggcttcgctcgccgacaacgaggccggcgcggacgagctgctgccgctcgcgctgcgcgtgggcgaggtgaacctgcgctgcatggagctgctcgaccaggccaacaccgagacgttcggcacgcccgagcccacgcaggtggcgcgcacgatcgagccggggccgttcatcgtggtgtctgggcacgacctgctggacctcaagctcgtgctcgaccaggcggcgggccgcggcgtgaacgtctacacgcacggcgagctgctgcccgcgcacgcctatccgctgttcaagcagtatccgcacctcagaggcaacctgggtgccgcgtggcagaaccagcgcgaggaattcgcgaacctgcccgcgcccatcctgtttaccacgaactgcctcatgccgcccgctgcatcctacgccgatcgcgtgttcacgactggtcccgtggcgttccctggtatggcgcgcatcgacgcgaacaaggacttcggccccgtcatcgagagcgcgctggagctgggggggttcgccgagccgcgagccgtcgcggcggaagagggggcttggctcaccacgggtttcgggcatggcgccatcctcggctcggcagacgcggtggtcgatgccgtgaagcagggcgcgatcagccatttcttcctggtgggcggctgtgacggcgcgcggccgggccgtggctacttccgcgacttcgtgcggcggacacccgccgacagcgtggtgctcacgctggcctgcggcaagttccgcttcaacgacctggacctcggcacggtggccggcctgcctcgtctcatggacatggggcagtgcaacgacgcgtacggcgccatccgcgtagccgtcgcgctggctgaggcgttcgagtgcggcgtgaacgacctgccgctcacgctcgtgctgtcgtggtacgagcagaaagccgtgagcatcctgctctcgctgctgaacttgggcatcaagggcatctacctgggtccgacgctgcccgcattcgtgtcgcccggcgtgctggacgtgcttgtccgcgagttcgacgtgcaccccatctccacgcccgaggaagacctcgccgtcatcttggcgtgagccgaagggggagtagcggggtagggggcgggcgcttgtgcctgccccctaccccgctactcccttcctagatgtccacgcccaggaactgcttcaccaggataccgatgacgaacgagagcgcggccacgcccaggctgatgccggccatctggccgaagcgcttcttgaacggcaggtcctgcgccacggagatgtagtagttgaacaccaccaggatcagcagcacgatgacgatcatggtggccatggcccacaggtagtgcgcctcgtcgaacaacaggtacggcaagatgagcagcgccaccgtcaccaggtaggcgatgccggtgtacgtggcggacttgaatgcgtcctcgcggccctcgctcttggatgacaggtactcgctcgacgccatggaaagcgtcgccgcaatgccggtgatcaggcctgacagcgcgatgaggcgggtgttctgcatggccagcgtgaggcccgccagcgtgcccgtcatctccaccatggcgtcgttcatgcccagcaccatgctgcccacgtacgacaggcgctcctcgtcgagcatcgccaggagcgcctgctcgtgcgcctcctcgtcggcgcggatgtccagcgcctcgggggcctcgcgcgccagctcctcgtaggagatctgcgccttggcctcgcccttctccatgagcttgacggcgaacgtgaagccgaacacgagcgcgatcagcgcgtagcggcgcaccttgccggcttgcgggcgcatctcctcgccggtgtagcgctgccagatggcggcgtgttttgcctcctcgtcggcgatgcgcagaagcgtgtcgcggttgcccgcgtccttcgtgcgccgggcgatgcggcggtacacctcggcctccgtcacctcgttctgctggaacgcgcggatctgcgcgagggccgcgggcgagagccgcgcggcatcgggctggttgttgctggtcatggtgctccctcgttgccggtacgtcgaatcaacagcacagtatatccgattctgccgccgccgcagctccggcgttctcccccgcgggatgcctgcgctatgccccgggtcccgtcgcggctcgcctcgcgcgccggtcggccagcaccagccaggagagcgccgcggccatgagcatgaggcctgcggcgtcgaaggctatgaaccggatgatggaggctgcgagcgccgcatggccgacggggagcgacagcaggatccacgactcgcctgtcaagcccacgacctgctgcacgagcaggacggcgaacagcgcgcggaagcggcgcgggtttgcgatgacggggggataagtggcgttccacatgaggaaggccacgcccagcccgcgcacggcggccgcgcccggaacgcccgccagctcgaacccggccgcgaacgcctcgggccacagcgcgaacgacgcggcgcactgcacgttcacggcgaacacgagcgctaccgccacgcgcgccgcaatgcccgctgccctctggccgcgcgtcatgcgacggttgcccatcttccggttgcccgtctcctggctgcccaggcgtcggttgcccatgtcgtgtatccttccgtcaccgtgtccgcagcttgccgagctgtctgctgcccgccgcctcccgcaggtcgaagctgcaggccgcacgcagctcgccgatctgcgtgcgcctcccgccgcccggccgcctcccgccgcccggcctccgcctcccgccctcccgccgcccggcctccgcctcccgccctccggccgtcgcctctcgtcatccggcctccgcctcccgccgcccggccgccggctctcgcaagccgcaagctgcctgccgttcggcgtcgctcgctcccgcttccgcaggttcggcgcgtcaatgtcgcgctgatccgcctcaagtgtcaaaaaacggtcgctttggcaagcgaagcggcgcctgtcgaccggtgtttcgcccatagcgttgcagaaaccgcaggtcacgtgttcccatggagacgatcgccgcagtctccgtttgccaaagcggccgttttttgacacttgcgagcaggttacgcttcagggatgggtggccgcgcatgttgcgagcgacccgccagccgaggctccacccgtcgcgggctcgctgccacgggctgccaaagcgcctgcaccgtggagtgtagcgcattcgacgccgcgtgcgttgacgaggggtatactgcttgcagaccatcggctgaaaggaagcgtccatgaccaccgagcccgaacttgcgcccgcgcctatcgcgcccatcgaccacccgtgctttgacgatttcgtggccaccatcgccgcactgcgcgctccggacgggtgcccatgggaccgcgcgcagacgcatcggagcatcgcgcataacatgatcgaggaggcctacgaggcggtggacgccatcgagtccggcgacacggcgcacctgcgcgaggagttgggcgacgtgctgctgcaggtggtgctgcaaagccagatagcagccgatgcgggcgcgttcgacatcgacgacgtgtgcgctgacgtgaacgcgaagatgatccgccgccatccgcacgtgttcggcgaggcgcgcgcggacaacgcctccgaggtgctggacctgtgggaccaggtgaagctggccgagcgctcctcccagaatgcggcaggcatcgtgccgagcgccggggcttcgggctccgatgcggcggcaggcgccggcgtagccggccaggtcgcacaaagtgagggcttgctcgacggcgtgcccacgagcttccccgcgctcatgcaggcgcagaaggtgtcgcgcaaggccgcgtccgccggcttcgagtgggattcgctcgacgatgtgtgggagaaggtgcgcgaggaggtcgacgagctgcgcgccgcctacgccgccgcaccgaaggccgcgaacggcaaggtcgatgccggcgcggccgaaggcgattccgcggcggccgagcaggcggcggccagcgtggaggacgagttcggcgacgtgctgttctcgctggtcaacgtgggtcgccgcatgggcatcgatgcagagaacgcgctgcgcgccacgtgcggcaagttccgccgccgctggtcgttcatggagggcgcggcctgggcgcagggaacgacggtcgaagcgctcgctcccgaagagcgcgaggccctgtggcagcaggccaaggaccgcgagcgcgcgtagccttgcggggtgtggctgcggcgaaccccggctgcacctcgcgcccgccctgcgcgtccacccgaccgcctaaacgaatctttgcaggccgtgcgatggcgccaggctcccgcaagcgttaaactatacgtccgacatcatatttcgcttgagaaggcgaggagggcgatgcgacctgcatgggaacttggaatcgcaaaaggctcgtcggtgcaagaagaagacgggggggctcatctccggtttctgaccacgacacgctctccgggctgctgagcaggagcgggttcgacaagcgggtgcgcatgatcatcgacggccacccgaacgagtcgtacctgctcgtatacggcgacatcgaccgcttcaaggtctacaacgacctgttcggcgcgccggcgggcgaccgcctgctcgcagacatcggcgccatgatccgcgacctcatgcccgccggggcggcggctgcgcgcctgcgggccgaccacttcgtctgctgctgctcgcgttcctcgttcgatcccgaccgcatgctcgccgcgctcgacgcctggttcgcctcctatcgcgaggacttcaccttcttcgtgcgcctgggcatcttccccatcgacgacccctccctcgacgtcaacctcatgtgcgaccgcgcgctgctggccctgcgctccgcgaagagcggctacgtgggaagcaagtacgtgttctacgacgagaagctgcgctcgtcggtgctcaaggagcaggagctcgccggcgagatgatcgcggcactcgaaggcggccagttcgtgccgtacttccagccgcagtaccgctacgccacggggcgcatgataggcgccgaggtgctggcgcgctggaaccatccggccaaggggctgctggggccgacggagttcatccccgtgttcgagcgcaacggcctcgttgccacgttcgactactatatgtgggagcaggcgtgccgctgcctgcgcatgtggatcgacgggcggggtatcgagggcgcgccccggctgtccgtgaacctgtcgcgtgccgatatctaccggtccgacctctgcacgtacttggagggcctgatcgaacgttacgacgttcctgcggagctgctgcacctggagatcaccgaaagcgcgtacatggaagcgcccgagcagcttatcggcgccgtcacgaagctgcgcgccgccggattcgtcgtggagatggacgacttcggcagcgggtactcgtcgctcaacacgttgaaggacgtaccggttgacgtgctgaagctggatatgggcttcctcggcgcgagcgccagctcgcggggcgggctcatcctcgcgtcggtcgtgcgcatggcgcgctggctcgacctgcccctcatcgccgagggcgtggagacgaagcagcaggccgcttacctggccagcgtcggctgcgactacatgcagggctacctgttctcgaagccggtcgaccgggagacgttcgagaagctgctcgaaggcacggctgtcgaggaccttgcgcacccgtttgcggaaagcctgcaggacggggccgcggagttttgggatgtcgactcgcagctctccctcatcttcaacagctatgcagggccagcggccattgccgagtacgatggggagacgtgcgagctcatccgcgtcaacggcgagtttgcccgcttgctcgatttagacgacgaagcggcgtcggcggagcttgtgcgcaagaacttcttgggcgtgctgcaggaggaggaccgcgccgcattggaggaggcgctgcgggcggcgagcgaaggcgatgcggcgtgcgatctgcgctaccgcagcgctgccggcaagggccgctggctccggctgcatttgcgcccgctctcgcgcacggatagcgtgatcagcctgtacgtgctggcggaggagacgaccgaggagcaggttctgcgcgaccgcctggcggccccgcgtgattccattcccggcggcctgcagcgacttcgccggcagaacgaagcccggcagcagctgtacgacgccataccgtgtggaatcgtgcgctataccgtgggcgacggccagcatatcgtctcaatcaacaagaagggctgcgagctgctgggctaccgtgacagggaggagttcatcgcctcatcgggcgacaacgcgctcatgcccatccatgaggacgacgtgccgcgccaccgtgcgggcatcgagcgcttgaggaacggctcgaagcccctcgacttcgcgtaccgctactatcgcagcgacggtaccgttggctggcttgaggggacgtcggcatacgagctgggcccggagggcgaaccgatgatccagagcgccttcctcgacgtgtccggtcggcgccggaaaagccacgagctcgatctgcagcgtttcacggaggtgctgtgctcggtatacgacgagatattcgagttcgaccgcatggacgaccggtaccacgtgctgtattccgccctgcaccccgaatcgatcggcgtcgcgcttccgctagaagaggcgctcgggcggtggatggcgcacattcccgatggcgtggagcgcgccggcctgcgcaaaacctttgacgaatgccgtgcgaacgtcagcggaaagccgtcttcctgcacgtacaagctgtcgaaaggcggcaacgccacctggtgccagagcacgttcatccgcgtgtccgatacctgcacgctgtgctgcaacaaggatgtcacggagggcctggccaccgaggatcgcaggcgggcgtggcaggacgagcgctaccggctgctcaccgagatgacgaacaagatgagcttcgactacgattccgacaccgacacggtcctgctgtacatcgatcgtacgggcgacggcgtcgaagcgcaggtcataccgcattacttggaaaagcttgccagcgcgcgcagcggcgtggtgcatcccgacgatatggacgacgtgcgcaggatgttcgaagacgcccgggccggtgctgcggaggtgagcgcgaagtatcgggcgaactactacggtcacggctacgcgtggtaccgcgcgaacctgttcgtcgcgcacgacaatgcgggcgcatggcatctcgtgggcctcatcgagaacatcgaggacgaacgcgacctgcgctaccgtgccgagaacgatgccgccacggggctgagcaaccatgcaaccacgcaagacctggtggcagcggcgcttgcgaagcccgccgttcgcgagcacagcgtgtgcgtggtgctggacatcgatgacttcaaggcggtaaacgacaactccggccacatggagggcgatgcgctgctgcgcaaagtgggctcggtgctgcgctcgagcttccgcgagagcgacgtcatcggccgcgtaggcggcgacgagttcgtgctgctgctgaaagaagtggatatggatgtggtgctgcgcaagttgaaccaggtgcgagcccagatatctgccacgacggtgcccgggctgggccacgcccccaccctcagcgtgggcgtgtatgctacctgttccgacgaccgcacgtaccgcgacgtgttcacccgtgccgacgaagccctctaccaggcgaaacgcgctggaaagaaccggatccaagtctacggctcctagcgtccatccgctccctgccggcagtgcgcccgtcggccctcgcgcccgcaccctcccggcagcagccggtctgaccctgccgtcctgcgcatccgcggcggtcgtgcccgcgcccgcgccggccttcccgtccccgctctttttcccgccgatatcccttgaccttcgacttggttcaggccgtaaggtgaggccagcttttcaaactgcaaggggaaagggaggctcatcatggagaagcaggacaatggggagatccgggcgaacgaggccgggcaggaggccgacgaggccgtgcgcgccgccggcgcgccgaggcgcggcatggaccgccgcaacttcctgaagggtgcggcgctgtccgccctgggcgtggcgtcggcgggcgcgctggcggcctgcgcgccgcagcagaacggtggcaaggcggcggatgcgtccgacggcgcgaaggccggcgaggacgagccgttcaaggccgaggagacggtggacgccgacgtggtggtggtcggctgcggcgcggccggcttcatggcggcgctgcgcgcgtcgaagggcggcgcgcacgtggtggtgctggagaagggcgacagcatggcggccccgaacggcatctacgtgtccggcccgttcgccgtgggcaccgacgtgctgcagaacaagcccggcggcaccacgctcaccgtggacgacgcgttctaccacgtcatggagtactcgcactggacgccgaaccccgcgctcatgcgccgctgcctggagacgtcggccagcgccgtggcccagctcgaggagatcggctacacgttcgaggagaagaacttccgcttcgagacgccgttcatgggtgagaagggcggcttccacgccatcacgaacgcctccgacgagcgcgcgaagctgtgggagcaggcgctggccgaccacaacgtggacgtgcggttctccacggccctcgtgtcgctggctaccgccgacgacggctccgtgaccggggtgaacgccgtcgagaaggacaagaagaacatcacgttcaacgccagggcgaccatcttggcggcgggcggctacctgggcaaccgcgatttgcaggagcgcttcctgcacacgcgcaagctcaacgtggcgcgtggcggcgactccatctgcacgggcgacaccatcctcgcggccgagaaggccggcgccgcgctggagaagacgtacggctactgcccctgcgagtacggcggcacgcacgccgacgcgtcgcgtccggccaagcaggacaagttcgaccagaataccgcgttcaagttcggcctgtacggctgcctcttggtggacgccgagggcaagcgcttcatcaacgagggcctgctgtgcgactatcccatgagctacggttccgagcagatcctcaagaactcgccgtggtacgccgtggtcgaccaggcctacgtggacgccatgagcacgcagggcctctacaactacaccacggcgaagggcgccaccgaggacacgtggttcatcggcaactacttcaaggaccgcatcctcgagaacctgcccgccgacatcgaggagggcatcaaggaaggctggtgcttcaaggccgactcgctggaggagcttgccgagcacttcgggcttgacgagctgccccagacggtggcgcggtacaacgagttctgcgacgccggcgccgatgccgagttcggcgcgaacccgtggtacctctcgaaggtggccacgccgccgttctacgtgaccgagaacgagccgagcgcctggagcacgttcggcggcgtgcgcatcgacgactgctgccgcgtgctgtccgccgagacgaacgatcccatccccggcctctacgctgcgggtaccgacgcgggcagcctatactactcgccctactacgacatccccggctactgctacggtctgtgcatcgattccggctacatcgccgccgaggaggccgtggccgcgctcaaggcgtagggtttcaccaactccgaacggtcccggcggcgcacccccccccgcgccgccggggccctctccgaccgccccgccgcctcctctccctccaacggcggggcgcctttatctcaccggggcgaacagcgtctcgatatcgctgccgctcccgtccaggttcagaaacgacgggaacaggatcacgtccccccgcagcgcgtagccgtggtcgtccaggtaggcgaacaggtccgcgaacgtctccttgcgcacgctctccgcccgcgtcacgcggcgccggaaccgcacgcatttccccaggcacaggcggcccacgtgcgcgcggtcgacgccttccagccggtgctcctcgctctcgggcatggcgatgacgtagctggggtccaccgtttcgcccggcgcgtcgaagtcgcgcttggcgatgatgcgcgcgcagctggtgatgctcagcaggtcgtagaacagggcgatctcccgctcgttttccaccgacacgccgaagtcgcggcccaccgatgcgctcacgtacagctggtcgggcgcgtccacgagcgtgaaggccgcccggccgcccccgtcgatcagcgcgagcgcgctgtctatcttcgccagccggtagcgcagcaggtcggcctcgcggcgcagcttcgcctgctggtcctccagagagcgcttgaactcctcggtgccctgctcggcatccagcatggccacggcctgctccacggtgaacccgtactgcagcagcacgcggaacgcgtttgcgcggaaggcgtcctcgggcgagaacacccggtagccgttctcctcgcggcgcgtggccagcaggccgtgcttctcgtaaaacctgatcttcgacggcggcagccccgtcattgccgcaaactccttgatgcggtacatgcgaacccctccctcgcgccagcgtgccggcggtcgttctctgcgtgcagcataccatccgcccctccttcaggcatctggtgatttgcgcgagattgcgcgcgcaaacgccgccgcgcgaacccttcgcgctatcatgggcgccgaggagagcaacctttcgccaaggagcaacaacatgccagacgcatcgcagcagcggtcggaccagcggctcgccgtgggggagaagaaggaacagccgcaggagcgccccccgttcagcgtgaccgacgacctgcgcgagcccatcgacgagctgacccgcctcaaggacatggaggcgaagacgcgcgagatcatccagaagtaccaggccgccatgcgcgagatggaggtgcgcttcgagatcctcgaccaggacctcaacctcaagaagcaccgcaaccccatccaccacgtggaatcgcgcatcaagaagccggcgagcatcttcgagaagctgggccgctacggtaaggagcccacgctcgagaacatggagcgctacatcatggacatcgcgggcgtgcgcgtgatctgctcgtacatccacgacgtgtacaacctgctggagcttttgcgcaagcaggacgacctcaccatcgtcacggtgaaggactacatcgccaaccccaagcccaacggctaccgcagcctgcacgtcatcgtgcgcatccccgtgtacttccttgacaacaaggagctcatccccgtggaggtgcagctgcgcaccattgccatggacttctgggccagcctcgagcacgacctgaagtacaaggccgtgagcgaggtggagggcatcgactcctacgacgagctgaaggactgcagccgcatcatcgaggacgtggaggcccgcatgcagattctcgccggcgccctcgaggtggacgactagcaggcgccgcagccgcccgcgctcgcacgcccgaacgcaccctcccgacgttcgcgctcgcttgcccccagaacgctttcgcgcgcctccccccataacgcgaacagaccccgcatcgcagggcctgttcgcgaaagaaaaggggaggctagttgtcgaagttctccgagaagcgcgcgatctgggcgttctccttgagcacggccacgctctgcggctgctcgatgcggcggaagaagaagcgcaggtagtgcgccagcacgtaggccaccatgatcgtggccagcgcaacctccacgtagaacaccacgtcgaaggcgaagggaagcgccacgccgttcgcccggaaaaacgccgtgccctggccgagcgccgtggccgttatgacgaaggggaacgtcatggccgcgtagctggggtagaacttcaggcgcaacaggcgcggcaggcgggagagcaccaccaggaacagcacctgggccagcgccatcatcacgcccacgaacagggcgttcggcgcgtccgtcacggccaggtagcccacgatggacaggctcatgggggcggtgtagatgcagaacagcgggcgcgcgccctcgggcacctcgtgcttggcgtagcggtacgtcaccagcaccagcagcgccgcgtagcacgcgaagccgaaccagaagattacctggcccagggcctgcatcccgaacgcgggcgacgtgaccgaggccaccacgatgcccacgtagcagatgaagtaggtggggaacacctcgtgcagcttgaacgggcggaagaagcgcaccgtgaaccacacgatgagcgccaggtgcgccatcgtggccgccacccagagcgcgaacgcggggccgaaggccagcggcgccaggtagttggagaactgcatgagcgtcatgaacacggtgccgctcacgctggccatgatggagttatgcaggtcgtcgcggataagctggggaaacatgaccgccttcgccgccagcagcacgatgaggaacagcgcgacggcgccgcagaggatatggatgccctcgtaggccggctgcagcaggttgcccagcgccgtgagggcaagggcgacgcccgccgtgggaatgggtactttctctatgatgtcgcgcatggtcacgtgcctttcaatgccgtccttagatttgcttagacgcattctggcatgctcccatcaaaaagaaaaattatatatcgttatgcgttgataactatatataatagattgtcgttcgctcggcgattctgcaccgtaaaagggcaggtgatgtgcgccattgtaatgccgacgataccgcgcccgtcatgcgagcacaagcaacgaaaggattaccatgcaagatttccgcatgagcacgttcttgagcgtgtgccgaacgttgaactatacccggtcggcggcggagctcaatatcacgcaacccgccgtgtcgcagcacatcgcttatctggagaaggcgtacggcgcaaagctgctttcctaccgcggcaagaagctcgcgctcacgccggcaggcgagctgctgcgcgacgccgcggctaccatggcgcacgacgaggccacgctgcgcgacgccatcgccgcgttggctgggccgcgccgccgcctgcggctgggcatgacgctcaccgccggcgagtacgtgctggcggagccgctggcgcactacctggtgggccatcccgaggtgcaggtgcgcatcgcctcgtccgacaccgagcgcttgctggcgcagctgcatgccggcgagatcgattgcgcgctcgtggaggggtttttcgacaagagcgcctatgactggcgcgtgttcgccaccgagcatctcatggcggtctgcgcccccgacgcgccgcttgccggcgtgaaggagccccagcacttcgaggacctgctcgaccagcatatcctggtgcgggagcgcggctccggcacgcgcgccgtgctcgagcacgccctggccgcccggaacctttcggtggacagcttcgcgcgggcgacggaagtggagagcgtcaacatcataaagcagttcgctgccagcggctacggcatcgccttcctctacggcgccgccgtggtctgcgagctcgaagccggcacgctcgcgcgcatcccgttggcaggccacctcatcgagcacgacatcacgttcatccgccccaagggcagcgtgttcggagacgagtacgcccgcctgttcgacgacctgcgctcggtgtgaggccgcgagcatcctgcgcgaaatttccgcttgacttcgagtgcgctccaagttctatgatggtcgggcaatcctgacgagaggagacccccatgaggcccgatttggaatccacgccgaagctcggcttcggctgcatgcgcttgccgctgctggaccccgccgaccagcagagcatcgaccttgcgcagctcgagcagatggtggacgtgttcctggaaggcggcggcacgtacttcgacacggcgttcgtctaccacgagggcgcctcggagaaggcgctcggccaggcgctcgtggcgcggcacccgcgcgagtcgttcaccatcgcgacgaagtgcctggcctgggccatcggcagcgccgaggaggcgaagtccaacctgggcacgtcgcttgagcgcctgggcaccgactacatcgacttctacctgctgcacaacgtgggcggcccgcgcacggccaagttcgacgagcacggcatgtgggacttcgtgcgcgagcagaaggcggctggccgcatccgcaactggggcttctccatgcacgacggccctgaggcgctcgatgcgctgctcgaggcgcaccccgacgccgacttcgtgcagctgcaagtgaactatctggattgggagaacccggtcacgcggtcgcgcgcctgcatggaagtggccgccaagcacggcgtgcccgtggtggtcatggagcccgcgcgcggcgggcggctggccgagttgcccgagcaggtggccgcgccgcttttggcgtgccgccccgacctgagcatggcttcatgggcgtaccgcttctgctacaacctcccgaacgtgctcacggtgctctcgggcatgtccacgatcgagcaaacgcgccagaacgtggccgagttccgggcgagcgcgccgttctcgcccgaggaggagcgcgcgctggccgaagcgcgcgagatgcttgagaagctggccgccgtgccctgcacgaactgccgctactgcgtgaaggactgcccgcagggcgtggccatccccgagatcatgagcctgctgaacctcgagctcatgaccggcaaccgcgccttcgcgaagggcctctactcgtggcaggccgtgaagccggcctcggagtgcatcgcctgcggcgcgtgcgaggccatgtgcccccagagcatcgacatcgtccgtcagctggaaacggcagccgagcacttcgagtaggacagggcggtccgtctaatcgaataccgtacgcgaaaaagctctcatctattgagagctttttcgagcaattaaagcacggggaatgtttgctagaatgccacttgtgccggcatagtcccgagcgggcggcgcttcccgagagaggggaggtgatcgcctatgagcatcgaatgcgctcttgaaatcctgtacgccgccgcagcggtggcgacgatagccgggttcgttctggctgtctgggaacataagcggagggatgacgtgggaggagggggagaccccgagcgcaaaaaagatcggcgctagctggaactagtcgccgatctgggtaaacccgcgccgcccgtgtagcaacacctctaacgaggttggaacgggctttgccggtgctcctgcattatagcacgcatggcgggacgcgcaacgccgtgcaagtttgctccatcttcaaaagtttcatgagcggcaatcccctctgtcacggaatcggtgctctttacgctgccctttcctcatcctgatcccgtctttgcctgatcttgggagcatctttacgtgcgcctgaacccgcttttacctgcctttcgtagcatggtctgcaacgcgccgagcaatcggcggcgcggcaacgagacaacactccggcgctaaggccgggaatgcgaaaggatgggtcgaatggcagacgggtacctgagcaggcggcagttcgtggccggcggagcggctgtggcattggcgggcatgttcggcgtgatgacgggctgcacggccggggggtcgggcgcggcggcgggcgcggccgacccgcagtccggcaacggcggcggcgcgggcgacggctcgtccgagccgatcacgttcgtgtggctgccggacaactcctcgtcggacatgacgtcgtcgcgcgaggccatcggcgcagccatcctggcggcctgcgggcgcaaggccgagcttctgaccaccaccgactacaacgtggccatcgaggccatcgcctcgggcaaggcgcagatggcgctcctcggccccgagggctacgtgcaggccaacaagaagaactccgccgtgcaggcggcgttcacgaacagcgacgaggacggcggcctggacggggcgtgctactacagccgcatctgcgtgcgcaccgaggacgccgacgcgtacaagagcggcagcggctactccatcgagggcatcaagggcgggtcgttctcgttcgtgtccgccacctccacgtcgggtttcaaggtgccttcgagcggcatcgtggaggagttcgacctggacagttccgacgtgctcttggaggcgggcggcttcttcagcgaggtgttgttcggcaactcgcacgtgggctcggtggtgaacctgctctcgggcgacgccgacgctgccgcgttcgacgacgtcgacgtggacatgtacctggacctcgtgtccggcgagcccaacagcgtgggcgcggtgtaccaggccaaggccgacgccgaggcgcccatggacaccgtgcgcggcaagcagttcaccatcatcgccgtcacgccggtgctgaactcgcctttctgcttcaacgaggacgccatttccgaggaggaccgcacgaagatcgtcgaccacttctgctcggacgcggtggccaacgacccggccatcttcgtcgatcccgaggatgagaacgcgaagggcctgttcgaaaaggattccgacaagacgtgcttcgtgaagaccgacgacgcgtggtacgagcccatccgcaagctgggcggggccgcgtgatggccgagcctctgctggcggtgcggggcctgacgaagagctacgacggctggtcgaaggcgcttgacggcgtgtcgatggaggtggcgcgcggcgagttcgtgtccatcatcggctcgtcgggcgcgggcaagtccacgctgctgcgctgtgcgaaccgcctcgtcgatcccacccagggtacggtggcgttcgacggctgcgacgtcacgcgcgtgaagggccgcgagctgcgccaggtgcgccgccgcatcagcatgatcttccagcactacaacctggtgtaccgcgccacgtccatcgagaacgtgctgcagggccgcctgggctacaagtccacggcggccggcgcgctcgggctgttctcggaggacgagaagcgccgtgcgttcgaggcgctcgaccaggtgggcctggccgacttcgcctacacgcgcaccgaccagctgtccggcgggcagaagcagcgcgtgggcatcgcccgggcgctcgtgcaggacccgttgctcatgctggccgacgagcccatcgccagcctcgacccgaagtcgtcgcgcacggtcatggagcacctgcgctgggcggccgacgagctgggcatcgcgtgcctcgtgaacctgcaccaggtggatttcgcgttggagttctccgatcgcatcgtggcgctcaagaggggccggctcgtgttcgacggatcgccgtcccagctcgacgaggccgccatcgccgctatctacgagacggatgagggcgatggcgaaggggttggcggcgacgcgggcggtgcaggtggtgcgggggctgcgggcgcaccggcatcgggcggtcccggcgatatcactggcgccgcgcccgtggcgggagaggccgcatgatggagcgcacattgcggccgtcgggcctgatcgctggcttgcgcggtggaaaggctcagcggcgcggccaatacgacgcgtccttcttcgtccgccgcaccgcgtccctcgtagttgcggcgctcgtgttcgtggcgctcggcgcgctgtcgggcacgtacgtcggattcgatttcgtgcaggcaatcctcgacgtcccgggcgggttcgcgtggatggccgcccaattcgccccctccctcccttcccttggcaaattgggcaccatccttcccgccttgggttcgacgatcctcgcctccatcgcttccagctgcacggcggcggtgttggcctatatagtcgcagtgctcggttcgcgtacggtgggggtggggggacccgttcccctcatcgtgcgcggcatcgcgtcgctcttccgcaatatcccggtggtggcctgggctttcattttgctgttctcgttcaagcagagcgagttcaccgggttcttcgccctgttcctcaccagcttcggctacctgacgcgctgcttcctggaaagcatcgacgagatgggctccgggccggtggaggcgctgcgggcggcgggcgccacgtacggccagatcgtggtgcaggccgtcattccgatgagcatcacgtcggtggtcagctgggtgctctacatgattgagacgaacatccgcgacgccaccctcatcggcctgctcaccggcacgggtatcggtttcgtgttcgacgtgtactacaagagcttccgccacgacgtggccggcttggtgatactcgtcatcatcctggccgtggtggcgtgcgagctcgcctcgaacttcgtgaggaggaagatcctgtgacgggctgtgcagacaagatcgcggccgaagccgccgcggcctccctggcggaggaggtgggcgcgacgcgcagtatgccggccgacgagcgcggcgtcggcgctggcgcgggtgtcgcgccgatgcgggcgaacggtgcgcgtctgacccggtcgggcaagatcaaggtgcgggtgcccaacccgtcgaacgtggcgctgttcgccgtgctggccgctttggcgctggtgacggcgttcgcgctggccacgatggactacgggaaggtggcgttccccgcggcgatggcggccgcggtggacgatttcctcaccatgatgctgcagccgggcctcggcgggcacttcacgctgcccgacgtggtggagggcctgttcgtctcgctggcgctggcgctgctcaccacgttcatcggggcggcgatcgccttcgtgctggggcttctggccgcgtccaacctgtcgaaccgcgccgcgagcaacgccatcaaggtgctcatgagcgtggcgcgcgccgtgcccaccatcctgtgggtgctcgtgttcagcgtggccatcgggctggggccggaggcggccgtcatcggcctgctgttccacagcgtggcgtacctggtgaaggcgtactcggagagcttcgaggaagtcgacgccggcgtgatcgaggcactgcgcgccagcggcgcgtcgtggtggcaggtggtgttccagggcgtggtgcccgagaaggtgaacgagatgctgtcgtggacgttcatccgcttcgagatcaacttcgtgaacgccgtggccgtgggcgccgtggcgggcgcgggcggcatcggctaccagctgttcctggcggggagcttctactacaacatccacgaggtggggctgatcgtgtacttgtgccttgcggtggccgtggtgctggaagtggcggcgacgaagctgcggaaacggtacttggtgcagcggtaggttccacctgcggcggggcctcgggcagcgcccagtcgctcggcagtcctggctcgcacgaaacgtccactggacgtttcggctcgtgcggaactcgcttggtgggcgctacccgaggcccttcgagtcgatggcctactgctcacgcgggcgtttccgcagattagcggctgcacgttatgaggggactgtggatgacagggggacgtgacagggggagaccgtgacagggggagaccgtgacagggggacggttctcttgtcgttggggaaagagaagtcggttttgagacggacggaaaggattgttgtgagtttgaagcgatacgagagaacgcgggcgttggtggacggggatccgtcgctggcgcgggagattgtgcgggaggtggaaggcgagctgggcgcggaggcgctcgaggagctcgatgcgccgcgcgaggagctggtgatggtgcaggtgcgcgagacggcgcagggcggcctgttctacctgggcgaggcgctcatgacgtcgtgccgggtgcgcgtgggcccgtccgtgggactggggctcgtgctgggcagcgatcgctgccgcgcctacgagctggccgtggtggacgcggcgttcgcgggcgaggcaggtgcgccgcgcgcggagcgctgggacgggcggctgcggcaggagctcgcgcgcatcgaggcccgcgaggcggccgaggcgcgccgcgtcgccacgacgaaggtggacttttcgactatgaaggtggaagcatgatgataagggaagatgccgagctgcaccgggcgcagcgggcgttccgaagcgtgctcgacgcgttcgcacggcccggcaccgtgcagagcatcgagctggcgcccggcaacccggcgcgtccggccgcgctcgacgccgcgctcgaggcggccacgcggctgttcgtggatcaggcggtgacgttctgcgttgccgattccgagacggacgcgacgaccgcctacctgacgagcgagacgcatgcgcgccgcgcgcccctgcgcgatgccgacttcgtggtggttcccgcccgtgccgacgcgcagacggcacgcgaggcggtggccgaagcgtgccgcggcacgctgacctcgcccgagaagggcgcgaccgtgctcatgggctgcgcccgtctggccgaggtgcccgaggacggccaggtggccgagccggccgtccatgtggtggcgctgcgcggcccgggcgtggagcgcgagaaccgcttcgccgtcgaccgcgccgactggctgcgtgcccgcgacgcgcggggcgacgagttcccctgcggcatcgagatcgtgctggtggatccggacggccgcgtggttgccgtgccgcgcagctcccgcgcgacgttgcttgacgtgaaacaatcggcacaaggtggtgcgacaagggaacaaatgtttcacgtgaaacattccgaggctgcgcccggcgaggccgtggagaccggcgcttcggtcgcaggcggcgcgtcctccgcttccgccgaggaccgcgctttctccgtatccgccgcgtctgccgtgggctgcgcgtccgccgcgaaggaggtgcgctagatgggctacgtagccgtccgcggtggcgggaaggccatcgaggagagcctcaagctgctggagtacgagcgcgtgagcgcgtcgtccgcctggggaaccgacgagatcgagggcacgttccccgagctggtggaccaggtgatgggcgaggcatcgctgtacgccccgcgcctggcggcgctcgcgctcaagcaggcgcagggctcgcccgacgaggccgtgttcctgctgcgcgcgttccgctccacgctggagcgcccctatgtctcgcgtccggtggacaccggagccatgcgcgtcgctcgccgcgtgtcggccgccttcaaggacgtgcccggcggccaggtgctcggcgccacgcgcgactacagccaccgtttgctcgcgttcgatctggaaacggaaggtgccgaggagctggccgggaagcgcgccgcgctggcccgccacttcgaggaagccgtcggcgacgcccccgagtcccccgcaacccttcctcgcgtgctcgactacctgcgcaccgaggggctcgttgcgcgcgtgcctgccgacgaggccccgcccgtggatgccaccatggtgccgctcgcttttcccgcgccgcgctccgtgcgcttgcagacgctcgcgcgcggcatgacgcaagcggtggaggcgctgggctatgccgccattcgcgggttcggcccggcgcatcccacggtgggcgagctgcggcagggccgcgtggcggtggccgtggacgatccgctcgaggcgggcgggccggacgacgcctactacctgggctcgctccccgtgaccgaggtggagagcgtgttcgagggcgaaggcgaggacggcctcgcgctcgacatcggctacgggtgcgtgatcggccgcgccgagacgaaggccattgccatgagcgtgctcgaccactgcctcgagcatggcgacgcgcgctacccaacggaagacgaggagttcgtgctctaccacgtggacggcgtggaggccacgggcttcatctcgcacctcaagctgccgcactacgtgacgttccagtcgaagctgtccagcgtgcgcggcacgcgcggcgacgcggctcccgacgacgaccaagccgccgaccaggccgccatcgcggcactggaagcgaaggaggcgaccgatgcagcagcgctataactacgcgttcttcgacgaggcgtcgaagcgcgagatccgccgcgctctcatcaagggcgtgtccatccccggctatcaggtgcccttcgcctcgcgcgagatgcccatcggccgcggctggggcacgggcggcctgcagatcacgctggccatcatcggtcccgatgacacgctcaaggtgatcgaccaaggctccgacgacagcgtgaacgccgttaacatcaagaagctcgtcgttgacaccaccgacgtggaggtgactgacgacacggaatcggccacgctcatccagtcgcgccaccgtattcccgagcatccgctcgacgagggccagatcctcgtgctgcaagtgcccacgcccgagccgctgcgcagcttcgagcccagcgaggccgccaccaagcgcctccatgccgaagccgactacaccggcgcatggctcgagctgttcgaccagatcgtgcggtacgacgctaccacgaccggcgccgaccatcccgtgcaggtgttcggccgctacgtgatggccccgtcgcccatcccgcgcttcgataacctgaagcttaaccaggcgcggcacctcacgctgttaggagccggccgcgagaagaagatctacgccgtgccgcccttcaccgacgtcgtccccctcgacttcgaggactaccccttcgcggtggagcgcttcgacgggaagcgctgccgccgttgcggcgcgacgggcgtctacctcgacgagctcgtcgacgaagccaccggcgaaacgtactaccaatgcaacgacacctcatggtgcgcgcgtgtcccaaatggggacagtccccatgtgggacatcgcgcgcagcgacgcgaggaaggagctccccatgcttgatgcgcaacgattcggcgtcgacgaggagccgtgcctgtcggtgcggcacctgtcgaagcgcttcggggtgggatgcccgcactgcctcggcgcggtcgcgcagctcgagcgcaacgtgtgcccgcggtgcggcacggtgcacgccgtgcgcgatgtgagcctcgacgtgttcccgggcgagatcgtcggcatcgtcggcgagtcgggcagcgggaagtcgtcgctcatgaagtgcctgttcttcgacgaggaggccacggaaggagacgtgcgcgcccgcccgttcgacggcggcgcggcgaacctgctggaacggtcgtcccagcatcagcgcgccatccgaaacacggtgttcggcatggtgtaccagaacccctacctggggctgcgcatggatttctccagcctgtcgaacatcgcggagcagatgatcgccgccggcaaccgccacgtgggcgccatgcgcgatcgcggcaaggagctgctcgagcgcgtgaacatcccgctctcgcgcgccgccgagccgccgcgcaacttctccggcggcatgcagcagcgcgtgcagatcgccaaggcgctgtcgaacaacccgcccatcctcctgctcgacgaggtgaccacggggctcgacctgtccgtgcaggccgccgtgctcgacctcatccagcagatccgtcgcgacttcaacgtcagcatgctcgtggtcagccacgatttgggcgtcatccgcatgctggccgaccgcacgctcgtcatgctggacggccgcgtcatcgaaagcggcctgaccgaccagatattggaagacccgcagcacgcctacacccagcagctcgtctattcgcttctgtagtcccgaaaggactcatcccatgaacgacaactcctgcatcatccgcggcggcacggtggtgtgcgccgaccgggtgcttcccgaccacgacgtcgtggtcatcgacgggcgcatcgcggccatcgagcccgccggcgcgtccgacttcgacgcgcagcccgacgccaccgtgggcgtgctgcccatcgtggacgcgcgcggcgcgttcgtggcgcccggcctcatcgacatccactcggactacgtggagaacgtcgcctcgccgcgtccgagcgtggtcatggacctgaacacgtcgctgtacaaggccgaccgcgagctcgtgtcgcacggcatcaccaccatcttccactccctgtcggtgtacggcgcgcacatcttcgaccacaagcccatccgcgacttcggcaacgtgagcgcgctcatcgaccgtgtggccggcctgcgcgcgggcgaggagcgcgaccacctcatccgccaccgcctgcacatgcgcgtggagctggactcggtcgacctctacgacgacatcgaggcgttcctgcgctccggcaaggtggacctcgtgtcgttcatggaccacacgcccggccagggccagtaccgcgacctcctgctgttcggcgacacgctcaagggctaccgcgacgtcaccgacgacgaggtgcgcgacatcatccgccagcagcaggagagcagcaagatgacgtacgcgcagatcgcggccctggcgtccatcgcgtgcgagcgcggcatctccatcgcgtcgcacgacgacgacagcgcggagaagctcgcgttcatggacggcctggaggcctccatctccgagttccccatctcgctcgacgtggcccgcgaggcgcgcgcccgcggcctgcacacggtggccggcgcgccgaacgtgatgctgggccacagccactccggcaacctgagcgcgcgcgaggctgttgcggccggcgccatcgacgtgctgtgcagcgactactacccggcggcgctgctcgacgccgtgttcgcgctgcgcgacgagtgcgggctcgacatcgcgcgggccttcgcgctcgtgtccgcgaacccggcgaaggccgccggcatcgccgacgaggtgggatcgctcgcggtgggcaagcgcgccgacgtgctgctcgtgcgcgagatcgcctgcggcgaggccggcacgcgcacgatgcccgtggtcacgcgcgcgttcgtgggaggccgctccgtgttccgctcgcattaccccgaccagcctctcggctacgcccgcgacctgggcgagcacgtgcaggtccggcgcgccctcgcctccgaggcggtgtgacatggcgctcctggaaatcgatgacctctcgaagtccttcctgctgcatcgcgtggaccggcgcatccaagggtgccagcacgtgagcttcgccattgagccggggcagttcgtgggcatcaccgggcgcagcggcagcggcaagtccaccatcctgcgctgcatctggcgcacgaacctgcccgagcaggggcgcatcctgtacgattccgcccgcttcggcctcgtcgacctcgcgcaggccacgcagcgccagatgctctacctgcgcgccttcgagctgggctacgtgtcccagttcctcaacgcgctgccgcgccaaacggcccgtgacatcgtgctgaagagcgcgctcgaagcctacggcgccgacgagcgcgcccgcgccgagcaggagaccgagcgcatgctgcgccacttcgacctggacgagagcctgtgggagctctacccgcgcaccttctccggcggcgagaagctgcgcctcaacatcgccgccgccatgatcaagcgcccgcgcctgctgctcctggacgagcccaccgcctcgctcgacaacgcgtcgaagctcaaggtgcgcaccctcatcgagcagctcaaggccgagggcaccaccatgctcggcatcttccacgacctcgaattcatggacggcttgtgcgatcatgagttcaacatgcaggaagggatgatggcgtgaggaacgggcgggagcaaggacgaatcgcgacggcggccgcgcgcggcccggctctccacgcagcgcgcaggcgaactccggttacgtggcagtttttgacggtagttgatcattcggaagcgccgaatcgggccaaggtgtcggcagagaatacgcgtccctgcatttcacctggtcataagcgtggcgaaaatcgctatgaacgagccgactccgaggcgatgatcaactatcgtcgttttctgccacgactgaaggtttctcgtgcgcgcgggctcggcagggaaggggtgacggcatgaaagccgacctccacgtgcacaccaccatgtcggacggctcggacaccttcgaggaggtgctcgcccaggcgcgcgagcgcggcatcgggcgcatcgcgttcacgaaccacgacaccacgtgcggcctggacggggctgcggccctcggcgcgcgctacggcgtccaggtcacgggcggcatcgaggtgagcgcctacgacttccagcgcggccgcaaggtgcacgtgctgggcctcggcctgtgcgaggacgcgcccgcgctcgccgccctctgcggcccgctgctcgagcgccgcaaccagaactcgctctggcagctcgaccgcatggtggaagccggcctccccgtcgacgtcgagcgcgccctcgccctcggccgcgcctccacctgcctgtacaagcagcacctcatggccgcgctcaccggcgagccgcacccgagcgccgcctaccgcgcgctctaccgcagcctgttcaaggacggcggcatctgcgaccgcgacatcgcctacgtggacgtccgcgacgccgtgcgtgccattgcggaggacggcggcctgcccgtgctcgcgcatcccggccagctggacagctacgacctcgtccccgagctcgtccccctcggcctcgccggcatcgagcagcaccaccccgaccacacgcccgccgaccacgaccgctgcgcccagctggccgaacgctacgccctcgcctgcaccggcggctccgactaccacggccgcttcggctccatcccgcacgtgggctaccgcattccccaagcctgaccgcgaatccccctgccgtcaaaatgcctcgatgttggcggccgccgccgtcgggctttgccggtgtgagctcgcttccctctgccgttccggcatgccgatgacgcgtgcttagcggcgcggatgcggagcaggctgaatggcttgatgcacacgccgacgaagcggggtcgccatccggagccggcttatcggaaagctgtctttcggcgagaagttgaatcgccgtccgtggcccatgcctgctgttcgcgctacacttaccagctatggaaaagcagaccttgcatatcgcgcagcgcacccggatcgacggacctgtcggctgccttcccgatgatcccgtcgttctcggcgtggacgtgggcggcacgcatacgaaggtcgcggcgttcgacctcggcggcgagttgctgggcacccgcgcgctcgacctactcgcgcacggcgagggcttcggcacaggggagcgcctgaaatgacgaatgcccgatgcgggagcgcttccatgcgcccgcttacctcgcggatcgcccggttcgcgcgcgagcgcacggtgcttgtcgtgtcggccttagccgccttggcaactgtggccttcgtcccgcccgacgaagcgtatctcggctatttcgacgtgaagacgctcgcctgcctgttcgggatcctcgccgtcgtgggtgcgctgcgcggcatcggcctgttcgagcatgcggcgcgcctcatcgtagcgcgcttcttcacctgccggtcggccgtggcagcgctcgtggggtccacgctcgtgctttcgatgttcgccacgaacgacctggcgctcatcatgatgctgcccctctcggccgccacgctgctcaaagccggatgggagcgctccctgcccttcgcgttcatcatgcagaacctggcggcgaacctcggcggcatgatcctgccgttcggcaatccgcagaacctctacctgtacgagcgcttctccatcccgctgggtgatttcctctccagcatggcgctgcccttcgcggtctcggtcgtgctcatcgccctctgctgcgtcttgttcgccaagccagagcccccgaaagcaacgaaaaaacgagcatcggaaaaagaggcagcagaaaaaggcgtgacgaaaaaacgagcggaagaaaagcgcgttgggaagaatcggtcagcggaggaacgagcaacggaaagctcgcttgcagatgagggccggcagcaggcggcatcctccgcatctggcgagcccctcgaacgaacggatgtttcacgtgaaacatccgcctccgaacaggggaaagatgcctatgccgccactccgcgcatcgtctcggcgcgccggccgcgagcgctcgcttatgcggcactgatggcgctggtcatcgcgtcggtgttccggatcgtgccctatccggttgcggtgggcgccgtcgtggtcgcgctcggcgcgctcgaccggcgggcgctgaggacggtggattgggggctgctgctcacgttcgcctgcttcttcgtgttcgccggcaacatggcgcgcatcccggccgtggagggcttcttctcgttctggatgcacgagaacgcgctgctcgtggctgcaggcgccagccaggtgatcagcaacgttcctgccgccgtgctgctgtcgcacttcgccgacggctacgcggcgctgctcgtgggcgtgaacatcggtggcgccggcacgctcgtggcatcgcttgccagtctcatcacgttcaacgagtaccgcatcgtccgccgcggcttccccggccgccctgcgctctcccgcgtcacgcccggtgcctacctcgcccgcttcaccgcgtacaacgcggcctttctcgccgtgctcctgttcgtgtgcgcgcccttcgtgtaggggcgtgccggacgggtttccactccaccgctttagtgtgataaaccgtacacatgccaaaacgccccgttcgcgggggcccattcatcgaaaacgtcgttcggcgacggataactgtttgaaaagagagggctggcgctttatagtagtgcgactgcatcatacttcatgacgtgaaagcgagatgcagaggaaaggggagagaccaatgaacatcaagaaaatggttgcgctcgttgcaaccggcgccctcgcggcgtcgctcgcgctgttcggctgctcgtcgggcgacgggcaggactccggcgcgaaggacgacaaggcggccggcaacgagtccggctacacgctggtgaacgacggcaagctgacggtggcggcttcgctcgacttcccgccgttcgagaacctgaacggcgacacgcccgagggcttcgaggtggagctcatgggccttctggccgaggagatgggcctggagatcaactacctgccgtccacgaagttcgacaccatcgttccgctcatccagaccggcggcaaggccgatgtgggtgtttcgggcatcaccatcaccgacgagcgcctggaccaggtcgacttcaccgacgccgtgtgcgacgtgaaccagagcatcaccgtgctcaaggattcgggcgtcaccgacgtggcgcagctcgagggcaagaaggtgggcgcccagaccggcaccacgggctacgagtgggctgccgagaacatcaaggacgtggagatggtgggcttcgacgagatgaccgccgtgttcctggcgctgcagtccggccagatcgacgccattgcggtggacctgccggtggcgaactactacgtgaagacggcctacaccgactgccaggtcatcaaggagatccccacgggcgagcagtacgccatcgcggtgagcaaggacagccccgagctgaccaaggcgctcaacacggcgctcaaggccatgcgcgagaacgggaagtacgacgagcttgccgccaagtggttgcagtaacgcacagatagggtgagcatgcagatcgcattcgcatttgcgcggaaacacctcgcaggcgccgcggcggttctcttcgccgcggcgctggcggtctcgttcgtcttgccggtccaagcgcacgcgctcgacgtggagcgctggaccgccaagccgaacaaggacggcgacaacaccacggttctgggagccacggcgacgcgcgtcacgtggcagggccagacggcggaggacgagtcccttgcctccgtgaccatcgagatgcccgagggcaccaccgtcggggccgagaacgtgaagaccaccgtgctcgtggggctcgatcgcctggatgcggcgtccgaggccgtcgtggacggcaacgacgtcacggtgacgctcgccgagcctgcgccggccggtgcgctcgtcatggtggagtgcaaccgcacgctcctgccgggcggcggcgggtcgttcggcctggcgggcagttacaccacggccgacgggcagcgccacgacatgccggccacggaccaggtcatcaacgtgacgggcacctcgcccgccgagcagctgtccagctggctcaaccagcaggactgggtgaaggcgtggaactccaacaagttcctgcacctgttcttcgacccggccatcatcgtcacgtccgtgccggcgctgttcgccggctggctcgtgtcgatcggcgtggtggtggtgagcttcccgctggccatccccctgggccttctgctgtcgtttttacgcatggcgaagcaccgccttccgcgcgccatcggcgccacgtacatcaacatcgtgcgcggaacgccgctgttcctgcagctctacatcgcgttcttcggcctgccgctcatgggcgtgcagatggacaacttcaccatgggcgccatcgtgctggtcatgaactccagcgcgtacctggccgagatattccgcgcgggcatccagtccatcagccaagggcagttcgaggcggcgcggtcgctgggcatgaacggtgcgcagaccatgttcttcgttatcatcccgcagacggtacggcgtgtgattcccactatgaccagcgagttcatcctcatgtacaaggacacctcgctcctggccgccgtgggcgtgaccgagctcatgatgtacgcgaagaccatcacggccgccacgggcaacgtgacgccctatatcgtggccgccgggttctacctcatcgtcaccattccgctcacgaagctcatcaacaccatggaagcgcgcatgtccaacgggcgccgcaagcataagaagggccccgccgaccgcagcatcacgtcggccgcctcggtggtgcctgattccgacgccggcgtggcgcgcagcatccgcctgtccgagacgttcgccgggcccgcctcgcagaccgacgcggcaacgcgcatctacgaggatgcgaagcgcaacggcaaccatatcagccattaaggaggtgcggatcatgagcgaagcgaacaacggcgcggcgggtatcggggcggcagacatcgccggcgcggacgctgcggacgagacggtcatccgcatcgaggacctgcgcaagacgttcggcgacaacgaggtgctgcgcggtatcgacctcgacgtgcgccgcggcgaggtagtggtgatcctgggcccgtccggctcgggcaagtccacgctgctgcgctgcgtgaacctgctggagaagcccacgggcggccgcatcttcttcgaggacaccgagatcaccgcgaagaagaccgacatcaacaaggtgcgtgccaaggtgggcatggtgttccagaacttcaacctgttcccacacctcacggccaagaagaacgttatgctggcgcagcagaaggtgctgcaccgcaacaaggaggaggccgcgcgcatcgccgaggagcagctggagaaggtgggcctgggcgagcgtatagactaccggccctccgagctctccggcggccagcagcagcgcgtggccatcgcccgcgcgctcgccatggacccgcacgtcatgctgttcgacgaggccacgagcgcgctcgaccccgagctcgtgcgcgacgtgctgagcgtgatgaaggagctcgcccgcggcggcatgaccatgatcgtggtgacgcacgagatgggcttcgcccgcgacgtagccgaccgcgtcatcttcatggacggcggccacatcgtggagcagggcacccccgaagaggtgttcgaccatccgacgtccgaccgcacgaaggacttcctgggccatatctcgtaggggctcctctttcagccggccaaaggcgcgtcacctgcatagccggccgaagatgtgttgccgcataaccggccgaaggcgtgccgccgcatagagccggctgggggcatgcgtatcgggggagccgtccggcgcatggagaaacctccgaggttgaccacatgcgccggacggcctcccctgcacgcgtggtccctgccggctggatggaaaggcggcatttccggcgaatggaagagcggcgtatggcccgccggaaggaagagcggtgcaggggctggaggggagcgttgcgcggccgactgaatggaagcggcggcggatgcttgcagggggaaggggtcgatgagcggcaagatatgttttttcccgccccctctatcccggcgattcttcggatcccctcgttttgtgcaaaacgccgccgtttttcctacggcaaccgcgggcagctcccctgcatgaggttacgatttgattcctttttatgcagaactatggaaacaaagaagaagaatatccaatatggtcatgatctcgtttcgcgcaaagcttcaccaaaccgtaatatttttgtgcatatgaacaagatcattgtttttttgttaaaaatcattcgaaaatttgtgttgcaggtgaacaaaaaagatggtataacttcctcaacggcaaatctggtaagcatgcgacggtaggaaaaccgggagcgtcatgaaccaccagtctcccagcactctgagttgcagcgcaaaaaccagcaagctgcagtagtatgtagtgtgccacccaacggtagcgaagagcgctgccacagaaaggagactgtcatggcgaagatagtcaattcttggaacgactgggatccgctgaagcgcgtcatcgtgggtcgttgcgacaactcgatgatcccccccgaggagcccgcgacttccgagaaggtgcctgtcgactccgagatgcgcggcatgtggggcctgcgtcccctcgccaccgtcgagcgtggcaacgagtgcctcgagaacctcgtgaagatcctcgaggaccgcggtgtcgtcgtcgaccgtcccaccccgctgcagtggaaccaggccatcggcacgccggacttccgcaacgactccatgatgacctgcatgcctccgcgtgacatcctgctcaccgtcggcaacgagatcatggcctccgcgaactccttccgctgccgctacttcgagtacctggcctactggcccctcatgaagcagtacttcgacgaggatcccgacttcctgtggacccaggctccccgtccccgcctgacggacgcctcctacaagcacaactactacgacgagaagatcacgctggaagagcgcctcgtccgcacggccaacaaggacttcgtgaccaccgaggtcgagccgatgtgggatgccgccgacgtgatgcgcatgggcaaggacctgttcatccagcacggcctgaccacgaaccgcacggccatggactggttccagcgctactaccccgagtaccgcgtgcacgccgtgaacttccccggcgacccgtacccgatccacatcgacgccaccttcgtgccgctgcgtccgggcctgatcatcaacaacccgcaccgcaagctccccgaagagcagcgcgccatcttcgaggccaacgattggcagatcgtcgaagccgcccagccggcccacgacgagccgccggcgctgtgctacagctccgtctggctgtccatgaactgcctcgtgctcgacccgaagacggtcatcgtggaggcttccgaggttcaccagcaggagcagatggacaagctcggcatgaacgtcatcccctgcgacctgcgcgacgcctatccgttcggcggcggcctgcactgctccacggctgacgtctaccgcgagggcgactgcctcgactacttcccgaaccgcgtcaaggatcccaccctggtgcgcccggagatgtggaacgactagtcgcttagccgcctagcacaacaagccacttgctgaaagcaagcgtcgattaacagaagaaaggggatctggcagggtttatcgctccagatcccctttcctgctcttcaacctataccaccgcatgcacgattcggccctgtgaggccgactaggtacccgtatacccattcggcctcacagggcccgatttgcggctggcaaaggggatttcctttttcttgctactggttttaaggaggaccaatggcagataccaacaaaaccaccaacacgccggatctgggtgacaagcccgagctcggcaacggcaaggacggctccggcagctaccagatgagggtgggcttcggcaccatcgccatgctcatctcggcgaccggcatgggcctcgtgccgctgttcagccgctgggccacgcgcaccgacatgttcaacggggcggcgggcctgaacgccggcgattccatcggcgccctcatggccgtgggacgcatgggcatgggcgtcctcttcttcgtcgtcctgcttcttgccacgcacaaggtgcatgtgttcaagaagctcaagctcacgccggctatcgcgctcggcggcctcatgatcggcatgtcgttggcgtgctacgtcacgtccacgctgctcaccaccgtgtcgaacgcggttctgttcatctacataggcccggtggtctgcgtattgctcgcgcgcatcttccgcaaggagcctatgtccaagctgcagtggatctgcctgggggcggtgttcatcggcatgctgttcggcaacaacctcatgggcttcggcgacaacggcttcttcgtggacttcaacctcgtgccgtccacgcccgagttcccgcagaagggcatcggcgatgcgttcggcctcgcttccggcttcttctacggcgcctcgatgttcttcaacggctatcgcaaggacgccgacaccacggcgcgcggcgtgtggaacttcatcttcgccgtcatcggcgccggctccatcaccatcgtgctgaactcgctcggcagcatcgacccgagcatggccaactgggcgctcaacatccacttcacgccgttcaactggattggcgccgtgctcctgtggatcatctgcggtcccatcgcgctcggattcctgctggttgccggccgtaacctgcctgccgcagactacggcaccatcgcgtactgggaggtgcccgtcgccatcttcgtgggcctcgtggtgttcggcgaggcgctcaccatcaacaccatcatcggcggcctgctcatcatcggcggcggcgcagtgccctccatcaggggcatgatcgtcggccgcaagcagaagcagcaggaggagatcagcgagaacctggctgcccgcctggaaaaggccgaggaagacgagcatctgcagtaggccgagcgagaagaaaggaacggtgtgtcatatgaagatcacgaccaatctgacccacatcgccaccgaggtcgagttcgagcctgccctgaccgaggagcagctcaaggaggcgttcggggcagtcggcctcaagggcttccccgccgagctggacattgcagaacgcacggaagagcatgtgcagatgatggcgctggactcgttcctcgggttcgcccagacgtcgggcgtggcggccgtcacctacgatgtgacgtatttcccgcatgccgatgacgccgaggtgacctaccagctcaagcagcttgcacgcgagctggagatcagcgccgacgttatccgcgacgtatgcgccgacgagatccgcgagtacctggagctcgacgcgaagcgcgatgccaacgcccccgtgcacagcatcgtggaatgctacgtgggcggcacggcgttcgcctggtacggcatgaacgagtacccgcgcttgaagcgcgtcatcctgcgcaagctggcccagggcggtcaacgggccaagcacaacttcatcatgcgtgcgagcaaggcgcaggtcgacctgctcgaagattactgatagccgactgggcacgacaggggttctgaaaacgcggcggctcggttctgccggccgccgcgcctcgggcatcgcagcgtcggggttctcgctgcgatcttcccttgccgccgcttgctccagctggtttccgcgcgttccgcgccttctcccagaccccggtcgcggagcgctgcctgccgggtaaacgttacatcttggtggtaggccgagttttggcgttatcataacggttgctggaagcgtatctccccatttttgtcaggagggctccacatgaagcgaaggcttgccaagcggttttgtccccggctccacaaagccgcgcatttcttaggggactatcatgaatgttgaaagcggtactgccaacgctgttcctccccggtcgttctcggaagaagagcagcataaaaccctgaaaaaggtcacgttctcgtcgttcctgggcaatttcatcgaatggttcgactacgcgagttattcctacctggccacggtcatcgcgctcgtgttcttcccgggcgaggaccgcttcgtggcggtgatgagcacgttcgccgtgttcgcgctctcgttcctcgtgcgccccatcggtgcggtgttctgggggaacatgggcgacaagaagggccgcaagtgggccttgtccatctccatcctcatgatgagcggtgcgacgttcctcatcggctgtctgcccggctacgccctcctcggcgtgggcgcgccgctgctgctgcttgcgctgcgcatggtgcagagcttctcggccgccggcgagtatgcgggtgcggccacgttcatcgccgagtacgcgccgaagaaccaccgcggcttctactgctccatggtgccggcgtccacggccacgggcctgctcgtgggctcgctgttcgccacgttcatgttcaacacctggggcgccacgtcggacttcgtcgtggactggggctggcgcataccgttcttgctcgcgctgccgctgggctacatcacgcactacatccgaacgcatctcgaggattccccggtgtacgaggagatgcaggagcacctgaagcagcagggttccagcgtgaagcatcccatccgcacgctgttcaagaagcacctgcgcgtgctcatcatctcgttcggcgcctgcgtgttgaacgccgtgggcttctatgcggtgctcacctacctgccgaactacctcgagaccacgctgaactacgatccgagcgcggcatccatcatcaccactatcgtgctggtggcctacatcgggttcatcttcgtgtccggccgcatctccgaccgcttcggccgcaagaagatgctcatcatcgcctgcgtcgggttcatcgtgctcaccatcccggcgttcatgctgctgggtacgaagaacttctggatcatcctgctggtcgagctggtcatgtgcctcatactcaccatcaacgacggcacgctgtccagctacctgaccgagacgttccccaccgacgtgcgctactccgggttcgcgttgagcttcaacctggccaatgccatcttcggcggctcggcgtcgttcatctcgttctggttgatcgatatgacgggcaacgacatcgcgcccgggttctacatggtgttcatcgccgcgctggcgctggtggccatgatcctgtcgcacgagcacacgggcaaggacttgtccgaggtgtaggcggggtgcgtgcgccgcgcgctgcgaggcctgccgggagccgctccgttggggcggctccttctttcggcggccgtccgggccgcggcggcgggccgtctcggcaccggcgcgtatttcatcgtataatggggcggttgcaacagcggcagggagcaggttggaggggtctatgagcgaatcgtcaacgccgaagtcattgaaggctcagatcacgcgcacgtcgctcgtgctcgccgccgccgcgctcctgcgcgaggagggtcccaaggccgtcacgtaccgcaaggtggcgaagtgggccggggcggcgtcctcgtcggtgggctactacttcgactccgtcaccgagctcttgcacgaggcgggcatgtacaacatccagctgtgggcgcagcgcgccgagcgggtggcggatttgtgcgagaagctggagcccgaggaatgccgcgcgcgcattaccgagcttctgacgcgcgcgtgcctgccggacgactccatcgtgcccaaggcgcactacgcgcagctcatcggcgcggctgattcgagcgtggtcacggaggcctaccgcaagggccgcgttctgctggatgccgccatcgcgcgcatcctcgagcgggcgggcgttcccatgacgccgcgcatcgtggtggccatcgtcgatggtgccgccgtggcctctatctccgagggtctggacgtgcgcgagaccaccggcaagctgctcgacgaggctatcgaggcctacacgaaggccgctggctgctagaggctttcccgccggccctgaaagcctctagctcggcttcgccgtcgtccgtttgcgcatcccgcatccaggggcaccgctgtatacgcacctgcgcccggcgccgtcgttgcgcccttgcccggcaccgcgcctgcatgcgcctgcagccgagcctcctgcacctcctttcatatcccgaacctcacgcttgagcgacgggagagtgaaccttcttccctccatcgctctccctttcctgcgtctggtagaacggacggacgcaagcaaatgcgacggcatccatctgccttttgggatggcggcgtcgcccgtctaggaaaggagttggagcatgagcgaaacccgtcagcaggcggtcgcgccctcggccgatcccggtcccgtgggcaaggtgagccgcccgtctttcaagcggtctttgacgttcttcgggttcttcgccatcaccgcgtccatggtgatgacggtgtacgagtacccttcgttcgcctcgtccgggttccagctggtgttcttcttgatcatcggcggcatcctgtggtttttgcccgttgccatgtgcgcggcggaaatggccacggtgaagggatgggagtccggcggcatcttctcgtgggttggcaacacgctggggaggcgctggggtttcgccgcgctgttcttccagtggttccagatcaccgtgggcttcgtgaccatggcgttcttcatattggcggcgttcgcctacgtggtgaaatgggacgcgctttacaacaacccgctggtcatgttcttcggcgtggccgccatcgtgtggatcctcacgctcacgcagctgggcggcacgaagtacacggcgcgcatctcgaaggtgggcttcgtgggcggcatcatcctgccggtcatcgtgcttctggtgggcctgttgtactacttcgccacgggcggcgtgtcgcagatcaacatgacgccggccacgttcgtgcccgacttcggcaaggtggacacgctcgtgatcttcgcatcgttcatcctggcttacatgggtgtggaagcgtccgcctcgcacgtgaacgagctgaagaaccctaaccgcaactaccccctggccatgatcatcctggcggtgctcaccatcgcgctcgatgcgctgggcggcttggccgtggccacgacgctgccggcgtcggtgctggacggcaacctgtcgttcggcgtgatcgaggcgttccgcgccatcttcgtgcagcacatcggtcccggcctcagctggatcgtgttcgcggtggcgctgcttttggcgctgggcgtgctggccgagatttcggcatggatcgtgggcccgtcgcgcgcgctgctcgacacggcgcacgacggcatcctgcccccctccttcaagaaggtcaacaagcacggcgtgtcggtgaagaccgtggtcatccaggcctgcatcgtcacggtgtgggatgcggtgctctgcggctccatcgcgctgtccggcgggtccagctcgtcggtgggctaccttacggccatcggcctgacggtggtcatctacctggtgggctacgtgctgttcttcctcgggtacttctatctgatcttcaagaagaaggacctgccgcgttcgttccagctgccgggcggcacgccgttcaaggccattgtggcgggcgccggcctgttcatgaccgtggcgacgctcatcatctcgttcttcccgtcgtcgaacctcgacgctcagtcgaacatggtgtaccaggccacgctcggcatcgcgttcgtgatatcggtggccatcccgttcgtcatctacgcgctgcggcataggtgggcgccgcagggcccgaccgaccgtgcagcggtcggtgccgctgtcggcgcgggcgctggtgcggcagctgggacgcatgctgccggcgcgcatgtcggcaagggcgccccgatgggcacggcggcgcgcgcggtgcccctgggcccgaacgcccgcaaggcggcgcatccgtccgatccggccgcggccgatcctaagaagggcgcggccccgacgacgaagtcgagcacgctcggcgacagcgggcccatcaacaagcgcacccgggcgtcggagaacctgcgcggcggcaagccgagcggggcgggagcggccggcatgtcggccggcggcgggcccggttccgatttcggcgcgacggtcgcgcgcggcatctccgccgcggtggtcagcgtgaccagtcgtccctccggccccatggcagtcgattccggccccacggtcaccacggacgacgtgccggccgagccccagcccgtcatgcgcgacgaggtggcggtgcgcgagatcgacctcgatacgggcgccggcgcccatgaggcgccgccctcgtgcggggtggcggcgcatgcgcgcaagagcaacgtcaaggatgccggcgaggtgcgcgacgacttgctggagcgcgaggccgagggcgacccgtcgctgcgtgcgagcgtcaccgaggccgtggtgggcgagcgtgtcccccgtgccgatccggactcgcccgacccgcgacgagagaccggcatcgacacgaacggccccgactcgaacggcccggcgtcgcgctaggcccctctcggcaacgggtagacggccggcgcggcgatccgcgccggcacgccccgcctgcgccgccgggcgcggtgcaggcggggcacccgttcgccctctgattctggttccaaccctacttaccaggaggttttcatgaaggaacaaacgtcaaccagcaagatcctcgacacgatggacgagggcaccaagtactccacgcccatcttcggctccgaggcgtccgacgtggccatgccgcgcacgcagatgaacgacaagccggtcgagccgcgcatcgcctacgagatgatcaaggagtacctgtccatcgagggcaacgccacgcagaacctcaccacgttctgccagacctacatggagcccatggccacgaagatcatggccgagaccatggagaagaacgccatcgacaaggacgagtaccccatgacggccgacctcgagaaccgctgcgtcgccatgatcggcgacctgtggcacgcgaaccccgacgaggagcccatgggcacctccacggtgggctcgtccgaggcctgcatgctgggcggcttgggcatgctgttccgctggaagaagctcgcgaaggacgccggcatcgacatctacaccgagcagcgcccgaacctggtgatctccgcaggctaccaggtgtgctgggagaagttctgccgctattgggacatcgagatgcgcctcgtgccgcttgagaaggaccatctgtcgctgaacatggacacggtcatggactacgtggacgaccacaccatcggcattacggccatcctcggcatcacctacaccggcaagttcgacgacgtgcagaagctcgacgagctggtggaagcgtacaaccaggagcatccgaagctgccgatccgcatccacgtcgacggcgcgtcgggcggcatgttcgccccgttcgtggagcccgacctggtgtgggacttccagctgaagaacgtgtggtccatcaactgctccggccataagtacggcctcgtgtaccccggcatcggctgggtggtgtggcgcagcaaggaagcgctgcccgaggacctgatcttctgggtgagctacctgggcggcgaggaggccacgatggccatcaacttctcgcgcagcgcctcgcagatcgtgggccagtactacgtgctcatgcgcaacggcttcgagggcttcaaggagatccaggagcgcacgctcgacgtggcgcgctacctggccgccgagctcaaggagatgggcatcttcgagatctacgaggatgcgtcgcacattccgatcgtgtgctggggcctgaaggacgacgccgacgtggagtggtcgctgtacgacctgtccgaccgcctgcgcatgagcggctggctggtgcccgcgtacccgatgcccgccgatatgcaggacaccaccgtccagcgcgtcgtggcgcgcgccgacttctcgatgcagctgtgtatcaagctggtcgaggatatgaagaaggagatggacacgctgaacaaggcgaagttcgtcaccggcaacacccagggcgtcatccagaccggcttcaaccacggcggccgctctgccgtcgacaaggtcgagaaggtccagacgaaggcgaagaccacgcagaagtaagtgcgccgaccccgccccgacctccccggtcggggcgctttttcggtgctggaggaaagcagaagggcctcttatttagattacggtaatagaattgaaaagaatttctgatattttaccgtaacgggcaatcaggcccccgaaatcccctccgaaggcgagaaaaccgcccaaaacagcgggaagagccgcacgttggatgcccaaaagcgggcttcggacaagaattcccgcgattcggtaatatatcgataaaaaattccaaatccattaccgtagccgaatattcgatatcgtgaacgcgatcaacttgcttctgatcgacacacgacgtgcgttttgctcgctgcgactctacccgaagagctggtagccgaagtagcctagaacggcgcctaccgcggcggctgcgagggtgaggagcacgcctctgagcacgggatgccgccgtgcgcgcaggcttttggcgttgttgcggtcgatgggctcacctttcgagaaggccatcagctcgcgatacgtcaccacgtcgtgctgcttcttcaggtgctcgaccaccgtgagcatgaccaagccgatgccccacaccagcagcccgatgatggcggacggcacgagcccccaatcccagaaggtgaaccctccgatgaagagcgcacatccgacgaccacgactgcggtccctccccacgccaggtagatcatcttccggtagtctttctcgattgcttccttcatggcttccacgtctcctttgatcagttcgtcgaccgttacgtcgaagaggacgctaaggagcagcaggctttccacgtcagggtaggtcttgtcgttctcccagcttgagacggtctggcgcgagacgtagatcttcgcggcgaggtcgtcttgcgagagtccgcgttccgttcggtggcgtttgatctggctgccgagctccatgcgtttcccttcgttgatccaaggttgccatgacgcagggaagtgtaccatcaaagggctttgacacgtctcgcttcgcgacccttttctgtgtcaaaagtgctttacaatacgtttgaacaggtgttatttagaatgacgcaggacgttgccgggagtgcgcatgcggggcggcgcctccagctgtacagagagaacgccccctgcgctgaatccggttctcgttcgccatttgggaccggattcagcgcagggggcgcagggggaagaggtggccacgcggagcgcgtcgcgcgcgaccaccggtgatagcggaagagcttagtcctcgcgctcgatgggcatgctcatgcagcgcgggccgccacggccgcgggacagctcggcggagggcacgatgatgaggtcgaggcccttgtcgcgcagcaccttgttcgtgacgtcgttgcgctcgtacaccacgatcttgcccggggcgatgcacagcgtgttcgagccgtcgttccactgctcgcgctcggccgcgatgcggtcgccgccgccgcaggggatgagctccacgggatggccgacgtaggtctccaggatgctctccagcgtgccgttcacttccttgaccttgatgccgtcgccttcggcggtgatctcgaacaccgtcagcgggcccatgatgccggggtggatggtgaacttgtccgtgtcgatctgcgtgaacacggtgtcgaggtgcatgaaggcgcgggagttcgggatgttgaacgccaggatggtctcgatggggctcgtcggatcgccgaagatgttcttcgcgatagcgtcgatggcatcgggctcggtgcgctgggaaatgccgatggccagcaccttgtcgttgatgttgaggatgtcgccgccctcgatgtggaacgtgttgtagcggctgtagtactcaggcgtgcccttgagcatcggatggtacttgaagatgtactcgccgtagatggtctcgcggttgcgggtctcggagtacatgcggttgatggacacgccgttgccgatcatcgcgaacgggtcgcgggtgaagtacaggttcggcatgggcttgacgaccatcttggaggactcggacaccaggtccaccagcgagttggacttgtcggtgtggagctcggtgaggttgatgccctccatcgtcttcagcacgaggtccttggcgtcggggtagttctcctgcaggtagtcgaagatgatcttctggtagcgatccgtgcggatgccggcctcttcgatccactgcttgaggaactgctcgcgcagctcggggttggcctcgagaacctcggccatgaggtcttccaggtaaaacacttcgacgccgttgtcgcgcagagcctgcgcgaacgcgtcatgctcctcctgggcgaccttcaagaacgggatgtcgtcgaacagcagctcttcgagcgtgttcggcgtcaggttcagaagctctttgcccgggcggtgcagcaggactttcttcaagggcttgatctcgctcttgacgttcactcctgacatgtgcaaccctccttcggtttgtcggcccgcgcgtcctttaagcgcgccggcctttcttcgccaagtgcgtccgcggcgcgatgccgtgacgcgttggtctcaccatgcgccctccgctgcgtgaaggaaagatgtaaagcgggtttaccggtgcatcgatcggggtgtacccggccgggaaagacgctaaacctcaaataaaccgcaggtgggagcaatgcgcatcctgcaaccatacactgcggccgcgcgcgttcggctcggatgccgcagccttttccgaaacgatgccgattcgtgtatcatgggtcatgttgcagacggccgtgcgcaagcgaggaaagaggtgctccttcgtgggattcgtgctcttccactacacgctcttcgtgctgttgggttctatcatggcatcggctgcatgcctttccgcctacctggtatcgcgcaagcgcgccatgcggtacgccttcgctggcttcctgttctacttcttcgacgtggcgtgggtgttccaagacgacttcttcaccggcgccgacgcggggctgggcgcggcgtacgcggtggtcatgtcgctggtgctcgtggtgacgggcggcgggttcctcacgtcgttctggcttctggtatgcgattacctgggcgaggagcgccgtgtgttcaaggtggcgccggccgtgctgttcgtggcggcgagcgtggccgtgctggcgctgctgcccaagggcgatttgcgcagcttcctgttctacttcccgcgcgagctgtacctgttctggatgctgctgttcgccgggttccgcttcctcgtgacgaaggacgagtccgggcgcaaccgcttgcgccgccaccgcttgctctacgtgctgttgtgggtgttgggcctgatgatcgttgcggaggacgcctgcgtgttcctgctgcccgaccccgtcctgctcgggccgcgcgcctatgcgcccgagcgcaacttcgccgagaacgtgcttatgctgtgctgcgcgttcttcgcctgccgcgatgccttccgcgtgctgtcgctgcgcttcgagcggcctcccatgcacgagggcggccggcaggaggagctcatcgacgacaacctgctcctgtacggcaagcgctaccgcctgtccgagcgcgagtgcgaggtgctgcgctacgtgctggtgggcaaggacaaccagaacatcgcctccgccatgcacctggccttgagcaccgtgaaggtgcacgtgcacaacatcctgcagaaaacgggccagccgaaccgccaggccctcgtccaggatttctggaagacatcgtagaacggcctagagcgtgccaaaagcccgggggcaatggcacattttccgatgtgccattgcccccgggcttttggcacgctcccctgtcgcgctcgctctactgctccgccagccatcttctcaacatgctcacgatgtcgctgaccaggaagtcgaactggtagttgcacagcgcctcgcccagggcggggcccgcgcgcgagcggccttggccgatcccgcttcgacgccggattcgatagcgatggcgatgcgggcgtgcgttcggcgcggtgtcgctgccaaccggcgacgccgcgccgttcttccatatacgcgtgtcctccgttctgctaaagtagacgaatctgcgcggcgcaccgcgccgtaggtttcgcgcaaccgaggcgaaacatgcaagggggatcattggggaggcaagaaggtcggccccaacgtgagaagggaaaggagagggtatgagcagtacattggtacagaagttcaagaacgtgggccccggcgcgcttgtggcggccggcttcatcgggcccggcaccgtcaccacgtgtacggtttcgggtgcgagctacggctacaccatgctgtgggcactgttgttcgccacggtggccaccatcatcttccaggagatggcgtcgcgcgtgggcatcgtctcgggcaagggactgggtgaaaacatccgcgatcgtattcccaacaaggcgctgatgtggattgcgatcgtgattgttatcatcgccatcttcgtgggcaacatcgcatacgagacgggcaacatcacgggcggcatcctgggcatccaggcggtcctgcccgacgtgccgatgatccccatcgtcatcgtgctgggtgtgctggcgttcatcgccatgtggatcggctcgtacaaggtggtcgaggtcatcctcacggccatcgtggtgttcatgggcgtggtgttcttcgtcacggccatcgcgtcgtcgcccgactggggcgccatcgccacgggcctcttcgtgccgacgttgcccgaagaaggctcgaagggcatcctcacggccgtgggcctcatcggcaccaccatcgtgccgtataacctgttcctgcatgcgtccggtgcctccgagcgcttcaaggaccccgagcaggtttccgacgcccgttttgacaccatcctgagcatcggcctgggcggcatcatctccatggccatcctcatctgcgccgccgccaacatctacggcaccgatgccgtggtggcgaacggcaaggacatggcgttggcgctgcagccgctgctgggctcgtgggccacgtggatgatcggcctggggcttctgtgcgccggcttctcgagcgccatcacggcttcgttctccgccgcgtatgccgtgaacggcgtgctgggctggaagaagacgacgaaggacctgcgcttcaaagtgatctggatgatcgtgctcctggccggctgcatcatggcggtcgtgctgggcaagagccccaccgagctgatcctggtggcgcaggcggccaacgccatcctgctgcccatcatggcgttcttcgtcatctactgcgcgaacggcaaggacctgggcaagtggcgcaaccacatcttcgcgaactgcgcgggcgtggtgatcatcgtcatcacgctgttcatgtgctggcgcaacatgtccagcttcctcacctcgctccaggcgctcatcgggggctagggctagggccttcgcaaccgcagatgcgcccgccgttcggcgggcgcatctgtttatgattcacggtgggtcgtggcgggcgcttatgcgccaggcgcaggcgacgcctatcctcggcctagcgtgcgcccaccggcttgatggcgatgctatcctgctccagcgcctcgcggatgcggcgcacgaaggcgagggcggtaggggagtcgccgtgcacgcagatcgtgtcggcatgcaggtcgatgagcttgccgttcacggagaggatggcgccgtcgcggatggcgttcttcacccgctcgatagcttcctcctcgttgcggatgagcgcggcggggtcgttgcggctcaccagcttgccctcgtccgtatagttgcggtcggtgaagaactcctcggcggtgaccaggccgatctttcgcccctcgtccacgagcgcgctgttcgctaggcccaccagcaccaggtgatcgtccacgtcgcgcaccgcctgggcgagcgcggcggcaagctccgggtccacggcggcatggttgtacagctggccgtgcggcttcacgtgccgaagcgggacgccggcggcggcgcagaacgcttgcagcgcgcctatctggtacagcatgtacgagtaagcctcgtcgggcgacaggttcatgtcgcggcggccgaagccctgcaggtcggggtagccgggatgcgcgccgatggctatgccggcatccgctgccatgcgtacggtgtcgcgcatgaccatcgggtcgcccgcatgctgcccgcacgcaacgttcgcgctggaaacgagcgggatgatctggtcgtcgagcccgagcgtatagcgcccgaagctctcgcccaggtcgctgttgaggtcgatacggtacataagctgccttctttcccacggtgttagctcctattgtagagcaagggtcggcacgctgcgaatacttcacgcgccttcggattgcccccaatctaccagcacgctttccacttgctgtatcagctgctttttaccgggtacgtgagatacgtatcgcgaggcgaaaacggtgttctgcaatcctccgagcgcgtattcggctgtgacggcgtctttgtccgtgcataagatgatgccgatgggaggattatcgaactcgtcgttaatttcgcaagcatagtagttcaggtacatgttgatttgcccgaccgcttccggcatcagcttggaggttttcaactcgatgagcacgtatgctcggagcagcttgttgtagaagaccatgtcgacatggtagtgagtgttgttgagcgtgatccgctgctgcgtgcccacgaacataaagccctgacccagttcaaggaggaatttttcaatatgggtgacgagtgctcgttcaagctcgctctccgggaggggtgcgtcgtcgggaattcccaggaattcgaagacgtatggatccttgatgatatcggcgggttgcacgacgcgggcttcgtcgttcgagggggagagcctgcgctgcatgctccaagtgctgcccgattggatcagccgctcgtacagcgatgtcgatatctgtcgcttgagctcacgtaccgaccatccggcttcgatgcattctcgctcgtagaaacgccgcttgtcaggatccgagatgctcaaaagctcgcaataatgcgaccaactcaatttgccagacagtgtctggcaaattggataatccagatagagtaggcgcatgttctgcagattcgagcgcgagaaccccttgccgtatgtctcggtcaattctcgagacaaccgcttgagcgttgcagcgccgtactccgcgcgatcggggttttcctgctcgtgttccactatgatgcggccgacattccagtacgtgaccagcatctcatggttcacgtgcgcaatagcacgccgacgcccctgttccaacacgcgcttgatgtcgttgaaaacggactcgtaggatgcgatttcttcataagacatggcaagcctcctcttcggttcccaaggatgagaagatcttgctggatcttgcaggcgtggtacgggcaacgggggaacgcgctaccatctatgggccgtctgttcggaagcggcgcctgcactggttctttgtagcgcataatctaatacactgaaggtttaattgcaagagcaaaaatcccccgccttccaaaaagaaaggcgggggatttttgctgcttggtgtcgaggctgatacagccccgacgattttccctcgcagagcagttgttccggggttctattctttcaggtcgatgttcttcgtgtcggtgatgagcatgcatcccggggcgtgggtgatggcgaacggtggcttgctgttcatgacgatggactggggcgtgacgccgcacgcccagaacacgggcacctcgccgtcgcggatctccaccgggtcgccgaactcggggtgggccaggtcgcgcacgccgatggccgcagggttgccgatgtggatgggcgcgccatgcaccttggggatggcgccggagatctgcaccgccttcaccacctggttatacgggatggggcgcatcgacatgaccatgttgccggacatgctgccggcgggcgtgcacggcacgccggtgaggtacatgggcacgttgcagcccatggtgttgtgccggatctcgatgccggcctcgatgagctcgctctcgaacgagaacgagcagccgatgacgaacgacaccaggtcgtcgcgccagtagtcctcgacgttctccacctcggctgtcagctggccgtgctcgtagatgcgatagcgcgggaagtcggtggcgatgtcacagtcggtggcgcagatggtggcctcgcgcgcgcccgtctcggtgacctcgagcagcgggcaaggcttggggttgcgctgcgcgaacagcaggaagtcgtaggcctgctcgcgcggcagcacgatgaggttcgcctgcgcatagccggggcacaggccgctcgtcggcgccgtgaacgcgcccgagcggatcagccgacgcgcctccaccggcgacgcggcaagcatctgggcccaaacctcgtcggcaacgccctcgggcttggcaggttccggagcattcaacatggcagaactcccttctcgataactgcccccattatcgcacgccgcgcaggcgatgaggagtgctggacgaaatcggaggctatggcaagatctgctgcatctgaagcagcaaaaataccgctccgaacatcataaccccagatcgcgctctgctgcgctccttcgcatcatgccatagcgcaagatctcttccatgacatggaaagtcatatataaaagccggtgccgcacgggccccggcagccccgtaccctacacctcgcccttcatgaagcggtcgatgaagctggtgtccgccgcgccggcggcgaacgtctcgttctccatgatggcgtactggaagtccaggttcgtcttcacgcccaccaccaccatctcctccagcgcggtgcgcatcttggcgatggcctcggtgcggtcgcggccgtgcacgatgatcttggctatcatggaatcgtagtagggcgagatctcgtagccgtcgaaggcagccgtgtccacgcgcacgccgttgccgccgggcaggtgcatctgggagatggtgccgggcgacggcaggaagccgcgctcgggctgctcggcgttcacgcggcactcgatggcgtggccgcgatacgtgatgtcgtcctgcgtgaacgtgagcgggtcgcccgccgccacgcggatcatctcctgcacgatgtcggtgcccgtgaccatctcggtcacggaatgctccacctgcacgcgcgtgttcatttccatgaagtagtagttcatctggtcgtccagcaggaactctatcgtgccggccgacgtgtagcccacggcctgcgccgcgcgcacggcagcgtccagcatctcggcgcgcacctccgcggacagcgcgggggaggggctctcctcgatcatcttctggtggttgcgctgcacggagcagtcgcgctcgcccagtgccaccacggtgccgtacgtgtcggcgatgacctgcacctccacgtggcgcgggttcagcacgcagcgctccaggtacatggtgttgtcgccgaacgcgcccacgctctcgcgctgcgcgatggagaactgctcgcagaagtcgtcctcggacaggctcacgcgcatgcccttgccgccgccgcccgacgacgccttgatcatgatgggccagcccacggcacgcgccttcgcaagcgcctcctctggcgcatgcaccggctccttcgtgccgggcaccacgggcacgccggcctccatcatggtcttgcgggcctggctcttgttacccatgcggtcgatgacctcgggcgcggggcctatgaacacgatgtcgttctcgcggcacagcttcgcgaacgtggagttctcggacaagaagccgtagcccggatggatggcttgcgcgccggtgcccttcgcggcggacaggatggcggcgatgttcaggtacgagtcgcgcgccgcgggcggcccgatgcacacgctctcgtcggccaggtacacgtgcagcgcatgcttgtcggccgtggagtacacggccacggtcttgatgttcatggcgcggcacgcgcggatgatgcgcacggctatctcgccgcggttcgctatgaggatcttctcgaacatggcagccctcgcgccctagcgcgcttctgcggtggcgatgcggaacagcggctggtcgtactccacctgcgtcccgttggcggccagcacttccaccaccacgccgggggcgggcgccgttatctcgttcatcatcttcatggcctccacaatggccatggtctggccggagagcacctcttggcccaccttgacgaacgggtcctcgtcggggctgggcgacaggtagaacatgcccaccatgggactgcgcaccagcagcgagtccttgtccacgtcctcgagcgccgcggcctcgtggctctcggtcttgccggccagaagcgcgctcacgcggtcggccatgagcggcagggccgacgacggcagcggtccgtggctgcgctccagctcgatcttcgtctcgccgtcgtccacgcgcagggccgtgagctcggccttgtccatgatggcgatgagttcttcgatggctttcgtgtccatggtggctctccttgcacttctctaggcggtgcggccgttgccgcggctcgcggtctgcggggcgttgtcggcgcccgccttctcgtcgggggtcttctcgtattacagcgcgttgcggctccccacccgctcggcgcggttcgcgcggtcgatccacagcgtgtcggcctgcgtcttcgctgcttggcgctccaagatgggcgtgaggcggcgggccgtgcggcggggcgatatgccgtcggcgctgggacggcgcaccttcagcgccagcatctcgaactggcgggcctcctggcgcagcagctcttgggcctgctggaccgtcacgggttcgaagcgcacgcggcttcccggcgggcgctgcacgagcttcggtatgtccacggtggcgatggtgccgatcttcgcgtacccgccggtggtctggcggtcggccagcatgacgatgggccgcccgtgcgagggcacctgcacggcgccgaacgcgatgccgtccgaaatgatgtcagacccgttcctcgtctcgatctccgggccgtccaggcggtatcccatgcggtcgcacttagcggtggtggtgtaggtttggctgtagaatgcctcgatgccctcttcggtgaacaggtcctcctgcggcccgggcaccacgcgcacgagcacctcgtcatttgcgaagccgtagaaggcgtcatcgttgcccgcatcgaggcggtgcgagcctaaattcggcaggaagtccacgcccttggtgacgaacgggaggtagtcgcccgtcatgagcgtgcgccccttccagccgccgaactcgcacttcaggttcgtggagcggctgcccatgatctcgggtatgcgcacgctgccgcccgcgatggccaggtagccgtagcagcccgtcttcgcggcgccgaagcgcaggatggagcctcgcttcaccatgagggccgtgtagcgcggggcgggctccccgtcgatggttgcgccgaagtcggcgcccgtgatggcgatgatcgtcttggtggtgaagcgcaaaagggggccggccagcgcgaactccagcacgggggcgttcgggtcgttctctaccagcaagttggcaatgacgtaggcgcggcggtccataacgccgttcgtggaaaagccgctgccttggtagccgaagcggccgttgtcttggatcgacgtgtacacgccgggttttctgacgacgaggcccatgctattcgtcctccacgaagatctggtactcgtaggtgttggctgcgagctgctgttctatggcggcgtactcgtcggctgtgatgggcacgaaacgcaggtactcgccggccgcgtacagaatgggctcggtgcggtccgggtcgtaagggcgcagcggcgtgcggccgatgatctgccagccgccgggcgaggccagcgggtagatgcccgtctgcgcgcccccgatgcccacgctgccgggctcgatgcgcgtgcgcggcgtggcgagacgcggcgtgtgcaggcgctcgtcgaggccgcccaggtacgcgaatccgggcaggaatcccagcatgtctatgaggtaatcgtgcgcggtgtggatgttcacgacctcctgcggggtgagcccggcatgcgcggccacgttggccaggtcgggaccgtactcgccgccgtagcacacgggtatctgcacgatcttgcgcacggagaggtcggcctcgcccacgtcgcgcagcttcccgcgcaggcgtgcggacagctcgtcgaacgtgaccgccagggggttgtagtacaccatgagcgagcagaacgtgggcacgagctcggtgatgccctcgatggggtcggcagtgaggttctccgcggccaggcggatcatcgcgctcgtctccggggagatcgcgtgtgcgaactccaggttgagcgccgaatcgccggcgatggtgatgctgaatcccgccatgtggttccgtttctcgtccgttggaccgctgctgcgcgattgcaggggttcggtcgcatcgccgcacgaccgcaggggcccggtaccggcatcgcccaccggtacgcatcgatggctctgcccatcaatgctacacttatctatcggttatctcgataggattgtagcatatatggaaaaagcactgtttcttgcggcgttcttctttgcctacaccgtgcaggcggtcacgggttttgccggcaacatattcgccatgcctgtgggcaccacgctcttggggttgagccccaccgtatctatcttgaacgcgatgggcttcttcgcctgcggcctcttggccgtgctgaacatcaagcacgtgaactggcgcgagttcggcaagatcatcgccgtcatgatcgtgttcatggtggtgggcatctggctggatacgctcatgccgctgcatgtgctgctgaagatatacggcgccgtgatcgtgttcatcggcgcgaagaacctcatcttcacccgccagaagttcctgccggagtgggcgctgtggatcatcctggcgctggcgggcctcatccaaggcatgttcgtgtcgggcggcgcgctgctggtgatttacgccgtgcagaagctgcgcgaccagcaggagttccgcatcacgctctctctcatctggacggtgctgaacttcatctacgcgtgcatcgcgttccagcaagggcacttcacgggcgacgtcgtgcagatcatcgtcatgtgcatcccattggccatcgtggccaccgtgctgggcaacaagctgcagaagaagatcagccgcgagaagttcctgaagctcacgtacgtgctgctgctgttcatcggcgtggtgctgctggtgacgtcataggcccgccacggttctggccgacgggtgacctttcgggcggacgggggctcggtttcgttttgcttggagcatgagtcatctttcgcaacattattcatgaataatatagctatgcatattcatctcggataactattgttctttgaacattatatgaataatagatcgcatgcggggaacaagactatagtgtcaacgtcaaccacagagagagacgatgaaccgaaagaaggaacccctcatgaccgaagcaaccaagaccctggcgcagctgaagaaggccagcaagctcacgcgcctcgcgttccacaagaacggcccgaaaagctacaagcgcggccagggcgccctgctgaacgccctgctggcgaacgacggcaccacgcagcgcgagttggtgaagaccatgggtatggaccgcggcgacctcaagggcatcgtgaagaaggccgagcgcaacggctacgtgaccatcgaggactgcgacgcgaagcacacctatgccgtgaagctgaccgacgagggccgcaaggtggccgagaagcgcgtggccgccaacgacaagacggccgaggatatcctcgactgcctgtccgccgacgaggtggcccagctgaacgcccttaccgagaagctcatcctgtcttgcaaggacaagggcatcaacggcaagaagaagggccgcaaagcccacagctgccactgctgctagcgctcgagggaagggcccggtgcgtggagcatcgggcccttcctgcgctgcatgccgtcccgtgcatcgcgatcgtctgttgctgccgcaggcgccctacttgcagtacgcgccgcgggatccggacggcagctgggcttccgggcagggccgatgcgttggttcggcatctcctcctgctcgcattccgctgctgcgactgcaaccgcgcgcttatcgattccgttgccgaaacggcgtgcgctgggggttcacggacggggatcggaaccggtacaataggggcaaggcgaggcaaggagcatccatggcgcagtaccaacgcatcttcgcagcactcgacggcgcatccacgcagaaggcggtggcccagcgggctgtggcgctcgcggccgacaacggggcgcggctcctgttcggccacgtggtagactcggttcccaacgaggcgaacggggccgactatgaagccctgtgcgcggaagacgtcatgcgcatcgaggacgagctcgccgacgagcttcgcgcggtgcgcgagaaccccgccatcccgtccgtcgacgtgcaggtgcgcgcggggcgcgtggccgaaacgctggccgagcagcttatcgagcccttcgcgcccgatttggtagtgtgcggcgagcgcgggctctccaacatcaagtacgtgttcgtgggcagcgtgtccacctacctcatccgcaacctgcgctgcgacgtgctggtggttaagcaggcaggggcataatccgatgcggatcggccccggctccctaccttgttttccatctttgctttaatggttgcacttgctggtttcgctcggtgaaaaggcgtaaaatggcacgttgatttagcggtgcccgcggatgtggcgtcggagcgttcgatgggcggaggcagagagaagctcgcgatgacgcacgttcccgatcgtccggccccttcgtcgctcgtgagcgagggcgacagcgttcttgtggacacgcttcgcctgagcgtgagcaagcacaaggttgatgagcacttcacgctcgtgtgggccaaccgctactactacgacttcatcggctatcccaaagacgagtacgaggcgctgtttcataatcggcccgatctctacttcgcggacaatcccgaggactttgccgtcattgccgagcatgtgacggaggctttcgagaagaacacgggtggatacgagtgcatcgccgggctgaacgtgaagggcggccataaatgggtgaaattcgcctcgacgttcctcgacgagtacgtggacggctaccagctgtcctacaccaccatgaccgacgtgaccgacctggtggaggcgcggcaacatctggaggaagcgaacgaggagctggaacggctcgcgttcgttgaccccgtgacggagggcttcaaccaaacgcggttcgacctgaccgcccgccatgccatcgaccgggccgagccgggggcctacgccctggtggcgctggatctgaagaagttcaagctgctcaacgagatacagggcacggaaagcggcgacatggtgctgcgttatgtgtacgattgcctgcgcgcgcatctcgacggggacgaatgcgtgggccgcatcaacgccgacgccttcaacgtgctcatgcgcaacgaggaccagcaggccgtgtacgagcgcatcggcggcatggtccaggacgtcaaccgcttcaacgtggatgcggagcggccgtacttcctctcgttcacggtgggcgtgtaccccatcgacgacacgagcctgcccatgacgcttgtgcgcgaccgggcgaacgtcgcgcgcggctccagcaaggaagcgtcgaatgcgcgccatttcacctgcgtgttctacagcgatgtcgaccgccagaatttgctgtccgagcaggacatggagaaccgcatgcacggcgcgctcgagcggggcgagttcgtggcatacttccagcccaagcaacgcctggccgacggctccatcgggggtgccgaggcgctcgtgaggtggatcgacccggcgcgcggtctcgtgccgcccgacgacttcgtgccgtacttcgagcgcaacggcttcatcatcaacgttgacctgtgcgtgttcgagcaggtgtgcgccctgctggcctcgtggatcgagcaggggcggcagccggtgcccatctcggtgaacatgtcccgcgcgcacctgcgcgagcaggattttctcaccccctacgagcagatccgcgcacgctacggcgtgccggcatcgctcatcgagttcgaattgaccgagacgttggtgttcggcgatcccgagacgttcatgggcgttatcgacctgctgcacgcgcgcggttaccgctgctcgctcgacgacttcggcagcgggtactcgtcgctcaacgtgctgaaggacgtggacatagacacgatgaagctcgaccgcgcgttcttctcggccggcgacgatgccggccagcgcgaatgggacgtggtggagtcggtggtggacctggcgaagaagctggatttgggcacggtggccgaaggcgtcgaggaacccggtcaggcggctcgcctgcgcgccatcaactgcgatatgctgcagggctacgtgttctcacgtcccgtaccggtggccgagttcgagcagatgctgttcggcgcgtaagcgggtgtgcagcgcccgacgcgctggcatgctgttcgtcgggcagccgccgccggattcccgctgtgcgcggccggtggacgcgtgctaagcgcgcgcggcggccgccttgcggttgacgacgcgcttgaacatgatcacgagcagcaccagccccacgcccaccatgatatggccgatgcccgcaatcccggacagggccgcgtcgggcagcggcaggaccgtgcccgtcacctgcgccaccccgcgcacgagcatcatgccagccgtgatgaccagcccgatgttgtatacgaggtagaacggcttgaacagccggtcgccggtgaagtcgctggcgagggcgaacagcgtggcgataaggaacacgaggaagccgagcgccagcaggtgcggatgcatgaacccgagcgcggtctgcccggcgaagccggagagcttcgtgaactcgcggaagaacacgccggcggccgcaccggcaatgaggtagacgagggccgtgttgatgaggcgcttcatatgattcctttctaatagcaatatatgaacgttgttcatcatgagagttcgtccagggggatgcaaggctttcgggcaaactgttccgaagttgcgattcggcaaccgggtagcccgccgaccgtgcgaccgtgcaatcaggtgaaagtgcgaccaatcgccgggcgcattgcacgaccgggtattcagggcgagggcccggccgggcaggcacgcccccggccgggcggtgcacgcgccgctggtcttgcgcgccgttcgttgtgctaccctgttcatcatctaaaacaagcggcaagacgaggacgtggtgcatatggtgaacgagaggatgtacgggctgggagcggagccgagcgcgattcgcgagctgttcgcgtacggcatggcgcgcaaggcggagatcggcgccgacagcgtgttcgacttcagcatcgggaaccctagcgtgcccgcgcccgacgccgtgaagcaggcggtgctcgagctcatggaggaggagccgagcgcgctgcacggctactcgccggcggctggcgacccgcgcgtgcgggccgcggtggccgaccatatccgccgccgcttcgacgtgccggcctcgcccgaccaggtgtacctgacggcgggtgccgcggcgggcctggccatctccatctgcgccgtcacggagccgggcgacgaggtggtcgtcatcgcgccgttcttccccgagtaccaggtgtggatagagaccgccggctgcacgcgcgtggaggtgccggcgcacgtgcccgacttccagcttgacatcgatgcgctggacgcggccatcggacccgcaacggccgccgtcatcatcaactcgccgaacaacccggtgggcgccgtgtacacgcgcgagaacctggaggccctcgccgcgctgctggcgcgcaaggaggccgagctgggacgcaagatctacgtcatcagcgacgagccgtaccgcgagatcacctacggcgccgaggttccctacgtgccgtgcgtgtggccgcgcaccatcgtatgctactcgtactcgaagtcgttctcgttgccgggcgagcgtatcggctatatctacgtgtccgacctcatggacgatgcggccgaggtgtccacggccgtggcaggcgcgggacgcgcgctcgggttcatatgcgcgccggtgctgttccagcgcgtgattgccgcctgtatcgacgagccgagcgacgtggcgtcctacgccgagaaccgccgcctgcttaccgagggcctgggcgcgctgggctacgagttcgtggagcccgacggcgcgttctacctgtgggtgcgcgcgcttgaggacgacgcccaggcgttcagcgaccgcgcgaaggcccatgagctcctgctggtgccctccgacagcttcggcgtgcccggctgggtgcgcgtgagctactgcgtttcgcgcgccaccatcgagcgctcgatgcccgcgttcaaggcgctcatggaggagtaccgggggtaggggctcccaacttcgcgcgcaacgaagcgacggcggccggagggccgccgtcgcttcgttgcggggtatgccgccacggcatagagcgttcggcaaaaccgcatttcccctatgcgctggtcagaacctacactgcgagcaacgtcaagtaggcggcgatcgacaggaggagaacatgctgacggtatcggagcacgtgtacgacgaggcgacgggcatcgaccactacgtattcgagcctggggccatgaaggcgcaggtaaaggtgactgaaacgaacggcgagccccaggtgctcctcggtgtggagggcatggccgtccagcaaagcgtttcggagcccacgtggacggtttgcatgaacaaggagattgtcgagcgggcgcttgccgattatcgcgaacgccggatgtgagaatctggctgttggatctttagagcaaggggcgcgccgttatcgcaacggcgcgccccttgtcatagtgctcggctttcgccattcgcgcggagcgcttcctgggccgtgtaatagtcggatgctccctgtggcttgccgatagccccgcgcctcatgttgtgcaaatagggttcatggcacgaagggcacgcggctgcgcctggcttgacgggttcgccgcatgaggagcaggtgagctcaagtttgagggagaatatcccgcatttgttgcagtggttgcacgggtagcagggcatggcaattcctaacagtgttcgcgctcggcaaggtcggcttccatgaagtcgatgaagcgatcgagcgccgggttgaggttccctatgtggtacagggccgaaaggggaaacgaggtcgcctcgccggtgagctcgatcacgcggcatgacgaggggagccccgcttcgatgcgcttcacgaagttgaccccggcgatgagcacgtcgttgccgatggtcgacgagagcgtgagaagatcggtcaggcgcatggagtaccttcgccgtgttttcggtgcgaacccgttgagcaggcaggcccgctcgataaaccgccatgcctcgctgacgtgcgcgccctctatcctgaccagcgtctcgtggcgaagatcctcgatgtcgatggatgcgcggtttgcgaaggggtggccggcgtcgacgatggcggcccatgggcaacggcccacgatcacggcccccacggtgtcgtcatcgagctcgctgggttcgaagtaatcgaaggcgacgtcgatggagccggccttgacgaagtcgatgggccgtttatggtggcagcttcgaacctggatgaagccggtgccgtactcgctttccgcagaggtgatgaagcgtccgagcagggccatcacgaccgtctcgtcggtgagtcccgtcacggaaaggcgtgccggcgcctcgctctttatgcggcgtgcctcctcgtagaacatgctctgcgcatcgaggatcttgtatgcaaaggggagcagcgcattgccggcctcggtgaggcgcatggcagatcccgtccgctcgaacagcgacaagcgcagttccttctcgaacgagatgatgtgcttgctcagcgttggctgggacatgttgagcatgcgggctgtttccgtgatgttcagcctcttggccagctcgacgaactcgttgaaggcgctgatatccaaagccgactcgccccctgttataaccaccgaggtcaacgatgtgttttcgatctatgagattcccttttccacctctcgctcgaaccaacataccacattcgcccggcatggttcgaattcccgggcggcatgggcggcaggcataaaaagaatccatcgcggagctttttatcattatttccatgcggcatgcccttcctataatgcgccccatccgatgccggaccgaacggggaagcgggccgaattcggcagaacagccgagaggaaggggaattctatgagttccgcacaggttaaagaggggttcaacaaggcgatcattcccatcatggcgatcttcgcgctcggcgcctcccaaggaggcgtcaacgccggcctggccaccatgggggcggcgttcccggaggcggggccgaacatcggctacgtgatcagcatggtggcgctcggcatgattccgtcgggcatcatctcgggcgcggtcacgggccggttcatcaagtaccgtacctccatcatagccgccatcgtcctgtacatcgtttcaggttgctggccgttcttcatggggagtggcgagtcgttcggcatgctgctggcctcgcgcttcgtgttcggcttcgcggtagggtggtcgtacccgctcgcccaggcgctcacgttcaagacgttcgacaacgagaacaagcgcgcgagcatcctcggcgccggcatggcgttcttcaatctgggaagcctgatcatggagcttgccggcgggtaccttgcgcttgtgagctggcaggcgtgcttcctggtctacctgatcggcatcatcccgctcgtcatcgtcatcttcatgctgaaagagcccgagcgtgattccgagcaggcggccgagctcgctgccgagacgggcggcgaggtgaagacgaagataccgcccatcgcctttttgtacatgctcatgctcacgcttatcgttgcgttcgccatgcccacgatcctgtactgctcgttcgtgctgcccgactcggccatctccggttgggtgctctcggccatgacgcttgtgggcgccgtcacgggcttcacgctggggccggtgtacaagaagctcaagaagtggacgctgccggtagcggggctgttcctgggcgtgctgtacgtcgtctgcgccctcaacgcgcagccgggcagcttcaacctcgtggtgtacatcgcgacgttcctcgtggggcattggggcttcgccatcgtgatccccgccacgggcaacatgatcacgaacctggtgcccattggcgcagccacgcgcgccatggggttcaacacggcgttccatcaggccggctgcttccttgcgaccccggtggcaacgctggtcatgggattgctgggcgcgcaggcggtcaccgacctgctgcttccctgcagcatcgtcatcgtggtgctgggcgtgctccagttcgtgctggcgggcttcaccgatatgtccaaatacgatgacggctacggcaaggtcgagctgcatcacgacgcctaagcgagacggcgcgccaagcgcacggcattccaggaggattgcccgcttcccctgttcggttcgcacatcgaagcaacaaagagaggagacatccatgtcgaacgattactacgaaagccaccgaggcgaatggcagtggcaggacggcgagtacaccgtcacgcgcacgaccgcctggtcggggcccggttgccacgacggctgcggcgtgctgtactacacgaaggacggcaagctggagaaggtggagggcgaccccgataacccgttcaaccagggcgcgctgtgcatgcgctgcctggagatgcccgagttcgtgaacaaccccacgcgcctcggccaccccatgaagcgtgccggcgagcggggcgagaacagatgggagcgcgtgtcctgggaggaggcgctcgacctcatcgaggaaaaggtacgcgccatctggaaggactacggccccgagtccatcgtctgccatatcggcaccgggcgcaacaactgcgaccagataccgtacctgtgctacgcggcgttcggatcgccgaacttctccatgggctatctggccggcgactcctgcttctgcccgcgctccgcgtcgatggcgtcgcagaacggcgacttcatgatcgccgactgctcgcagcagttcgagaagcgctacgacgagagcacgggctggcgctgccccgaagtcatcgtgaactggggctgcaacgcggtcgtctcgaactccgacaacttcttcggcggctggatcgtggactgcatgcagcgcggctccaagatgatcaccatcgacccgtcgctcacctggctggcctcccgctcggcgtactggctgcgcgtgcgcccgggcaccgacgcggctttggccatggccatgctcaacgtcatcatctccgaggacctctacgaccacgatttcgtggccaagtggtgctacggcttcgacgagcttgccgagcgcgtgcgcgactggacgcccgagcgggctgcggaggtttgctgggtcgaggccgaggacatcgtgggcgccgcccgcctgtacgcccaggccgaccccgccgccatccagtgggggctcaagctcgaccagaccaccaacgccaccgccaccgcgtgcgccgtcaactcgctgtgggccatcacgggcaacgtggacaatcccggcggcaacatcatcatccgcaacgccttcgaccagaacctctcgtacggctacgggtaccacctgctgccgcccgaggtgcaggcgaagcgcctgggggccgagttcccgctgatgagccgtgcgggctacagctcctccgcccatgcggactccgtgctgaaggccatcgagactggcgagccgtatcctatccgcatggtgtggatgacgtccacgaaccccatcgccaacatgggcgccgacgcgccgcgcctgttccgcgccttgaagagcgtcgatttcgtggtggtgaacgacctgttcatgacgccaaccgccatcgccttcgccgatctggtgctgccggccgccatgtctcccgaacgcaactcgcagcgctgctggtgggttccgaaccgcacgctcaccaaggtcacccagtacgaggagtgcgtctcggacgacgacctggtcaccatggtgggcaagcgcctgcaccccgagaacttcccctgggacgacaacgtgggatggatcaaccacatcttcgagcacgagacgaacgacgagctgccctacaagagcttcgaggaggcgcagaaggtcgtgtggtcctacccggcgttcacctacctcaagcacgagaagggcctgctgcgccccgatgggcagcccgggttcaacacgccgtccggccgcatcgagctgtacaacacgaacctcatgctgtggggctacgatccgctgcccgacttcaaggagcccagctgctctccggtgagcagccccgagctcgccgagaagtacccgctcgtcctgaccaccggcgcgcggtccttcgagttcttccattccgagcatcgccaggaggggacgacgtcgcgcgagttgcaccccgacccgctgttcgagatgagccctgccgccgccgaggccgcgggcatctccgagggcgattgggcctggatcgagaaccagcgcggtcgctgccgccagaagctgcacgtgaacccctcgctcgacgaccgcgtggtacgcgccgagcacggctggtggttccccgagaccgagggggcggagccgaacctgtacggcgtgttcgactccaacatcaacaacctcaccccgcagtgcgagaacggcgacaccggcttcggcgccccatacgcgaaccagctgtgccgcgtgtacccgtgcacagaggagaacagccgcgtcctgccgggcgagcaggtcaccaggcgcgggggctattccaaggtaatcgacgagtccaacggcgacgtgaaggtgggtgctatctatggctaacgcattgatgatcgactacgagttctgcacgggctgccacgcctgcgaggtggcctgcaagaagcatttgggcctgcccgcgggccagcacggcatccgcgtgctccaggacggcccccgcgagctggagaacggcaggtgggagtacaacttcctgcccatgcccacgtcgctgtgcgacctgtgcgcctcccgcctggccgagggcaaggacgccgcctgcgtccaccactgcccggcccactgcatggcgctcgggccggccgaggagctggcggcacggttcgacgggaaggtcgaccgcgcgctgttcgttcccgctcagtaacgacggttcgcgccgggtgccctgccgcccggcgcggttatggaaggagaagcaatggatcaggccaatagctactacgaggcccataagggcgaggtggagtggcgagacggcgactacacggtgacgcgcacgacggtgtggtcggggcccggctgccacgacggctgcggcgtgctgtactacacgaaggacggcaagctggagaaggtggagggcgaccccgactgccccttcaaccagggcacgctgtgcatgcgctgcctggagatgcccgaagccgtgaaccatcccgaccggccgaccggtccgctcaagcgggcgggcgagcgcggcgagaacaagtgggagcccgtcacctgggacgaggcctacgacatcatcgaggagaaggtgcgcgccatctggaaggactacggcgccgagtccatcgcgtgcatgatcggcaccggccgcaacaactgctggcagatcccgtacctgtgctacgcggcgttcggctcgccgaacttctgcctgggatttctctcgggcgagtcgtgcttccagccgcgctcggcggccatggcctccatgaacggcgacttcctcatcgccgacatgtcgcagcagttcgagagccgctacgacaccgagaacaccgagtgggttccgcccgagatgatcgtggtctggggatgcaaccccatcgcctcgaactccgacaacttctacggcggctgggtcgtcgactgcatgcagcgcggcagccggttgatcaccgtcgacccgtcgctcacctggttggcggcccgttccgactactggctgcgcctgcgccccggcaccgacggcgcgctcgccctggccatgctcaacgtcatcatctccgaggatctctacgaccgcgagttcgtcgagaagtggtgctacgggttcgacgagcttgccgagcgcgtcaaggaatggacgccggagcgggcggaggcggtgtgctgggttccgaaggacaccataatcggggcggcgcgcgcctacgcgaaggccaagcccgccaccgtccactggggcctgcccatcgaccaggcggttgtcggtatccccacggcgcaggccatcaacgcgctgtgggccgtcaccggcaacacggacgtgccgggcggcaacatcatcatccgcaacgcgttcgagcagaacgtttcgtacaactacggctaccagacccttcccgccgaggtgcaggccaagcgcatcggcgcggagtacccgctcatgtccaaggccgggttcagctccacggcccattcggactccatcctgcaggccatcgagaccggcgagccgtatcccatccgcatgctctggctttcctccacgaaccctattgccaacatggcgtccgacgcgccgcgcgtctaccgggcggtgcgcaccctcgacttcgtcgtggtgtccgacccgttcctcacccccacggccgtggcgtttgccgacgtgttcctgccggcgtccatgagctgcgagcgcaacacgcaacgcgtgtggtgggtgccgctgcgcggcatgaagaaggtgacgcagttcgccgacgtgcgttccgacgacaccatcgtcacggacctcggacgccgcctgcatcccgagaacttcccctggaccgacgacatcggctggacgaacgacatcctcgtcaacgacacgccaggttacgacggcgacttcgagcagctgtgcaaggacgtgtacgtctatcccgcgttcgagtaccgcaagcacgagaagggcctgctgcgccccgacgggcagcccggtttcaacacgccgtccggccgcatcgagctctacaacagcatcttcgcgctgtggggctacgacccgctgccgcagtgggaggagccatcctgctcgccgtacgcctcgccggagctgtacgagcagtaccccttcgtgctgacgacgggcgcgcgctcggtggagttcttccattccgagcatcgccagctggagacgagccgcgagttccaccccgacccgctgttcgagatgagcccgaaggctgccgaggccgcagggctgtccgagggggattggtgctggctggagaaccatcgcggccgctgccgccagaagctgcacgtgaacccctcgctcgacgaccgcgtggtgcgcgccgagcacggctggtggttcccggagcaggaggccgcggaacccgtcctgttcggggtgttcgactccaacatcaacaacctgttgccgcagtgcgagaacgggccgaccggttacggtgccccgtacaagaaccagctgtgccgtgtgtacgcctgcacggaggagaacagcgccgagctgcccacggcatgcgtgacgaggaaggacgggtactcgaaatgagcgctaacgcattgatgatcgactacgagttctgcacgggctgccacgcctgcgaggtggcctgcaagaagcatttgggcctgcccgcgggccagcacggcatccgcgtgctccaggacggcccccgcgagctggagaacggcaggtgggagtacaacttcctgcccatgcccacgtcgctgtgcgacctgtgcgcctcccgcctggccgagggcaaggacgccgcctgcgtccaccactgcccggcccactgcatggcgctcgggccggccgaggagctggcggcgaaagccgccgagaagacgcggtgcgtggtcttctcctaggctcccggatagaggcagccggcacccagcgatgcatggtgccggccgaggacaacgcaaacgtttcgacagacaaggagaatcctatgtgcttcagaccagccacggtcgcccccgacaagacctgccctgcatgcggcgcaacctgtgccggggacgcaacgacgtgttccgcgtgcggcgccgacctgccccaggccgcaatgccccccatgccgggcactcccggcgcgcccggtgctccgggagcgccgaagccgccggaggcgccgggaatgcccggggcacccgcgaagccgggggccccgcagcctcccagttcggccagctagcgcgaggcgggcgtccatgaggcgcgaagacggcgcgcgccggcactatgcgcgggtggcgttgccgctcatgctggtcgcgctgtccgtgacggttatccagtaccagatacccaccatcatggaacgcatcatggacgagttctctatggatgccggcagcgcttcgtggctcatgtcggtgttcacgctcgtcgggattgtcgccgccctgcccgtcggaggccttgccggacgggtcggggcgaaaaggctcatggtgggtgcggcgttcctggccagccttgccgccttggcctcggcgttcgccaacgcggcgcccatgctgctcgccctgcgcgccctcgagggcctgggcttggtcgccatcatcgcgagcgggccgttggtcatgcagcgctgcgtcgatcctcgctgcatcggatcggccacgggcatctggatgctcggggtcatgctcggggcgacgctggcgggcatctcgaggctgcgtgctgtacgaggcggtgggttttcgcgggctttgcctcgcctatgcgggcctggcggcgctctcgggggtggttttgcaggtggcggtgaaggtgccgcaggacgatgcggcgggcggtcttgttaacgagcgcgttccttctgggacgaccccgcgcagactggtattggccgaagggaggctgcgtgtgttcctcgcgcgcgacacgtggtgcttcctagtgccgtttgcgctgttccagatgcttttgctgagcgtgctgtcgttcgcgccgacggcgatgcaacagcggggcgcgggggcggtggaatcggggttcgccagcacgcttcccatgctgctggccatcgtgtcgtcgttggcgttcggccggctctccgatcgtttcgggcgaaacaagccgctctaccttacggggatgctcaccatggcgccatgcgcgttgctgctcttgacgacgacgggtccggtcatgtgggcggcggctgtggccatgggattgttcgcgatgggcgcaccgaccgtggtcgtggccgcgtacccgcgcatgctcggcaagccggagcttcttggcgtcgggatgggcgtgctgctgctcgtgcagtcgcttggccagttcctcgggtcgttcgttccttcgcttctgctcgggcccgacctgacgcagtgggcgctctgcggtgcggtgctgtgtgcggcgggtttggcgggggcggccctggtcgtcgcgtgcaggttcgattgaggggaggtgcggcgagaaggataacggaaagcttggcgcgtgcaaggggaaaacaaagacgaggaggaagctatggacgagacaatggtaaaccggaggagcttcgtgaaggggctcggcctgatgggcggcgtggcggccatggggatgatcgccggttgctcgtcggagccggcgacggcgaacgatgccgacccgaaggagcagccgcaagcggaggcccagccgtcggttttggcggagggtgccagctgggagctggtggcgcatgtggaggatggcggcctgatcgaaggcctcaacttctcgcaagatgggacattgtggttcatcgacgtggtcaagggccgcatccataaagtggtggacggcgaggccgtgaccgttcacgacaacgaggggaaatcgatgccgaacggtgccaagttcatcgacggcaccaccatgcttatcaccgaccgttcccaggggctctgccggtacgacaccgagacgggagagtattccgtttgggttcccaacttcaacggcaccccgttcaacggcttgaacgacctcgtgctcgacggccagggcggcgcctacttcaccgaccccgggcagtcggactatttcaagaggatcggttgcgtctactacgtgaagtacaacgaggacgagcctgcgctgcagctcatccaggatggcattgcctacccgaacggaatcacgctctcgcccgatgggcagttcatctacgttgccgagttcaacacgaactcgctcgtgtgcatcccgtcggcggcgtacacgttgggccgtgccacgccctatgtgttcgcacgcatggacggcggccatggccccgacggcatcaccgtcgatgctgacggcaacctctacgtggcccacctcgaggcgaaggaagtgctggtgttcgacaaggacggcttccagatagagcgcatacccgccccggaggacgccgatatcttcgtcgacaacctctgcattcacgacgggtacctctatatctgcgagttcggaagcagcaacatctaccgtatagccgtgacggctgaaacaggggagaagtaaagggacataaaatttgacggggagggggttcggcatgcgtccccctccgttcgtattcgcaaactgcctgctggcatgctgtgcggagctcaggcgtttgatcggcgctcggggaggacgcggcgtttgggtatgaggatctcctggggatcgagggcgaagagctcggcggcggtgagggtctcctcgcaggtgagggcgccgtagcggcaggtggcctcgcagacgccgcagtcgcggcagcgggcggggtcgaattcgagcagggtgcggccgccgggcgcccggccgattcttcgcagggcctcggtggggcagaacagggcgcactgagcgcatcccgagcatcgctccacgtcgatgctcatgcgcggggcgagcacgcgggggacgaccgcgtcatcgccagcgagtcctgcggcgtgcaggtcgtcgagcagctgccagcggcgggtgtcgggtttgatcggggcatcgtcgcccacaggggcgtccgcgagcgattgcagctggcgggcggtctctgcccgcgcagtatcgagcagcgaggctcctacctgggcgaacaggccgcggcgggaaagctcgccggtggcatcggcctcgggcgcagcttcgaggtcgcgcaggctggcgccgtcggccgtctcgaaggtggcgtcgattcccgccacggcgcagatgcgtcgggagccgtcgacggcggcgcgcacgagctccgcggcatcggtcagttcgcatgacgggcaggcatcaagcggaacggcgatgcgctcggcgccgttgcaggccaggtggacgagcagcgccacgtcgacccacgcgaggcatggcagcacgacgacgcggctgccgtcgaggcgcagggcctgcgccagccgctcgcaggcgaagccggcggttggcggctcgatgggcgttgcggcttcttccccgacgctgttcgatgcgcccgcggccgccgtttccgcggccgcccgctcgcgcgctgcagtgccagcggcgtccacctgcgcgatcagccctccatcgtcgagcggcggcagcgctagcagcgcgttcgtggggcaggcgaccacgcaggcgccgcagcgcacgcatgcctcgtcgtcgatgcgcgggccggcgtccctcaccgcgtccaccgagccgtagaacgcggccccctccacggccgccgcacgcacgacgatggctccgacggggcacgcctcggcgcaggcggcgcacgaggactcgcggtcgcgcacgcgcaggcagcgcccgccgtcgagcgctgccatcggcggccgctcggccaggcgctcggctatggcgatcagatcgggcacggcagcccccttcttcccttacaacagggccagcagctcgtcgacggcctcgggccgtgtggcccagctggtcgcgaagcgcacgacggtgcggccgtcgggcgtgagctcccagaagccgaacgaggcgtgctcggccaggcgcgccttggaggcgtcgtccagcgcgacgaactgctggttggtgggcgagtcgaggtgcaggtcgtagcccttcgcgcggaacccctcggccaggcgctgcgcgagcgccacggcgtggcggccggcgttcacgtagcgcagcccgctgttctcctcctcgaacagcacgtcgaactgcagccccaggaaacgccccttcgccagcagcgccccgcgcttcttcatgagcgtgaagaagtggtcgtcgagctccggcttggtgaacaccacggcctcgccgcacagtgcgcccaccttcgtgccgccgatatagaacgcgtcgcacaaacgcgcgatgtcgggcagcgtgacgtcggcacccacggcggcaaggccgtagcccaggcgcgcgccgtccatgaacagccgcatgccgaagtcgcggcacacctgcgaaagcgcctcgagctcggccagcgagtagacggtgccgtactcggtgggatgcgagatatacacggccccgggcgccacgatgtgctcgcggttctcgtcggcccagtacgcctcgcagagcgcccgcacctcggcggcgtccagcttcccgtcgtgctgcggcagcggcagcgtcttgcgtccacacgcctccaccgcgcccgcctcatgggcggtgatatgcccggttgtggcggagatgatgccctcccacggtcgcaggatctggtcggccaccgcggcgttcgcctgcgtgccgcccacgaggaagtacacggcagcctcggggcacgcgcacgcctcgcggatgcggccgcgggcgcgctcgcacacctcgtcggtgccgtagccgctcgtctggtcgaggtttgttgcagccagccgctcgatgatggccggatgcgcaccctccatatagtccgaatcgaaatgaagcaccggttgcccctccccgttctacgatgtgtactgttgcatatagtctaggatttcctggcgcgagtgcaagccggtcttcgcatagatgcgcttgatatgcgcatgggcggtgcccggcgtgatgtagagctcctcggccacgcgcttctgggtgtagccgagcgcgtagagcgcgagcacctccatctcgcggtcggacagcaggaactgccgccccatctcctcggcgttgtgcttcatggacgcctggcgcacgtcggccaggctctcgtgctcgtccagtcccatgatcttcacgaggacactctcctgccgggcgttctgctgctcctgttcctgaacgtcgcggcgtgcgatgttcaggaactgcacgaaaatgacctgggccgatacgacgatgcatgatcccatgagcgcattcatgagcgtctcgttcggcacaaggtcgaacgaccccaacagcgccacacgcgcgatagcgcggcatcccagccacacgagccagccggcgatggcgtagtagtacgggtcgcgccaaccgtagctcatgaacgcgatgacgacgtaccaggtgaaagccaccatgagcgcgttgagcgtggtggtgaacacggcgcctatgtccaacatgtcggggaaggcggcataggcaacgagcgcgaggcaggccagaagctccatgacgatgaagatgcccacggtgagcacccgctggcggccgtgcaggaccagcgctatgatagcaccgctaataccgacggtgagcaggccatacgctgcgcgtgtcaccggtgtgaacgcgatggcctcgccgctgggatagccgcgcagcaagccgatcacgacagagaggacgcctatgccgatggccgtggccgcgaggaactgcttgctctggatcatggtcttcgtgaagccgaaatagtcgttggactgcgatgctcctgccgcgatgtcgtgcggctgcgtgcgttttctggcccaaagcatgcacgggtactgcaccagcacgagcacggtggcaaccaggttccccacggcgacgggcagcagcgtgcacaggtagatttcgacttcgctcaagatgagagccgagaacacgaacagggccgcgacgatggtgccggtgccgcgggctcggcgcagccagtagtagatggtggccgacgacacgagcgtgcagagtgcgctcaaggcgaaccttacggctgggttgttgatatcggccagctcgggcgttgccaaggccacgagcgtgaaggcctccaacgcgatgcagatgcgcatggcggcgttcgtgacgcgcttgccgagggagaccttgccaaccgatatgacgacgaagaacacggccagtacgctcaaggtcacgagcatggcgccgtcggtgaagatgccctcgtccgtgctggtgtagctgccatagctggcaacgataagccctgcccgtccgaacgcaaggcccaccacgagcggccagagctgtgcgcaggtgcgcaagaagtcgcccggtgtctgccgggcgctgtgctcgtcttctgtttgctttgcgatggtgccagcatgaccgtctgcggtcggctccaggcggccggatgcccgctcggctgtgcgggccgctgcctcatggggcgcttgatatgccaaaaccgatcctccccgttcgtataatggcaacatggtaacgcttcggccgccgtgcgtaatcgtcgtcggctttttgtaaacaaactgggtcaactattcccgcgctctcgttctcgcgcggcgtggaaatcaggatagcaggactttccgccgcgaaaccgaattttatccctaaagagggtaggccggcgcgggggcaacgtgcattattgaaccattcggtgaagctttccgctgccgtccgctcgcgcttcgtcgttcggcggacggtctgacgacgagaaggagcaggcgatgggagagtcgaggaacgtgtacgtcgagccagacgagcgcgccgtcatccgcacggccgacgtgtaccagacggaggtcgaggcgggtacgggcggctactcggacacgcttttggccgtggtggcgaacttcaagaacagcggcgcccccgagggcttcaacgcgcagagcatggtgggcaagtcgaagcgcggcgaggtggccctgcgtctgttcgccgtcatcgatccggaggcggagacgttcgtgcgcatgggcttcaagtcgcgcggctgcctggccatgacggcgtgcgcgagcacgatctgctcgatggtagagggcaagacgttcgcggaagcgctggccataaggcccgaagacgtgaaggctgcccttgacggcgtgccgtcggacaagctgcacacgacgtacttcgccacggaaggcgtgcgcgccctcgtgggcgacttcctcatccgtcgcggtgcgtccatcgaggagttggaccgtgcggtgccgtgcgacgagctgtccatcccctgtgccatgtgcgagcactgctcgctgcgcgacgcgcgggtggagctgctgttcggcggcgaggacgacggggcggaagaggtgcgcgcatgagcgaagaggcgatggggccggcgtgcgcggacggtttcggcgaggctgcgtccgaggatgccgccgcgcgtgagctggccgagcacaacgcgctggcggacgtgttcgacgacgtgcgcgcgcagtcggcgcagagcgcgctggtggaacccacgcgctggccggagatcggcctggtgcccgagcatctggatgccgaggagttcgagatgctcgtgtacgagtatctggaggacgagcgcgcggcccaggccgaggacgaggcggatgccgcgcccgtgtaccgcacggccacgcgggcggtgggcgtgccgcgggcgttcgggggctctgcgcctgccgaggcggcggcggacggcgtgttcgcgaatgccgagccggaggatgccgaggaggcaagcgctggggtggcagatgccgaggctacggcttgcaacgaggtgtcgttcgatccggcagctgccgatgcttcgggcgaagccttagagggcgcgccgtcggcctcggagacggctgctgcccgtgagacggtgaaggcgtcgccggccgcggcgccgcccgagggcgatgatggcggcgacccttttgcaggcgtggagcttccccctggctaccgcttggtggagatggagggcgaattcgtgctcgtgcctgacgaggaggccgagcccgtggagcgtgccatcgactgctcgggtatcgtggcgttggtgggcgcgcacagctactacctgtacgaccgcaccgtcatgaccgatgcctacgcgcactgggcgttcctggcggctgaggacgacaacgtggtgacgttcgtggactgcgtgcgcgaggactctcgcatatatccgcgcccgctcgccgcatccagcctaggcaacccgccgttcaacctggcagaggatgcggtcgcccagacatgggatatcgtgcgcgagtcgggcgcctatcccgacatccagcagacgacagcctcgaacggggacgtctactacttctcgacggagcacctgagcccggcatacgccgcctcgctggccgaatgggacgcggtggagcgcaagatgcatttgtagggtgacggggatgaggcatcatccccgtccctgtgtctcgcgcagaagggttgggtggcagagaggcggggcgatgtctcgcatgcctccctgccacgagattcggtttatttgtgctcaggagcggctttgccgggagccttttcaacgaagccctcggcgtaggcgctcggcactacgagggagccacccgattcccgcaggctttggttcacgagatgcatctggcgcagcttgaaagcaagctcgtcttccttgtagatgtcggtggcatcgtgcagcatggcggccacgtctttctctacttccgccagcacgatgcgcgcgtccttctcgcgctccgcttttgctgctgcggccatggtgtcttggaggtccttggggatgacgatgtcgcggatttccaccgacatgatggatacgccccacgagtttgtcttctcttcgattttttcgcgcaattcctggtccagtttgtcgcgatgaaccgttacgtcggagaggctgtttcgtccgattgcatcacgcagggcggtttgcgccgccatggatacggcgtcgtaatagttctccacctccatgcatgccttttcggcatcccagatcatccagaatatggcggcatctacgttaacaggcacgaggtcggaggtcaggatctcttctgcactgaagcccgtcagcatggtgcgcaagtctgccttcagggcaacgtgctcgatgaacgggatggtgaggtatagaccggggcctgccatgcggttgtatgcgccgaatcgcaggatgacgtcgcgttcccactgcgaggcaatatgtaccgtgaagatggcgatggttgcaaaaacgagactcgagcatagcacccagatgctcatttcccctgttgacatatatccgatagaagcgacgaccgcgaatacggcgacaaagacgaaggccgagaaaacattcgaggcattgtcgtcaacgtgcctggtgctcggtgaattgagaaattcgatttcgccggatcgagcattcgcgctgcccgaggcgccggctttcgctctgttattgaacaatcccatattcgctcttctcctcttccgcttttcgggccttgcgttccagttcgtcgataatcgaaagcatgcgctcgcgtgcttcgcggtacgtcatgcctttcgaccggtattgcctgatgcagttttcaagcagcgcgtcgatggcgtcttcttcggattcttccgacgagatgttcctttgaacgaacatgccgcgtcctcgtgcggatacagccagccctgaaagctcgagatcgcggtacgcttttgtcacggtgttgtagttgatcttggcttcggcggctatgctgcgcacgcttgggagctgttcgccgggtttgaagaatcccgtgcgaatcagataggcgaagcggtttcgcaactgagcccagatgggcaggtcggatgtctcgtccacgcgaaacaacgggttgtcgtcgttactttgcaatctgtcaccttttagatcgagctggatagaataggtggagtccatgtatcaggcctcagtcaatggactccgcatgtaatgaggcaataacgcaagcataatccgccaagcaagcaaatgaagtccgagacaggtatggcacggcattcctttcgagtaatcgagtaggtttcgagcgtaatgggcagcgcgattcccatgccaatcacgcctacgcccgcaatggccagcatctcgggttccatcaaaaggctgagggaagcgtctgccaaggggttccgaaaagccgcgttgacgaataaggtcaagaataccacctctgcagcaaggcaggccacatggcatatctggagcggcttggtcgcgcgcaacaaaagggactgaccttgcgtgaaccagtcgattaacagcacgacggatactcccgatgaaagagaggaaaacacaaacaggacgatgattgaccaatgattccaaaaggggatgctgccctggaaaaggaatattcccgtataggccatcgtcgccagggccccgatgcagcaaagggcttcgacgatatccagccaacgcccgcgaagggtaagggggctgttcggcagcgatgccgccagcagaagcgccgccaaaagggcttcgatggcgagcgtataggcaccgaaggtgatgacagtgggatggggaagaaagaacaccatcaaagcgcgcccggggttccctaagtctccgagcaggcaaatcatagcgaaagcgagcaacagaaaacccacggtgtatgttcggctgcgcaacgactcgaatgctgtgagcaggcgggcagggttctcggagcggcgaaaagcgaaactccacgcagacatgacgaaaagcgcgcctgcagctgcgccgcccaagaacaaatacactatgaccaaagatccgtacaaagcaccccgcattcattccgatcgagtcttccggcattatcccacgaaatgattctctagggaaatacttattgactgaaacagtgaatcgcaatactatgtcaccagtgaatgaatacggcatcgtccgtcggccgcggaggggatggcgtgtttccattcagtgggcgaaccgtaacaaagggtgggtcgcccacatcctgttaggggtctgtccgaagaaggatggcgcgtcgcgcgagcacctgcccatcttcggcaccgaagctgatagcgaggtgttgcaatgatttctgaattcccattgttcctgttcacgactttggccggcctggccgccggtgcctatgcggtgagcgccgtgctcccggtgggtaaggatgccaagaaggcgtggctgtttccgctggtatgcggtatccttttggccgttggcttggtgggcctgccgctgcatctaggtcgtcccgagcgcatgctcatcgcgctcacgcagcccggcgccatgattgctcaggaggcatactggtcgatgggcctgggcgtcatcctggtcatcgacttggtggtttccaaggtgaagggctccgcgccccgcgcgctgcacatcgtgggcgccgtcgcggcgctcggcctcacgttcgtgatggccaacgcctacttcatgtcggtcggtatcctggcatgggcatcgtggcagacgttcccgctgttcattttgggcaacctggccatgggcgcggcgctcctggtgctgttcgaggcgaagctggccgaggacggcacgtacctgacggcgtccgccgtcttgggcgtgctcgccgtcgtcgccatcgcgttggaagccgtgcatttcgcaggtgtcggcgcggacatggtactgctggttatcggcgccgtggccgtggccgcagccgccgtgctgcagttcatggcgaagtcgggcaagttgtcgccgaagaccgccgtgctatccgcgttcgcctgcgcattcgtcggcgtcgccttggcccgttacggcttctacgccgcatacgctctgtaaggtaagggggagaaaatgaccgacattacttccagcaaatcccgcggcttcacccgccgctcgttcatcgcgggcgccgcggccctcactgctgccggcgctttgtccggttgctcggctactgccaagggactcgccccgcatgcggccgactcgtcgaaagccggcgttgaggagatcttctcaggtgcgtgccgctctcagtgcattcagggctgttatctgaacgtgcacgtgcgtgacggtcagattgtgcgcactacggctggtcgcatcgaggaagagccgttctacgaacatatctgcccgaagggtttaagccaccctgctcgcgtttacagcgccgggcgcctgcaataccctatgcgccgtgtgggcgagcgtggtgctggtgaattcgagcgcatttcctgggatgaggccatcagggagatcgctgacaaatggaagggttatcgcgaggagttcggtccggaatccatcgccttcttcatgggcagtggcaacacggccgtgctgggcggcggcacagcagacgggtcggtcatgcagcacctgcagaccgtcatgggcgcttgcagcgtgcttcccgatcgcgacatcgcgttccagtcggccatgtcgaagatgttcggtcctggcggtgcgttcgtgtcccccaaagaatggagtggcgccaatcatatcgtcatctggggctgcaaccccgccgtttcctgcaagcgcatgatgcacctctaccttgatgcgaaggaggcgggcgcgcagcttaccaccatcgatattcagtacaacaccaatgtagcgaagtccgattggtacgtccctgtccatcctgcaaccgacggtgcgcttgtgttcggcatcttgagcgaagttattgcccagggctggcaggactccgaatttttgcgagcccataccgaggctcctttcctggtgaaagaagacaacacgttcttgcgcatgagcgatttgggtgttccggctaaggagggcccggtgaacgctatgacgggcaaacctaccgtcattgaccctgaagtggtgtgggacgaggcgacacagtccgtcaagccctattcggaagccgaaatgcctgcgctcgagggtatccccggagaggtagaaggttttagaatccgtccggtgtggagcatgattctcgaagctatttccgcttggacacccgagcgcgcctctgagacctgtggcgtgcccgttgaagacatcaagcgccttgcgcgcatgtatggccaggagggccccgtgctcaccggcatgaaccagggcttgaaccattacttcaatgccatctacacttatgatgccatctttgcccttatgcttatcacgggcaacataggcaagccttctgcaggcgtcatttccggcggtggcagcttcggcatcagcaactcaaagggctgcataaaccagcctagctccaaaggcgaaaagcctgcgggtcccggtcgcaatatcaactggactgcgctgtacggcattgtccatgaccaggaattactgggcaaaccgttcccactgaagagcctgtactgctcgtgcaccaacatcgtgtcgaaccagaccgagcagaacgagaccatcaaatcgctgcaggagatagagtttttggttgtccaggaaatgaccatgagcgacacggccctgtatgccgatatcctgctgccagcttgccattggttcgagtgcgaagatgtgcgcgttcgttcgtacaacatgccgtaccttttgtacaacgacaaggcgattgagcccctgtacgaaagcaagcccgacttcgacatttacaagatgatcggaactgccatgggcttcggtgatttcttcgacttcaccgaaaaagactatatttctctgtggctcgacagtcctgtggcaaagaaggagggtgtcacatacgaatcgcttcgcgagacgaagattgcccgcaatcaccaacttaaagacaatccgcttctaggtggtaaattcttctaccagaacggccgtgccaagctttggacggaaaaggtcgttcccgagtataacctgggccaagaagtcgacgagagcaaggagcacctgcttctgtactgggagccggcgcgtgaggcaaacctggaagcgcccattcgcgagaagtatccgtactctgtgcttggcgagcatatgcgcacgcgcaaccacacgcagtggtgggatgtgggctatatgaaggaatacgagaggcagccagttgcgcgcttcaaccctcatgacgccaaggagctggggattgccgagggcgataccgtgcgcctctacaatgataggggctcggtaacgctgttggccaccattaacgccggccaagcgcccaagaccatcaactgcccgcgtagtttccttacgcgcgagcacatcgatggagatttcgcaaccatctcgtttaacgactacaaccaggtgacgcgcaatcagtgctacttcgaccaggccgttgccgtcgagaagctgtaggaggactgatactatgactcgatatggtatggctatcgaccttgagcgctgcgttggctgccaagcatgcgccacggcatgtaagatcgccaacaatctgcccaaggatataacctacaacacggtgtatacaaggacgagcaccaacccggacgatttcggcacggcagtcgtgcatggcgctactgccaacgataatgcattcggcgagtttccaaactgcatgctggaattcctgccagtgcaatgccagcactgcgacaatcccccgtgcctgagcgtatgcccgacaggtgcgacgaagaaacgtgctgacggcatcgtatatgtcgacaactcgctgtgtatcggttgccgcgcgtgcatgatggcatgcccgtacgatcacgtgcggtcgatgaacgaaggtgcgcccgagtattatctcgatgttgtggtgggtgaagctgatgcaccgacgcacgaggctggcacggtggaaaagtgcacgttctgccataacctggtcgatcgtggcgaattgccggcgtgcatgcaactgtgcatgggtcgcgcccggttctggggcgatttggacgacccggagtccgatgtatcgaaagccatcgaagggcgcagctactacaagttgcgcgaatcggcgggaaccagccccaatgtgttctatctcacaaagtagccgtttgagccgtcgcgtcctgctgtgcgcgacggctccccaataggtggagtggttcatatgggtgaaggcatcgaatggaagcttcatcgggctgtaggtttatccgacctcgcatcacttctggcgactggcttctcctttccggacggtaagctcgcccaagcgctttccgacggggcatttctcgatgattggcgtgcgagcatcgtcgatgcgtgcggcagggaatcggcgggcgatgcgcgcttgtcaagtcgctgtgctgtggctttcgctgaaaccgacgaagggctgttgcgacgcgagtacagccgccttttcctggcacctggtgtcgacgtgccgatttggccctacgagagtccttttttacatcgtatggtgggcgccgaaggagctccgtcgctgttccgaactcgcatttcgatggacgtcgagcgctgcatggcagcagcgggcgtggtcacggtcgatctgtgccgagaacctgtcgacagcgtattccacgaattcgagtttctggcgcatctacacgcttgtatcggcgaggcgcttcgagttggagacggtgacgccgagagggaatggcgcgaccgtctgtgctcgtttgccagcgatcatgctttgaagtggcttcctgctttcatgcaggaagtggcggacttcagccgcttgggagaatatcgtgcatttgcccgtttgggtgtgcgctatttgggtgaactggcgaccgaaacgggagccgatattggaattgtgagctctgcgtcctgcaaggggtgatcgcatgacgtttctgatcgtgttcgcatgtacggcagcggcggcgtttctgctgaaaccggccatcaaaaaggtgccggtggcgtggtacgtgtcggcaggcatcctgatggtgctctacgttgcggggctgcagggctggctgccgttgccggctccggttcgcagcgtgctgttcctgctgctgcaaaagggcacccttgcggttgcgctgttcgcggtggtgatgttcatcggcgcgctcccgcgcgattcggggccgcgcaagcatctcatgcccatccgtgccgagctttccgtcatcgcatgcatcctggtatgcgggcatatcgtcgcgtactgcctgtcgtacgtgccgcgcatgatgggggcgggtggcgttaaccccttcgtcgccgtcgggttggcggtggcagcggctatcaccgtgctgctagtcgtgctgggcgtcacgtcgttcaattccgtgaaggcgcgtatgagcaagcagatatgggtcaaggtgcagaagtgggcttacgtgttcttcggcttgacgtacgtgcacgtgctggccatgctcctgccgagcgctctcggtggtggcgctgcagccgtgcagagcgtggcggcttacacggtcgtgttcggcgcgtacgccgtgttgcgcgtggctcgcgccaagcgggaatcagggggctgtatcaaagaccccagatcgcaagcccgacaggggaccgcctcatagggcaagtgctctgctcttgccctacgctcgccccgggagagacggcgaggcgaggcttttgatgcagctcccgcgcctccatgcagaaggccccgacgatgtcggggccttctgcatgtataagggtgcaggcgccgggaaaggggaaggagggggaggccggcgcctgctcgaggttgtcagtttacggcagcaggttgagcgactgcagctcttccttcacgtcggccatgccgtacgcgtcgaggcaggcggccgtggggcagcccagcttctcgtcccagccgaacttgccgtacaccatgccgagcgccgtctggaagtcgtcgcggtccatcttgtcggtgccttccgtgaacggcttcttgtccgggtccttgtcgaaggcccaggcggtgatcacgtcgtggtcggcgcgcaggtcgttgttgccgagcgagccgtcggccttcgtcatgccgcgcaccgtgttcgcgcgctgcagcgtcatgatcttggcgccggcctggtacaggtcgtcggtggtcaggtcctcgccggtcacagccttgaagaacttggcctccaggtcgaggtcgccgcggtagttgcgagctttcgtggggctcatggtcatgggccacacccagttgcacagcgtgagcgagtcgtgcagcacgtcggtcacgaggctccaccaggcgaagttcgccttgtggtcgttcatgggcgtgtagttcttgtcctggtcgatggcgtcggcgccgccccagacctcctcggcgatctgctgcttcagctcgaagggcaggccgcagccctggaagttcacggcggagtggatcatgtcgtcgcggttgaacatcatgttgtacacggcgcccacctggccgaagcactcgatggcgtggtgcacgggccagccgcggtagttgatgagcgtggacttcgcgttgtcgaaccacgcctgctcgttccaacgctcgcaccacacgtacgggccgtgggccagatacgagatctcggagtcgttctgcgcgatcttcgtgaggatctcgatcatgaccgtggggtcgcggcgatcggcgtcgaacttgccccagtcgatggaggcgtactcgtcggccggcagcacgcgcttgaacacgccgttggcgtggcagtaggcgatgtcgcggtagagctgggcgtagttgcaccacaggcccaggttgtccatcgtgttggacgtggtggtgtcccacaggatggaaaggtcgccgtcgtccttcaggcccatcttcaggaagggctccatgtacacgctcacggggaagttcgccgcgcaggtgttgcccgcggtctcgtagcccgtggtctccttcgtgccctccacgcgcaggtcggagtagcagtggatggggcagctgtggcagccgttcatcttgatggtgtacttcgaggcggcctcgcccaggtccttcgtggacttcatgcagcggtagcccacggtgttgatctcgccgggcttcggctcgcccgtctcgatgggctcgccctcggcggcctcccagaacaggcccttgcgcgccgtccagcgggagcccttgtcgtagtactcggcccactcctgctgggtggaaggcaccacgtggttgttgttcgagccgatgatctcgcgcagcatgtagtcggacaggtccgccaccgtctgcgggtccttcacgttcacggagccgtcgccttccaccacgagggccttgagcatcttcgagcccatgaccgcgcccgtgccggcgccggcggagtggttgcgcgagttgatgatgcaggagtacggcgtgaggttctcgcccgaggggccgatggcggccacgcaggcctgcacgctctccttgcggcagagcgcctcggtggcggcgcgggtgcccaggccccacacgccggaggcgtccttgatggtcacctggtcgttcttgatgttcaggtacacgggcttgctggaggcgccctccaccacgatggcgtcgtagccggccagcttgatcttcgcgcccagcatgccgccgcagtgggcatcgacgatgaggtggtccttcgagaacgtggacagcgagcagatggtggtgcggccggccaggggcacgccggaggccgtgagggggcctacggcaaagacgatcttgttctcaggggagaagggatcggtgccggcgggaacctcgtcgaacatgatcttgttcgccaggcccatgcctccgatgtattctttgtaggggtcggtcggttgcgtcgtgaccgagccggtgctcagattgacgcggagaatcttaccggcccatccgtacgatgtttcgtcagccatgttgcatctccaaatcttggatagactactgaggttcgtgttgtgtgggaaccgtcggccgcgatgcgagcgctgacaacaatcgtcgtgccgccagtatgccgacccgcgcgcccagggtataccctctttgggggtaattccgcaaaatcgccgttcaggaagcagaattccctcaaagaggggagggcgtccatccagcgcacggcatacttccaagtgttgtgtggtaccgcgaatcggaagcgagccgagcgcagccaccccgagggcgcacgcccgccgcgcgaaggcgacggcggggagacgagcgagcacgagcgcgccggcgggggaggcatacggaaacgacactcacggaacttaagtgagggagggagcaccaggctatgtcagattccaatctgcaccagaacacctccgaggaccagggcgtcccgagcggcgcgcctgcgacgaacggaaccgcgcccgcgcccgagaacgtggcaggcgagggggatcgtaaaagcaaaaccttcacgcggcgcagcgtgctggccatggcgggctgcggcgttgccggcctcgtggtcggcggcgtgctggcctcgtggggcgtgacgtcgaagtccatcgcctccgggcgcatcgagatccgcacgacgcccacgaagatgatcgtgaccgaccgcgcccgctgctcgggctgccagcgctgcgagatggcgtgcacgctgaagaacgacggccgcgtctgccagcacatcgcgcgcgttcgcgtgtggcccaactacaacttcggcacgaacgtgggcagcaccgacggtgcctacggcaactgcgagttcaccgtggagcactgcaagcagtgcgaggatcccgcgtgcatgaactactgccccgtgcatgccatttacgccgacgagaagtccggtgcgcgcaaggtggacgccgaccgctgcatcggctgcggcatgtgcagccaggcgtgcccgtggaacatgccggtagtggattccgagacgggcgtgtccacgaagtgcatctcgtgcggccgctgcgccgagcagtgcccgaacggcgccatcaagttcatcgactgggaggatatcgcgcagaaggtcatcgaccagggcgtcgtgaggacgacgaccctcgtgcaggcgtgatgacgcccggtgcagcccccgctttccgtgccattggctcggaaagcagcgaaaacggaaaggaggatgagcgatgatggaagacgaggccgtgttctcggtgcttgcccagtgctttggccccgtggacgagggctcttggagccagctggtgggtagctcgctgtggtcggacttcctcgacggtgcccgccgcgtcatgcaggcagacgagctgggcgtgcaggcagcccccctcgcacgggcgcgcaagcgctgcccgctgcaggagttcctgtcgtcgggcgaggtgaacgcgctgttcgcgccgccgacatacgacgagaagcaggccttcgccgcccgccacttcacgggagggctccccgagtccgccgtgccggtggagtcgctctaccgcacgtggtctgcaggggccgcgcccgctccgttctcgcagcaacaggggctgtacctgggagattcggcgcactacctgcgcgagctggtcgagcggctgggcatggaggtgccgccggcgttctcggcgtgccccgaccacctggcgctcgagctcgatctcgtggccgtgatgctgcggtccggcatgcgggaggaggcccggcagttcctcgcggagcgcttcgcctggctcaccgcgtaccgcatgcggctcttggccctggaggacgaggcccgcttctacatcgggctcgtcgacgtgatcctggccattcgcgcgcagcagacgaccgccgatgcggtggtcgcatgagcgccgacgataagagaactcacgtgcatgcatacagagaggaaacagctatgtcagaaaacgctataaccaggcgaagcttcctggctggcagcgctggggcggttgcgctcacggcggcagccggctatatgggcttcgacgcttgggagcaggcgcatgctgatgacgcatcgggaggcggcgagaccaagaccgtccacacgctgtgcaacgcctgctcgagcaaatgcggctacacggcctacgtggtcaacggccgcttgacgaagctcatcggcgatgccgaccacccctactccaagggcaagctctgcgcccgcggctacggctactcgcagatcgcctactcggaggatcgcctcaccgacccgctgaagaagaacgagcagggcaagttcgaggccatctcgtgggaccaggcgtacagcgagattgccgagaaggtgcgcgccattatcgacgccgacggcccgcaggcactggccatggtgcaggacccgcgccccagcggcaagtactacacgaagcgcttcatgaacgcgctggggtcggcgaacgtgtacacgcacggcgccgcctgcaacctgtccaaggaaagcggcatgactcaggccatcggcacgggcagctactcgtccgacgtggcgaactccaagatgaccatgttcatcggccgcagctacgctgacgccatccgccccagctccgtggtcgcgctgcagaaggcgcacgagaagggcgcgcacatagtgctggtggacccgcgctgcaacaacagccgcgtgttcgccgacgaatgggtgcccatcaacccgggcaccgacctcgcgctcgtgctggccatgagcaacgtgctggtgacgcgcggccgctacgacaaggagttcgtggccgcgaacaccgtcggcttcgacgagtgggcaaaggagctcgcggagtacccgcccgaatgggccgagggcgtcacgggcatcccggccgacaccatcgcgcgcctggccatggagttcgccgaggcggcccccgcggcctccatcgagcccagctggcgcggtgcgttcggctgctcgtacgagaactcgggcgagacggcgcgcgccatctgcctgttcaacacgctcttgggttgctggaaccagaagggcggcgccctgttcacgcccagcgtgtcggccggcaagctggccgacgagcgcttcgccgacccgaagaagcccgagggcaagcaggtgggcgcggccgagtacccgctcgcgctgtcgagcatgggcacgaacctcgccgccgcccaggccgccgaggacggtaccgtgaagggcatgttcttctacaactcgaacatggccgccggctactcgaacacggcgaagctcgccgagctcttgggcaagctggacctcatggtggtcgtggacgtgcagatgtccgagacggcgatgctcgccgactacgtgctgcccgacacgagctacctggagcgcctggagctgcccgagttcatcggcggcaaggtgccggccgtggcgctgcgcgaccaggtgatcgacgtggtgcacccgaacacgaagccggtcgaccggatattctccgagctggccgaggcgtgcggcgtgggcgagtacttccgcttcggcgtggacgagctggccgacgcgcagctgcagacggtgggcctttcgctcgatgcgctcaagcagacgggcacggcgcacttccccgagaaggaattcgcctacggcacggcgccgaagttcaagacgcctaccgagaaggtgcagttcacaagcgaagcgtgcgagaaggcggggttgtcggccgcacccgtgtgggtggagccggccgtcatgcccatgggcgacgagctgcgcctcatcggcggcaagcaggccatccacagccacacgcagaccgcgaacatcgaagacctcatgcagatcacgaaggattacgacctgacccgcgtctggataaacgccgacgtggccaagcgcctgggcatcgaggacggcgacgaggtggaggtgtcgaacccccagcacacgggccgcgtccgcgcgaaggtgacgcagcgcatgaaccccacggcgctgtacatgcccagccactacggctgctcgtcgcccgaccagcacaccgcctacgaggtgggcctgcgccagatggacttcgtgccgttccatttggagccggcttacgggggcgcgtgcacgcaggaggcggtcgtgaccgttaagaaggtaggtgcgtaatggcccgttacggaatgctcatcaacaccaagaaatgcatcggctgctacgcgtgccgcgtggcctgccagcgccagaacgacctgctgcccacgcaggacttcatccgctacgaggagcacgagacgggcacgtatcccaacgtggccatcgagacggtgccgctgcagtgcatgcactgcgaggacgccccctgcgtggccgtgtgccccacgggcgcggccttcatcggtgccgatggcatcgtgggagtggacgaggggcgctgcatcggctgcaagtactgcatggccgcctgcccctaccaggttcgcgtgcacaacgagaagacgggcacggttgacaagtgccgcttctgcacggtgtcggccgagacgagcggcacgaagatgtgctcgtgcgtggaggcgtgcctgacgaacgcccgcatcttcggcgacctggacgatcccgaaagcgatatctcgaaggagatcgccgcgacgaacgcccagcccatagcgggcgacctgaccaaatccaaagtattctacgtgaggtgatgagcgatgtcttttgaacctatctggggcgccatcatcgcatggtacctgttcctcgccggtctgggcggtggcgcgttcatcacctccgccttcctgggttggcgccatcccgaggccgtgtcgatgcgcaaggtggggcacctcatcgcccccatcgcggtcatcatcggcctggtgctgctcatgttcgatgccgagggaggcctgcacaacccgctgcgcttcgcgctgctgctgacgaacttcggctccgtgatgacgtggggcgtcgtgttcctgggcggcttcaccgtggtggccctggtcgtggtggtgctggacttccttaagaagtcggtgccggtgtggctggacatcgtgggcgtggtgttcgcggtgtgcgtggccgtgtacaccggcgcgctcttgggcgtgtgcaaggcgttcccgctgtggaacaacgcgctgctgcccatcctgtttttggtgtcggccgtctcggccggtgctgccagcgtgctgctggtggccgttatccgccatgcggacgagttcaaccgcgtgggcgtgctgaagaagttccacttctgcctgcccatcatcgagctggtgctggtggcctcgctcatgttcattaccagcttcaactccgttgcgggttggaactcggtcatgagcttgctggtgggccagtacgcgccgctgttctggatcggcctggtgcttatcggcctcgtgctgcccacggcgctggagacatggcttttgttcttcagcccgaaggagttcgaggagagccgcaaggcccactggatcagcttcggctccgatgccggcgtgctggtgggcggcttcctgctgcgcttcctggtggtcatggcggccctgccggtgacgatcacggtgcccatgctgtagctgcgaccgaacaagtagtgcatctgccacgcgccgcccctttcgaggggcggcgtttttttgcatgaaagggacggtgtgtaggttgactcaaccgttgattgagttgaagtgttgcggaaccgtaaattttgcacgggccttcggggaacggtaaaatcagctttctaataaagagaagcctgagtcccgcatgagaaacattagccgaaaagagaagaagttcctcgtcgacctgacgagtgcgaagaagctcgaagggctgctctcgcaagtgatgcccggcgatccgcacaatggctcacgcggctacccggtacggtcgctctacttcgacacgctgcacgaccgcgacttcgcagagaagctgttcggcaccgatccgcgccgcaaggtgcggctgcgcgtgtacgacccagcggcggacttcgcgctgctggagctcaagcagaagcagggagagaaccagcggaagcgctcgctgcccttgacgcaggccgaggcgcgccgcctcatcgacggcgatttcgacgtgctgctcggtcgcgaggagcccttcgccgcggagatgcacgcgctcatgagcatcaacggctatcggccgaaggccgtcgtcgagtacgaccgcacggccttcatcgcgaaggagaacaagacgcgcgtgacgttcgaccggtcgatccgcgcgaccgagctgaactacgacctgttcgacccgaagctgcccctgtatccggtgttcgacccgttcaacgtggtgctggaagtgaagttcgacggttttctgctcagctacgtccggtcggtgctgaatatggcggacaagagcgagctgtcggtgagcaagtactgcctggcgcgcggcgcgcgcatggcgtaccagttctaaagaggagagagcgtgaaagagcaactgtaccagctgttccagggcatcacgggcgcgcccacggtggaggacctcctgctgcgcgtgggcgtgtcggtggtcatcggcctggccatcttcgtgtcgtactggatctcgcatgcgggcaccatctactcgcagaagttcaacatcaacctcatcacgctcaccatcctcacggccacggtgatgacggtcatcggcaacaacatcgcgctgtcgctcggcatggtgggcgcgctgtccatcgtgcgcttccgcacggccatcaaggacccgcgcgacaccacctacatcttctgggccatcatctgcggcatctgctgcggtgtgggcatgttcctggcggcggccatcggcagcgtggccgtgttcgtggtgctgctcatcctggggcgcgtgcgcaacgacgtgcggacgcttttgatagtgcgcgccgcgcgcacgcaggagctgcccatcgagggcaaggtgtacgagtatttcggcggccgcgccgtgcagcgcgtgaagaacaccacggaaaccgacgtcgagttcatgttcgagctgtcccgcggcatgctcgaccgcgcgcagaagaaggccgagcgccctatcaccgacgagctgtacgccctcggtggcatcgattacgtgaacatcgtggcgcaaaacgacgagataggcagctagcgcgttggccatggaggcattgcgaggcaggaaataccagctcatagccgtggcggccatcgcggccgtcgtggctgcgggcgtcgtgggcacgctggcggacgcgaacaagctgctgccggagcggtaccatcagcatgaaaaagcccagcagctggccgacctgccagaggccgaccgcgcggcggcgtccggcaccaacaccgatgcggccaccttcgcctcgcacctgccggtcgtgagcatcgacaccggcgggcaggagataccgggcgagctcgtccgcgacgagaacggcaagaccatcgaaggcggagacggccgggccgtcgtcactgctgcgccttccggcgagccgtccatcaccgccagcctggtcgccttcgacgccgagagccaggacgcggtgcgcgcgaaccggctctccgacgagcctgagattgaaagctcgtgcctgctgcgcatccgcggcaactcatcgcgcgctttcgacaagaagaactaccagatcacgttcgtgaaaagcgacggaaccgacaacgaccaagagttcttgggcatggcgaagagcgagacgtggacgctgcacggtccctcgctcgacaagaccctcatgcgaaactacctggcgtacggcatcgctggcgagttcatgaacgactacgtgcccgacgtgcgctattgcgagctgttcatcgacggcgagtaccagggactctatctggcaaccgagacggtgaaggtggaggacggccggctcgacctcaaccccgccgatccgaaaagccccacgaccagctacgtgctcggcatagatctgacgggctccggtccgctgaccatctcggatttcctccgctacacgctgcgcctgagcaagtacatgaacatcgagtatccgaacgcgaccacgctcaccgatgagcagaaggcgtggatcgagcaggatgtgagctcgttcgagaaggctttgttctcgtacgactacgacacccgcgactacggatacgtcaactacatcgacgtcgacagcttcgttgattctttcgtgtggaacgagttcgtcatcaacgacgatttcgccgcttactcgacgtatctgtacaaggacgttcggggcaagctcacgctggggcctccttgggacttcaacaacgtgttcgacaattatcgactggccacgcctactgacaagttctacctggtcgatcgtgcgtggtacttcatgctattcaaagacgaggcgttcaccgagcgcgtgatcagccgctatagggagcttcgggcgggcgcgttgagcgaggagcacctcaacgcctacatcgacgagacgacggagtacctgggcccggtcgtggagcgcaacttcaaggtgtggggctatctgctcgacgctgaaaatgtttcccatgcgcagaaggttgagcctgacgagcggaacccgcgctcgttcgacgaggccatcgatcagttgaagtcgttcgtgacggagcgcggtgcgtggctcgacggttccatcgagcatctgcgccaatactctcatgagtcggccgtcaagaagttcaaccattagggaagggaggggtccgtgaagaagttcatcatcgctgccgcgtgcctgttcgcgctggcggcttgtgcggcgttcgccgtgttcggcacgagcgtgagcatcgatctcgacccctcaaagcccgtgaccgcctgggtgcgccaagagggacgtgcgatccagatcgatcgcggcgacggttgggaggatttcgagatacgcggcgtggacatgggcgcgggcatccccgggcatttcgccaccgactacgccatcgacaaggagacgtacctgcgatggtttcagcaggtcaaggatatgggtgcgaacaccatccgcgtctacatcctgctgggcaccgacttctacgaggccttctacgagttcaacaaggataatcccgatccgctctacctcatccacggcgtgtggatcgatgactacgcgcagaactcccatatggacgcatacgaccccgcctatctcgggcggttcaaagaggatgcgcgcacggtggtggacgtgatacacggccaacgttggatcgagcttggccggctgtccggaacgggcatgtacacgaaggacatctcgccatgggtgctcggctacatcctgggcgtcgaatgggaggcgcctaccgtcatctacaccgatcgcacgcacgagggcatgggcacctaccatggctcctacgtgagcagcacgtcggaggcgagcgcgttcgagatcatgctcgcccaggtgggcgatgacctgatgggctacgagtccaagcgctacaagcagcagcggctgcttgctttcagcaattggcccaccaccgacccgatgagctatccgctgccgctgcagctgttcttcgagaagtacagccaggtggatgtggagaacatcgtggccgaggagaccgtggtgtcgggcatgttcgcctcttaccacgtgtacccctactatcccgactacctgcagtacctgcccgaatacgccaacgctgtggacgatacgggccaggtgaacacctaccgcgcgtatctggagacgctcgttgcgcaccacagcgtgccggttgtcatatcggagttcggcgtgcccagctcgcgcgggcgcgcccaggtggacgcgaacaccggtcgcaaccagggcggcatgagcgaggacgaccaagggagggccatcgttcgctcctatgtcgatatcatggcttcgggatgcgcggggtcggtgatcttcacctggcaagatgaatggttcaaacgcacgtggaacaccatggccaacgtggatctgctgaagacgccctactggagcgactaccagaccaacgagcagtatttcgggcttttgtcgttcgaccctggcacggagcgcagcgtgagctatgcggacggcgacgacgaggagtggacggacgcagacgtgatcggcgaggccgacggtcgcacgctgtcgatgaagtacgacgagaagtttgtgtacctcatggtgcgcggaagcgacgtcggaccgggcacgccgctgtacctgccagtggacacgacgcagaagacgggcgcaacggccagcgccgacccggtcgtgtcgttcgagcgtgcggccgacttcctcatcgtgctcgacggcgaggacgagagccgcgtgctggtgcaggaacgctacgaggtcatgcgcgccatggcgttgcgcaccacgaccggcgaggatccttatgagaacatccctgcgaaggacacgacccggttcaagcacatcgacctggtgctgcagaccataacggaaacccaggccattgcagatgcggtcgccaaccagaagaacgccatcgcggacaatttctacttcgagtcctacgagaccggcaaactcgtctacggggacgcgaaccccgcgcacgaaaacttcgactcgatggccgacttctgctatggcgacgggttcgtggagatcaagctgccgtggcagctgttgaacttctcgaatccctccgagatgcagatccacgacgactattacgagcactacggcgtggagaacatgaagatcgaccgcatgtacgtgggagtgggtgacggcgcggacgggcaggccatcccgctgttcgagaagccgctcaagggctggggcacgaaggtgacgtaccacgagcgcctgaaggagagctactacatcgtgcagcggatgtgggcggaaggcgtcccggccgaggagctgtggcgcgaggacgcggcaacgggtggtgagacgacggatgccgtcgtagcgggcggcacctcgtgaagatcgagtggctcatagcgttctacctgttcatcagcgtgatgatgatcgcgttcaacttcgggtacctggcctacgagaagctgcacgcgaagcgcttcgacgcgcggacgaagcggctcgcggaactgctgggcgacgagatcgagcgcaacgccgcgtttcccaccgaggagcacaagcgcacgctcgagcgcgcgatgcgccggatggccggcatggagtcgttcgacctgaccatgggccatctgctggagcaggaccccgccaagagcgagcgctacctgcacggcatcgccacggtgttcgaccacctcacctaccacttcgcgaagaaggacgacctgcactgcgcctacttcgcctacatcgtgaagcgctggtaccgcgaacggccggccggcaacaccgttgagcaggcgctcctgcgctacgtgcgcgagggctcgttctacgctcggcagaacgcgctcgaagcgctttcgcaggtgggaagcgcccgcgcgctggccgaggctatcgccacgctcgagcgcgacggggagttccacagccccaagctcatcacggaggccgcgctcgcgttcgcgggcgaggcgacggagctggaggccgagctcaaggagcgcgtcgggcgcttcagcccccacaccgtcgcggccctcgtcaactacctgcgcatggcgggtctgggcgatcccgacgtcatcctcgccctcatgcgcgacgagcgggaggacctcgaagtgcgcctcgcgtgcatccgctacttcatgcgccggcactggccggccgccgaggccgacctgctcaaactcgcctccgacaacgatccggcgcgctgggagtaccgggccatcgcggccacggcgttgtcgaattatcccggcatggaggccgtcgaggcgctgaaggggtgcctctcgagcccctcgtggttcgtgcgcaacaacgcggcgaagaccctgtacgactacggcctcgcgctcgacgacctcgccgacgtcatgaacggccccgacgcctacgcgcgcgacatgctcgcctaccactgggagctcaagcgcgtggaggaagaggagcgcaagcggaaggaggcgcttccggtatgatcgccaccaccgtgacagccgcggcgatcgtgcagggcttcctgtacttcgtcggcgtgttcttcgtgctgtacctcatcgggtactcgacgtttctgttcctgtcggtgacggtgggctcgtccatcctgcaccggcgcaagcgcgaggcccactacaagagcacgctcgaggtggactgctacgtgcccatcaccatcgtcgtgcccgcctacaacgagagcgtgacggtggaaagctccctgcgctcgctgctcaacctggactacacgctctacgaggtgatcgtcgtggacgacggctccaccgacgataccgcgcagacggtcatcgacgcgttcgacctgcaccccatcgaccggcccgtccgccggcaggtgccctgcgcgcccgagcgcggcgtgtggtacgggcgcgtggggcgcattccggtcacgctcatctccaaggagaacggcggcaagtccgatgcgctcaacatgggcatcaatgcctcgcagtacccctacttcatctgcatcgacgccgactccgtgctgcagtacgactcgttgcgcgagatagccgcgccgctcgtggagcacgagaacgtggtggccgtgggcgggctcgtgcgcatctccaacggcatcagcatcaaggacggccgcctgaccaactactcgctgccgaagaagatcatccccgccatgcaggtgctggagtacgatcgttccttcctgtcggcgcgcatcctgttcgaccagttcaacggcaacctgatcatctcgggagcgttcgggctgttccgcaaggacctggccatcgcgtgcggcggctacgacctggacacggtgggcgaggatatggagctggtcacgaagctgcacgtgttctgccgcaccaacggcagggactacctgataaagtacgcgcccgacgccatctgctggagtcaggcgcccgagaccctgcgcgacctggtgaagcagaggcgtcgctggcacaccggcctgttcgagaccatgacgaagcactggcgcatgttcgccaacctgcggttcggtctggtgagcttcttctcgtacacgtactttttgatctacgagctgctctctcccgccatcgagctgttcggcctggccacggtggcggtggctgtggcgttcaacttcatcaacatcccgttcatgatcatgttcttcggcatctacgccgtgttcggggccgtgatgtcgctcacggcgttcttctcgcgcgtgcagacccgcgacctcaagctctccccgcgcgacgtggcgaaggcgctgctgctgtcgctcttcgaggtgacggtgctccgcttcgtcctggccaccacccgcatgttcgcgctgctgggctatcgccgcaaccgcggccgctggggcagcatcaagcgacagaagatcgacgtcgagaactgaacgagcgaacgatccctcctggtcgttccgagcgagaggctcttgtcgtcctgagcaagcgcagcgagtcgaacgatccccatgcgatgtcagccgtagcgcttcctgctcgcgccgcgcgggatccttcaactccatgctgcgcacgccgaacgagatgacagccggaggagtacctcgtaaaaaaatgctttccgatgcacagaaatcaacgcggtgaagtgttttggtgggctccgttactcctgcacgcgcactcatggtttctgggggagcgtttcccctgctcggaaaatgatgggatgagccaaacgcccctcgcgaacttcacagcggcacgttctgtgcatctgagaacccgaaaatacgaagacaggatcgcggccgaaaatgtcgagaaaggggctgccccctttctcgacattgcgataatccgattttcccatccgtggaaatcctaactttcaataccgtatttccgcaggtgaggcagctggaagaaaagagggaccgcctccttttgggctatttttgcggctccacgatgttgaagaagaagtcgaagtcgaccaggtgctcggtgagcttcttcagcacgtcggggtcgccgtccacctggatgctcttcgcttgggcgttctcgtcgcggttgaggatggcgaacaggtccaggcgcggcagggtgagcgtggcgtcggcgtccgcatactgcacgccgcgctcgtagagcacgacgcccgcgcgcacggtgagcgcgtaggggtcgtcgtcggtgaacgcgaggttcaccacgaggtcgaggtcggcggccgcgttcgcgtcgagcaggatgcccaggtagtccagcatcatgtcgggcgtcatggcgcgtaggatgtcggcgcttccgctggcgcggaacttcgggtcggcgtccacgccgccgcgcagctcctttgcggcggtgaggtaggcgttgcgccacgggccggactcggccgcgtagcctagctgctcgagcgcgtcggcgcacagcaggcgggcgggctggttggacgggtcggcgaacacgagcaggttcgtcacttcggccacccattggtactggccgtcgtcgaagtcggcctgggccttcgccagcacggcatccgcgtcgccgaagtactcgacgaacttgcccgccgactcccccggcggcagcgcgttcaggtgcacggggttcgcgtcgtaccagcccatgtacttctggtagacggctttcgcgttgtgcgcgatggtgccgtagtactggcgcgtgtaccagcttcgctcgagcgcgggcggcagttggatcaggtgcgcgatctcgtttgacgtgagcccctggttcaagtacatgagcgtctggtcggcgatgaacttgtacatcgcggcggtgttcaccaggtactcgcggatgaactcggcgccccagtgcggccagttgtacgcctggaacgtcacctcggccaggtcgccgtagcgcgcgagcgtttccatgaggtagttcgcccatgcgttgccgtcgcgcacctcggcgccgcgcagcgtgtacaggttgtgcagcgtggccgtgcagttctcggccacccacagggctttgaactgggggaaccacgtgttcatctcggctggtgcctcggtgccgggcgtcatctggaactccatgagcacgccgtcaacctcgcgcgtctcgcccgtggccgtgatcaggtcgttcggtgcgatgtaggacacagtgccggtggactgccccatgccgatgccgatggagagcttgccttgcggccccggctccaaaaacgtgccgtactgataccccgcgcggcggcccatcgcgttgccggcatacacgttctcggccacggcgtgctccgcgaagccgctggggacgatgagggggatgctgtgcgcggccacgtcctcctcgctgacgattcccttgatgccgccgtaatggtcgacgtgtggatggctcatcacgatgccggtgatgggtcgctcacccaggtgctcggtcaccaaggcgaaggctgcgcgcgagcattcgcagctcatgagcgggtcgaacacgatccagcccgtctcgccgcgcacgaacgtgatgttggtcatgtcgtagccgcgcacctggtagatgccgtcggcgacctcgaacaggccgaacaggtggttcagctgcgcgttgcgccagaggctggggttggcggtgtcgggcgcgccggccggttggccgtcggctccgtccagaaacgcgtaggctttctggctccacaccaccttgccggcgtcgtccgcgatctcgagcgcgtccggcgcggcgatgagcccccggctggcgaattcgcgctcccgctcgtcggagaagtcgagcagcgcgtacacggcgtcgttggcgtcgcgcgtggcttcggtggccggcttgggatcggccgtgaggttaccgagcgcggagcctgcggcggcggaggagccgcccccgccgctcgcgccgttggccgagcagccgcacacggcggccccggcggccacgagcgccccggttgcgaacgtcccggcgatgaacgtgcgtcgatcgatgcgatgattgctggtcataggggtctcactttcgcttggaattgcggagccatcggcgagatagtattgccgccgtgcctgccaccgccagaagggctccgagggctcccatccagccagccgcagaatcggcggtgggtgcgagcttcgtgccgccgcccgacgcatcaggtttcgcgaccggcgggacctctgcgctatccacgatcacagcgaagggcgacacctcgctcacctgcaccgtcgccaccccgtcggcgacgtgggcatcgagcgccaccatgccgtcgggatgctcttggagcaccgtgacgttgcttcccgcaaaagccgcaggcacgggaatccgcagcgtgacaggcccgccgagcgccgtctggcccgacttcctcccgttcacgggcagcagggcccgataggccgctgccagctctcccagcaggtcggcctctttcgcgtgccgcacgagcgcgtcgtggctggcgcttccttcgtcaagcgcctctagggacagcacggccccggcatggatggtgccctgcagcgtgatgccggtggcgccgtcggtcagagtgcgctcgatcaggggatcgctcaccaggtaggggaagcctgcgttcgtgtcggcactgtacgcccagtagcgcatgtcgccggaaacctgctcgttcagcatgtcagcgaactcctgcgacatcatggtcgcggtgggcagctcggccaggctcgcgtcctcggcgtcgcctaccgatccttcccctatcgggctctgatcgaactgcgcgaacgtatagccgaagaacacgtcatggtggttcgatccgatgaacgtgcccgccacggtggagggtttgggacgcaaaacgccgatagcccccgaatacgagttcaccacctcgccacggttctcgccgacgagcccgccgaaaagtacctgcgggtccgtcgtccagccaagggcgtagctgttccacaccgaggatccgtccgcggcgcgacccaccaaaccgcccgctgtcgaagcgatcacgtcggctcccgaccagcagttcaccacgtcgccgtggttttcacccaccagtccgcccgcgagcgtgctgcgaacggtggcgttcagcaggcggagctcttcaggggtgatggttcccgagctgggtgcgtgataccacgtttgcgccgtgcccgtggagcagttctctatccgcccgtggttcgctccggccagcaccccgataacgtggttcgtggtgaatccgaaaaagtccgtcccgtacacggccaggttgcgcacggtgccgccgtctccgatgacgccgaacaagcccccgaaggttatgtttttaagggggctgtccgagacgtccatgctcatggaaaagccgccgatgccgaatccggccccgtcgaaggtgccggtgaacggatgctcctcgctgccgatgggggcagtccaagcgggggcggggcggcgcgtgttctcgatgttgcccgtcaggcggaacgtggcatgctcgtacattgcgggatgctgctcgtaggcggcggacacgttgaccagatcgtcgagcgtgctgatcaggtacgttccctcagagtcggtggcgaagtgcaacgggttgggcatggcctcgcccggcgtggctatcaggtaggcatcctggtacggcatgcagaacgcgaaggtcatcgtggttcccgacccctcggcaagcaaggcggcctcggagctcgcgatggtttccagctcgtcgccgtttgcgtttttgagcacaagcgaatcgagggcgacgggatcggaggcagtgacggccaccttgacgcaggttccggcgggaacgtcggctggcagctggttcccggccaggtcggtcgtctctatcgcgagcccgtctgcgttcgcgacgtgcaggcggctcgtttcccgcttgtcggggttgcgcgccagcacgacgagcatggcggggtctcccgcagaatcctccatggtgagcttgaccttggccgagttgtagtcgccgttggtcgggatggcggttcggtacagattgaacagcgagtaatggttttgagacagggcgcccgtgtgaggcgccggagagacgtagctgttcatgagcacgtaaggcgcctgcccgatcgacgtcatgccgtttcttcgaaggtgctcgacgagagagccgcgtgagcccgcataactgggttggctgaccaggggcgcgagcgggccgaaatctgcgggaagcgcgtacacgccgtctttcgtggactgcacattgaagaaatcctggtcggggaagccgtagtactcgggggtgaacagcatgccgccgaagggtatcttctcccaatagcgcagaccgtgaatgaggtcgccatgcttctctccgtacgagaggttccggctgccatcgacgaccaagaacggcgcgcctttcacggcggcgcgatacaccggcatcgtaggggcggttctcaccgcctgcgacgtgtagaacgccgtggtggtcgccttgccgttggggtcgggcagccggtacttgaacgatctgctggccgagctcgcgtagtcgaagtcgtactcggtttggaagtcgtaggggcgcatgagggtgaggaggtcggtgcgcggccacgaggcgtcgccgtctttgttcgcgaattcggatgcggtgaagttgatgtccctcacgatgcggttgaggttcgtgaccagattgttttcgaggtcggccgcctttgtgcgcaggtcggcgtcggcgggggcgttgtcggccttcgccttccagtaatcgtattcgaggcgctgcacgtaggcgactatgttcaggttcatcaccacgtcgttgatgccggcggtgagcagcgcgtagcgctggtggtcgaaggcgagcgcttcgtcggcgtattggtcgaggttgtgcaggtagcgatggttggtgtaactgcccatgaatatgccgtaggtttcgatggtggtcaggtcggcctcgtagtcgagcttgtcgaacgctgccaccagcgcgcgctccttggtttcggccgcttcgcgccgtgcgctttcgttggcggttccccatgcttccgcgtacgccttcgaggcatcgatgaactcgcggtaggcggtgagcgcgggcgcgtacaccgagtcgctcatcttgatgatctgtgcccgctggttttctatctgattgagcgtcacggtctgctcgagtgcgttgaactgcgcgtcgatgctgttctcgaggtcgccaagctgttggctcaggtcttgcacggcttgcaggatctgatcgcattcgtgctcgatgccggagctgcctcccagcaacccgtccacgaagtcgagcactttgttcagctgctcggcgtcctgcgggtcgaccgcttcgttcagcgccttgaaggcgaccgtttccgccaggccgaaaacgacgccgtacaccttgtcgagcacccagtccccggggccgcgcacctcggggtcgtcactactggccggggcgatggcgggggcgttctcgttggcgtcgccttccggcttgtcggcggcatcggttgcgggattgccggagggatccgtcgcaggctcgtcggcgggattgtccgccggcttggccgcagggccggctgccggatcgtcgctcgggccgtccggcgcgggcgcgtcctgcgactcgggcgcgcctccctctccttgcatggcgaaggcggttacgctgcccgttctggaaatcggagccatgaagccgatcaagctcaacgcaagcaggaggcagagcgccgagcgcagggactgggacgttcgcttgcgggcggtgatgctcatgaggaggctccttggtctgggcggtcgggggagggctggtcggcaggagggggcgggggcgggggttctccggccagcacttcctgcagttcggttcccatttggcggacgcgagcagcttcgagctcggtcaggtagccggagcgcacggccatctccaggtagtagctcacctcttcgatggcggctgcggcctcgcgggcacgggacgcctgggcggcgccggccagatcttccagatcacgcgccgccatgcccgcgcgcacgccggcggccagcatttcggcggcaaggggaaagcgctcgggcttttctcgcaagtaccgcacgagctcggccacgcggatagcgaagtcgaacgcatcgttcgatcggttcatgggcccctcctcggtggtcgcgtggaatggcaagcttccctgcgcctttcacgatagcgagacccgccggagaaaaacatcattcgggatgaggttttgggaaacggttttcgctcgaagtgcgagcctgcccaatcagccgctcacgcggattcccttacctgaaaatgtcggattttcttaaatgagaacttcggattttctaaaccgtttataatgagggagcgacaaagcgctcggaaggagcatcgccatgcctcatgccaacctcaagcccgacggttatctgcctcgcatcgtggacgagcaggttgcgcattatttgcgcgtgttcggcgccgtcgaggtggcgggcgcgaaatggtgcggcaagacgtggacggctctagctcatggatcgagcgtcagctacgtggaaaacgatctgggcatcgccaaagaagacccctctcttatgttgttgggagagaggcctcatgtggtggacgagtggcagctggctccttccatctgggatgccgttcggcatggcgtagacgcgcagcgcggtttgcggggcgggtggatattgacaggctcttcgacgcccgtatctcgaggaggcggcgaagacgccccgaagcacagcggcgccgggcggatcgggcgggtgcgcatgcttccgatgagcttggccgaatcgggcgagtcggcatgcacggtatcgctcgcctgcctgttcgaaggggagttcacgtcgagcaaggtgccttcggacacgctcgagctcgttaggctcgcctgtcggggagggtggcccgaagggatcgacctcgacgctgaagacgcccaactgctcgcccgcgattatctgaggctccttttctcggaaagcgttccccggcacggcaaggacgggagagcagctcggaaactggtggcatcgcttgcgcgcaacctcgggcagtcgcccacctacaagacgatcctcgccgacatgtacggcgaggaagacgagcccggggcgcttatgtcggaggtgaccctcgcctcgtacctcgacttgttgaaccgtctgtatttgacggaggaggtggaagggtgggttcctcctcgacgttctcggaagcgcctctccgtcaagccgaagcgctactttgccgatccttccttggcggtcgcgacgcttggcatgtccccgcagtcgcttttggatgactggcagacgttcgggctcgtgttcgagaatctctgcatgcgggacctcatggtgtatgcccgtgccctccctttggctggcgacgtgccggttcgctactatcgcgacgatgccggcctcgaagccgacgccatcgtggagctggcggatgggcgttgggcggccttcgagttcaaggtgggtgagtcgaaagtcggagagggcgtggccagcctcaagcggctgcgtaagaaggtgtcggagaacccgaaggcgagaactagccctccagagttcctcgccgtcatagcgggcgtgtcggagtacgcgcggaaggtcgaggacggcgtgtacgtgattcctttgcgtgccctatgtgcttgagagcgggccgccttatgcgcggattgacgtgcgacggaaggtttcggaccgcagcatgcgccgaaaggaagggagaggcatgaaccgcgacgacgcagagctgattctcagcgagaagttcgcaccggcggaccttcccgacgtgtgcgcgccgcgcctgcgggtggtggacgccatcggccgagccgtccgcacgcggcgcttcgtgtacctgggcgcgccggcgggcagcggcaagacggtgtcggcgctgctgtggctgaagaaggcgaagcgcgcgtgcgtgtggatcggcctcgaccgctacgacgacgtgccctcggtgttctacaagcagctggcgacggggctctactccatccagccggataacgcgggcatgcgcgccgtgcttgaaagcccgacgttctccgcgtcgcccgtggagcacacggtgcagctggtgatggagatgcgcccgctcgagcgccgctacgcgctgatcgtcgacgacctgcacctcattcgcaaccgcgagatcgtcaaatcgctgcctgccgtgctccgccgcctgcccggcgcgttcgccgtgctgctgctgtcgcgcgccgagctgcccgaggaatggcgcacgctcggcggcgcggagggcccggcggtgctcggagcggacgatctgcgattcgcgcccgacgagatacgcggctacttcaacgcgctcggccgctttcccacgcccgacgagacgcgtctcgtgcacgcggccaccgaggggtgggccatcggcgtggcggcgctcgcgaagtcggatcgcacggacggacgcaacggccactacctgttcgcgagctatttcgaagagcaggtgtggggtgcttgggacgaccagctgcgctcgttctgcctggccaccagcgtggcagaggagtacgacccgacgttggcggcactgctgtccgggcgcgacgacgcccgggaggtcatggagcgcctcgcccgcacgaacaccttcctctcgcggttgcacggcgacacgtaccgttaccatcacctgttccgcgattttctgcgcgagaaggccgcggaggcgggcgtggaccgcgtggtgctctgcaagcgcgcggccgagcacttccgcgaccggcacgactacacgcgcgccttgcggttctggttcgagagcggcgatttctccggcatggacacctacctgctgctgttcctgttcgagaacgcgcgcggctcggttgccgactacgcggacttcctgcgcacgctcgatatcgagtcgcttcccgccgacgcgtaccgcgtgtgcccgcctttgcgcgtgctggccgcgtggtacttctatctcaccagccagcgcacggcgttcgagcaccacctggacgagctgtaccgagccctgccgcgcatcgcggcgtcggattcgcggttcatggagttcgcgcttctggcttacagcgtggaccaccgcaccaccatcatcgagaaggcgcggaaattctcgctgttcggccggttcgtgaagcgcttcaccccggcggggctggccaccgagatcgcgtcgttcacgcacaacctgccctatccgcatcgcagcaacgtggattactcggccatcgtgctggaggacggcggcatggagctgatcggccgcacgttcgcgccgctgctgggggcggaatggggttacgtgcgcccgctgctgcccgcgtgcttcgcctacgagcgcaatcggctggacgaggcgctcgccgggctgcgcgaaaccgagaaggcgctcgtgccggagaaccgcgaggacgggcgcgtgtgcatcatggtgatgaagcacgcgacgttatggcagatggagcgcgaatcggaagctgcggctgcgctcgacgacctcgtggcgctcacggagacggaagcgccgcatttcctgcccaacctgaaagcgtaccgagcgaagctcgcgctgttcgatgcggacaagcgcgcagcgcgtgcgtggctggacgagtactttgtcaccgacgtcgagcgcatcgagttcgtgcgctcgttccagcacttcaccaccgcgcgagcgctcatcgtgctcggggaggcggacgaggccgaacgcttgctggaacgcttgcgtgcgttcgggcggtcgttcaaccgctcgctcgacgtgggcgaggcgtgcgcgctcctggcggcgctgttgtgggccgcgcggcgtcgggccgaggctgtggacgtgctgctcgaggggatggaagcgctcgcgccctacggattcttccgcgtggtggccgacgagggcgcagcggtggagccggtgctgaagagcctggtcgagcgtctggcgcgcccgggctgcgacgggccgctcgagcgcgcgttcgtgcaggaggcctacctggccgcgcacgatcgcgcgcggcgctttcgcggcgtatgcgccaacctcggcgtgcgcaccaagccggtgaagctgtcgccgcagcagaagcgcgtgctcgaactgctcgcgcgcggcctgcgcaattccgagatcgccgccgagaccggcttgtcgctgcccacggtgaaaagccacgtgcaggcgacctaccgcaagctggacgtccacgccgcgcccgacgccgttctgcgcgcgcgagagctggggctgctgtagggggaggtggctctttaccgatcgtcctcctttccgcggaagccgagcgatgcggccagggcggcgccggccgtcacgacggccacggcgatgaggtgcagcgggccctgcttgtcgccggtcctgacgaggggcttgggctgcgcggggtccgtcgagctgggcgtgggctccggcgtgggcgcggggcccggttcgggctcgggttccggctgggcgaagtccgcgtagccgtagaacgcttcgtcgccgatgctgcctgccggtatggagcccggtgccttttgcgtgaacagcgagtccgcgtaccaggcgttcgtgcccgctttgacgccctcgaacatgggcggcgcgatgggcagctcgccgtcgagtaccgtgtgggaggtcgggtttcctgcggggttcttgccgatgcccgcgaaatagaacagcggatactcgatgagcctccacttggcgtacaggctgatgtcgcccgtcgcgccgcgggggatgaccgtgacgggctgcgagagagagctgtcggcgaaccatccctcgaacgcatagccctccttcgaagggtcgcgcagggtgacagtcgtgctgtcgttcatgagcgtagcggggttgtcggggctgttcgttccgccgtccagctcgtatgagacggcgtactcgttctgcgaccaggcgctgtacaccgtcgtctgcccggggccggacgcgaacgggggttcaaacgggtttgccaggtcggcgtcggtgaaccagccatcgaactgggcgcccaccatcgcgggggcgatgctaggcaggggcatgtgcttcgtgagggcgtacgtcggtccgccgggcagaaggccctcggtgtcgcaggtgagcaggtgggcggcgcgctctggcaggaccacgccgtagttgatgatgaagtactcgttgatgggcagcaccttgttcaccgtggggctgtccagcgaaaggcgagcttcgacttcgaacacccgcgcgccgtcgcctcccgaaggagtaaggggccagtagcttgagctttggtcggaggcgggatagtcgccttgaagcgtatgcagtccgtctgtgagggcgaggtccttgctcgttccgacattgcgtctgccgttctcgtaggtgtacctggagagggtgattttgccgaggcatgggtcgcccgcagcgtccttcacggtgaaggtcatgtcgaatgtgcagccataggggacgaagaactcgtcgcggtgctggacgatggtgttgtcgtcggtgggcgtcagttcgagcgtgacggtcggcaccatcctgagcgtcgccgcagctgcgtcggggtcggcgattgcgctcgttagctcgacgcccagccgcgccggttgcgagcgcaccgtcggcaccacgccgcttgcgttgaccgtccggtccatcacgtccacgcagaagagcgttccgttccacagggtgtcggccgcatcgatggcgtagtcgggtcccgtttcgcctacgacgggcttccattccgcataggcattgttgcttgtgtcgaggtagaaccactgatagctcagggcctcgccgcgttgggagtgcgcctgcacggagaacgtggcgggggtccctccaaacacggtcacgcttttcggctgctcgtcgatggcggggacgtcgccgcctatcgtggtgccgacgatcgccgggctgtaggcgctcgggttgctctggcccaggtcatcgtaggactggaaccgcacctgccgggtgtcgcccgcggcgaggccgtcttcgatccagaacctgcccgtgtcgacgcccatcacgttgccggcgggcaccgtccactcgttggtgctcgtgggcagcgcaacgccgtaggctcctgcgggacgggtggtgttgttgctccaggcccagatgatgctgtgctcgttcgcgctgtaggccatgggatagagcggaaggctcttcggcgcggcgcccgacccggttccctccaccacgtagccgatgacgagcgggttcttcgccacggcatcggtctgccacacggccaggcgcgtggcgtaggagtattcgttcccaccgtgcgtcaggtaggaaagggggtgcagcgagggcagcgacgtggagaactgcgcgcccttcgtctgcgaggacacccagctggcgccgcccgtcgcctcggccttccatcccgcgtggccgctcacggacagggcgatgccgatcgtctcttgggcttgcacggccaaggacatgcctccgcccacggttatgtcgaacccgttggtgaactgggacgtgtcggttaccgtgatctctgccgaggccgtcgagcccttgtcggcggcaacctgcacgttggggcccgcgagcagggcgttgccgttgttgtgcacgttcgcgatctggctcgtttgagtgggataggtggtggggtcgccctgcgtgtgcgggaacacggcggccatgtcgatgggcggcacgtccggagatcccacgttcgccgccgcattgttgtaatcctcgagcgtcatgagcccgagggtggaatcgtaggtgttgtccaccttgtaggctacgtggacgtttcccgctttggtgcccaccttttccggcccccactgcgtgccgggcgcggcgtgcttgttgtattcgtcgagatagtcctgcgtgaccgtgaactcgggcacgtacacgtcgtactcgtagacgaccaccggtaccgccgacgtcacgaccatggtcctgcccgcgtactcctcatacgttagcacgcgttcgacgttgcgctcatgatagtagctgcccacgtagttgagcatcgcctcgaaatcgaagccgccgcccagcatggcgctgtttccgaggatccccgcgcctaggagcagctcggcggacatgttgaagccgccgcccaggccccacctgccctcggtgcccgccgattcggacgacgagatgccgaaggtcgtggtgccgatgtccgttttctcctcgccgagccgctcgtcggaaagctcgctccaatagggcacgctggccaggatggcaaggggttgcggcgcgctccagccgaacgatttggacttcagcgcgaacttgaacgcgttgttcttgttgatgtcgcaggcggcgatggtcaaaaacgtgccgttgtcgtcggtgctcgcgttgtggatgaagctgggatcggtgtcctcggttgcgagcttgccgttctgctccagcacccagcgcacgtcgaaggtgaccttgtagttgctcgattccaccgccccgctctgcacgatgagctgttcggtgccgatgttggttttggcgaagttgccggataccgctttggtgatgaaatggttgcggtagcccgtcagatccatgtggtacagcgaggtgaagctgctgtccctgaagtgcgccgcctccgaatcgccctttttgttcgtggacgagagcgagaacacgtacccctccaagaagagcaggtcgttggcctcggagcgcaggaacttgcccgtggcgagcgcggcgggcgcgcacatctcgtactgcacgaagatgtcgctgagagcgggcacttcctgcgggacgtcccagacgtactggtagatttccttcaccgtgtcgaacgtgaacatctgcacgaggtttttctccggaaccatccagcccacctggtcgcctttgctgtaggcgttgtagtggccggccatgatgagctcgggtacgccgttgccgttgaggtcggtctgcagcgtcgaggcgaaccgcatgcgatacgacccgaagtcggggatgtaatggtaaatccgctcgagccggggccgcgtttccttggtctttctcgaatagatggccatgtatgagaacgggctgtggcttccgtagccgttctggtaggtgagcggcaggctcagggtgacaacgaggtcgtcgtagctgccgtgcgagaacgtggccaggtggacgatgggcatgcgccagtcgctggagctgatgctgaagctggtgttgatgtcgccgaggtagagtctctgctcctcgacgagttctccctttgaggaatcgaagcggtagacgatgatgaaaggattgtaggaccagggagtgtagatggcgagctcctggtttccgtcgccgtcgaaatcgccgccgaccatggcaagcagcccgagcgagccctcctgctggatatgctccatgatgagcgggttgtctttcacggtcaggtcttcgtgggctctggccagcgtttgaacccgtccgttcgagaagcgctgcagctggatgtcctgcccgctttcccgatctttgccgtggcgtgacttataggtgcccgtgtaaatggtgttcgaaacgatgagctgctctccgctgtgttcgagcgtgcacgcgttgttcgcgtggtactggtattccttccagttggtgtcgagggaggtcgaccccagggttttgcgagccatgctgtcgagcttcatcgaggatgcggtgagcgcctcgaggctgtcggcgacgtaggcgctccccttgtcgtagccggttcggttcatgtagcccacgtagaggttctgcgggtcgagcgtcgtgaagcccgcgaggggatcgctcgacgtgtcgtcgttgaagtcggccggcgcgacggaggtgtccaggttgaaggcgcggtacgatgaggcgtcggggaaatagttctgcgcgttcgcctgcgacgtggctgctgcagtgtcggccgatgcgggcaccgcagcgtcgagcgccgcttcgtccgcgtgcgcgcgggggatgagcgacccgacggagccgagcgagcatgagatcgccaccacgcctgctcctgccacgaacgagcgccttgtcaacgttatgctgctgccgtgtttctcggacatgcctgctccttgcgtacggggttgaaactctaacgatgcaatcgtgtttcgcttcgaatatacgctcggaggcggggcggcaccatcatacagtatgaggttttggggtatactctcgataaaaagccgggttgcgacggcggaaggggcggcggtggcagacgatctcatcctcagcgacaagttcgctccggcggcgctgccggacgtgtgcgcgccgcgcctgcgggtggtggacgccatcgagcgcgccgtgcgcacgcggcgcttcgtgtacctgggcgctccggcgggcagcggcaagacggtgtcggcgctgctgtggctgaagcaggcgaagcgcccctgcgtgtggatcggcctcgaccgctacgacgatgttccctcggtgttctacaagcagctggccctgggcctgtactcggtgcagccgggcaacgacggcctgcgcgtcgtgatcgaggagcctgggttctcgctttcgccggtggagcacctggttcggttgctggccgagatgacgccgctcgagcgccgctacgtcctggtgctggacgacgtgcacctcgtagagaaccgggagatccgcaagtcgctgcccgccgtgctcaagcgcctgccgcgggcgttcagcgtgctgctgctgtcgcgcgccgagctgcccgcggagtgggccgtgctcggcgccgacggcggcccggccctgctggacgcggccgacctgcgcttcacggccgacgagatacgcggctacttccaggcgctcggtcgcgacctcgcgcccgacgaggcgggcgccctgttcgaagccaccgaggggtggcccatcggcgtggcggcgctcgcgaagtccgaccgcgcgacgaggggcggcagcagcacgctgttcgcgagcttcttcgaggagcaggtgtggaacacgtgggacgaaagcctgcgcgccttctgcgtggccaccagcgtggcggagcagttcgacccggcgcttgccgagctgctttcggagcgcgccgacgcggccgccgtcatggaggagcttgcgcgcaccaacacgttcctcatgcggctctcggacaccctgtaccgctaccaccacctgttccgcgacttcctgcgcgagaaagccgccgaagagtgcgtcgaccgcgccaagctgtgcaagcgggccgccgagttcttccgcgcgcgtggcgactacacgcaggcgctgcggttctggctggagagcggcgatttcaagggcatggacacgtacctcttgctgtacctgtacgagagcagcagcggctcggtggccgacagcgccgacttcatgggcacgctgcggctggacgacctgccggaccgcgcgtaccgcgactgcccgccgctgcacatcctggcgctgtggtacgactacctcaccggccagcgcgagcggttcgagcaccatctggacgagctgtaccgcgcgctgccgcgcatcgcggccttcgacccgcggttcatcgagtccgccacgctctcgcatagcatcgaccaccgcaccaccatcatcgacaaggcgcggaagttctcgaaattcgggcgcctcatcaagcgcttcacgccgaagggcctggccaccacgctcgcgtcgttcacgcagaacctgccgtacccccaccgcagcaacgtggactactcggccatcgcgctcgaagaggacgggatggggcttttgggcaagacgttcgcgccgctgctgggcaccgagtggtgctacgtgcgcccgctcatccccgcctgcttcgagtacgagcgcaaccgcctggatgcggcgcttgcgggcatcgacgaggcgcggcgcgcgctcgtgcccgagaacaaggaggacggccgcgtgtgcatcggcatcatggagcatgcggtgctgtggcagatggggcgcgcggacgacgccgcccgcgcgctggcccagctggaggcctacgttgcgcaggaagcgtcgcagttcttgcataacctgcgcgcctaccaggcgaagctcgcgctgttcgacgccgatgcccgcgcggcgcgctcatggctcgacgagtacttcgtcgtggaggccgagcgcatcggcctcgtgcgggtgttccagcacttcacgacggcgcgggcgtacatcgcgctcggacgtgcggaggaggccgaggcgctgctccgcgacttggtcgagttcgggcgcggcttcaaccggccgctcgacgtgggcgaggcgggcgcgctttcggcgtcgctgctgtgggcgcgcggccgcaaggacgaggcggtggacgcgctggcggaggccctggaagcgctcgcgccctacgggttcttccgcgtggtggccgacgagggcgcatcggtggagccggtgctgaagagcttggccgcgcgcattgcgcgccccggctacgatggcccgctcgagcgcggtttcgtgcaggaggcgctgctggccgcgcacgagcgcggccgccgattccgcggtgtgtgcgcgaaccttgccgcgccgcgcgccggcaagccggtgaagctgtcccgccagcaggcgcgcgtgctgtccctgctggcgcgcggcctgcgcactcccgagatagccgagcaaacgggcctgaccgtccccaccgtgaagagccacacggccgcggcctaccagaagctcggcgtccacaacgttatggacgccgtcctcaaagcccgcgagctggggctgctgtagggatcgccgtcagtcccgcttggcgcggcggcgccttccggcggcgatgccgatggcgagcgcggcggctcccgccacgcagacgagcagctcggtcagggcgctgtcgccggttgcggcgagggcgggcttggcctcgggcttgggaaggggcttggggtcgggcttcggggcggcgttgacggtgagcgtgccgcccgcataggacacgttgtagttggcctggttgtccacgatgccgccgtcgatggcgatgacgagggagccggccgccgtcgtgtcgcccgcaaccgacaggcggggttcctggacgacgcggtcggagcccgccagcccttcggcggcgtagccgagcgacggcagggaatcgcccgccgtcatggaggcgtcgagcgcgcggaacacgagcgacgccttgtcgatggcgaagttgagcacgagcggctcgcccgtgcagggcgcgttctggggcagcgcgaacgtcgcccggtagatgccggccgcagtgggcggcgcggaagtggggccgtaggccgtgccatcggcggccgtgccggtgtaggagatatcgaacggtccgttgtaggagagggggctcgtcgtgccggcgggtgtgtagacggctgtcggcgctcccgtgtagcccgcctgcggagcgccgtcgtagacgaggcccgtggcggctgtgggcccagtgacaacgccgtcggcgcgtgcatagcgcacggtcacctcggccgtgctgttctcgtagttgccaatggcggaaagctccacggtcacggtgtcggtcgcgctgtccaaggcgtcggctttggccgtgagcgcgagcgtgcccgatgcgtccaccgaagcgtcggcgaggccttccgacgtgaacgacttcacggcgtaggcgggtccggagcccaaatcgcccggcagccccggcacgcttgcgaggtcgatggtagccacgccactgggttgcagctgtgcgtcggcatgtatcgtggcgaatgcgggggccttgtcgatggtgaagtcgaacgcggtcgagcccttgcatacgtggcccggcgagatcgctatcgtcacctggtaggtgccggcgttcgtgggcggcgtggtggaatcgtagcgcgtgccgtcggcggccgtgccggtgtaggagatggagaacgtttcgcctggcaaagtgccgtagtccacgcggttgccattgtagaggtagtaggctgtcggggttccctcgaagcccgcatggggttggccgtcgtattcgacgggcgagggcagcgcggtcacaccttcgatagccttcactgtctccctaaagtactgcacgtgcaaggtgacgttgaagtcctcatggttttcgagcgcgctcatccgaaccgtcacggcgtcgtaggcgtcgtcgcccttgccgttggcgtagaccttgagataggccacgccgtttaggtacacgatctcggctttatacagaccctgggtttccgtcatgtccgtgatgatcgtgtacgtggcggacgtgctgcccttcggtattgaatacacgggcatgctataggaggcgccgtactcgttccatacctcgtgcttggtcgcttcgttgatatccggcatcggcattttgactatcatgacctcacctgatacgttgtacgtgccgggaggggtctgcagatcgtagttgcagctagtcgggttgttgtaggacacgcttgtggccttgaacggctttcctgtaggtgtgccgttcttggttgcgacgttgccatcggggacgtgcccgcctgcgtctagcgcgtcgccggttgtggttatgtccacctggccctcgtcggtgggcgccaggcccgtgaatgctgtcagcttgatgtccgtgaacgtcggcgtttccgagtagtcgtagggcctcgtggcgttttcgtcgctgggagaaacggtggcggagagcgcggcccgctcgatggtgaagctccttgcggagggagctgccgtgcagggcgcgctgtcgggcagcgagagctctacctggtagctgccggtttgcgcaggcgcctcggtggtggggccgtaggaatgctcgtaggccgtgttcgggtagacggtacccgtgtaggtggcgatgaacggcccggtgtacgtttgatcggttccggcgccgtcccggtacgtgcagtacggggttcctccgtagccttgctgcggcgcgccattgtacgtggggttctggatttgggagatgcccttgatctcgcctgttggtttcgcgtcggcgtgggcgtttccgttggcgctgagcgagaacgacagcgcaagcgtaagcgcgagcaccagtgctccgaaagccgcggcgctgcgcgagatcttctggatgcgagacataacaaccccttttgtcgagatgggagccgaagcggccactcggtgcctatgccgccagcgccagtatacgagtcccgaaaatgcagaactatcatccgggatgaggtttcagccgatacttttctccgcgcgcgaaacggggagcgggggcgtgcgcaggagcgcggcgtatgagctggggttgctgcggcaaaaagaaacgcgcggccgatgcctgccgcgcgtttccggagttcgggggggggggggggtcgaggtgcctactcgcttcgcagcgcctccacggggtctttgcggctggcggcgctcgaggggatgaggccggccaggaacgtgaggaacacgctgatgcccacgagcacgatggccgcctgccacggcagcgaggccacgtccgccacgtcgaacagcgagtacacgatggcgttggcgggtatgcaggccagcgcggtcaggccgatgccgatgacgccggccgtgaagcccacgatgatggtctcggcgttgaacacgcggctgatgtcgcccttgctggcgccgatggagcgcaggatgccgatctccttcttgcgctcgagcacgctgatgtaggtgatgacgccgatcatgatggacgacaccacgagcgagatggccacgaacgccaccagcacgtagctgatcatgttcacgatgtcggtgaccgaggacatgagcgtgcccacgaagtcggtgtaggtgatgaccttgtcctcctggccgtcggccgtcatgcggtcgttgtagccgtcgaggatctcgatgaccttttccttgctctcgaagtcgatggggtagatgtcgatgccgcccggcttggcggggtcggcgtagcccagcttcttcaggttgttgtcgtaggtggcctcctcggtgctcatgagcgacatcatcagctcgccgagctcttcctcgctcatgttcatctggaaggcgtctttgaacttgtcggggtcgatggacatggcggaggccatgttgttcgccatctggttcatcgactgctggagcgcggtggtcacctgcgattgtagttcgttcgccatggcccccatgtacgtggtcatagtgatttggacgtaaccttggagggcggtggccagctgggctttgagggcgtcttggtcgatcatgccctgcacgccggccatgatctgggcttggatttctggctggttcatccattcctgggcagaaaggggctttgtgtagttagggttgtctaccatattgccggtgggcttgccgttagcatcaagctcgggaatcttcggtggattctcggcgagatgctgttggagatagcccgcgtacccctccatcaaagtggacatgagggtgctgacctggtcgaccggtaaatcgatgttgagcgatccggcgatctcgtccatattcggctcgggggcggcgggcatgttctgcaggctgccctgcaggttcaaggcgttggacatgtccacggacagcttgctctggtcgatggtgaacgcggcttggatggcgtcgccgtcgatggtgaacagcgactccatgttgaagccgttctcgtcggcctcctcatcgtcgaaggacttgccggtgaacacgttcgtgtcgagatgcgcgatctggtccttcacgatggcgctgtcggcggcctggtcgatcacgtaggaggtcagcgaggcggggtagttcagtcccgagctcagcatggtggcggtggcgtcgtcgcgcggctgcaccacgcccaccacgtgcacgtcctcgccgttctccaccaagtcgcgcatgtagtcggtgtcgtcggtcttgtctttccacacgttgaactcgtcgtcgcgctggtagtagtcggcggcgttcaccagcttgaacgtgacgccgagaacatcctcgtaggaggggtcctctatgtcggcgggggcttcgatctcctcttcggccgcgaacttcttcaccatgtcgtcgagctcggcggggtcgcgcaggcccagcgtgtacagcatgaggtcgctcatgccgccgttgccggtgagcacgagcaccacctcggtggggctctcgggccagcgaccggccttcacgtcgtactggttctggtagaggcccgggtcgctcggcatctcgtagaacgtgtcggtgctcatggacatggacatgaggctgttcgagctggtggacgagcccagccccagcgcggagaacgacttgtcggggttcacctggcgcagcttctcggtgttcgaactgtatatctgcggcgccacgttgtaggtgtactcgatggcgttcgtgtactggtcgatgtcgctctcgccggaatcgaggtacttcttgagcgaggccaggtcgttcgacccgatgctcgacaccatgttcgacaccatctccaccacgtgcacggagtcctcgcccttgtcctcggcgccgcccgatgcctccgccccttcgcccgccgcgccgaacatcatggacgtcatgtcgaagccggtgctctggatttgcagggggtactcggagagcgtctcctcctcgaccgatttgatgtagttgttcacgccgttggcgagagccaagatggccgcgatgccgatgatgccgatggagcccgcgaacgccgtcatgagcgtgcggcccttcttcgtcatgaggttcttgaacgacagcgcgagcgccgtgaggaacgacatcttcgtgcggcgcacgggcttctcgcttacgcgcaggtccttggcggtggggacgaacgggtcggtgtcgctgcggatgacgccgtcggagaggttcacgatgcgggtggcgtactgctcggcgagctccgggttgtgcgtgaccatgatgaccagacggtcgttcgcgatctccgtgagcagatccatgatctggacgctcgtcttggagtcgagggcgccggtgggctcgtcggccagcaggatctcggggtcgttgatgagggcgcgcgcgatggccacgcgctgcatctggccgccggagagctggctcggcttcttgttcacatggtcgcccaggcccacttgctcgagtgcggccacggcgcggtcgtgccgctcggcgcgcgacacgcccgacagcgtgagcgccagctccacgttggagagcaccgtctggtgggggatgaggttgtagctttggaacacgaagccgatgcggttgttgcggtaggcgtcccaatccttatctttatattgttcggtggagataccgtcgatgacgaggttgcccgagtcgtagtggtcgaggccgcccacgatgttgagcagcgtggtcttgcccgagccggaggggccgagtatcgccacgaactcgttgtcgcggaacgacaccgacacgttgtcgagcgcggtttgcgtgaagtccgccgtggtgtaggacttgcatatgttgagcagttgcagcatgaggtgcctttcggggcacgcttcgcggaggaagcgcaggtgtaacgcaatggttgatagtccgtcaatcatgctcgattctcccgcttgcccgtgctgagaatccccaatcttcaccgagtttaccgaacggttacctttgacgcgcggtttctggagggcctatttcggaatgcccccgggcgcgttgccgctttgccttataatgtgtggttcgaatgaaggaaggaaaacgtcacgatgaaggcactcgcgcgcgcatggtcaccagtgagccttgcgctgtcttgcgtccttgcgagcatcgccctgtgcctgcatgccgacaacattctgctgtacgcgcttgagaaggccggcgctgccgaattgttcgtctgcgcgttcctcggcggggcggcggcgctctgcctggctgtggccgtgtcggcgcacgacgacgagcagcgacggtggtctatcggcgtggggttggcgagcgccggggcgggcatcgccttcgcgctgctgctggacgtgctgccggcaccgatggtgtccgtgtgctcgggcgggctgctgggcttcggcctgacgtgcctgctgcggcaatgggggcgcttctaccgctcgttcacgttccagggcgcgctgctcaatacggggctgtcgttcctgctggcatcgctgtggtggttcgccatggtgcacgccggctcgcccttcctgttctgcctggggcttatcgtgctggtgctgagcggcggccttccgcttctggccagcgatatcgtgcgggcggacgaggtcagggcagggctgcgtgaccgcgaggaacggtgggtgccgcatgtgtccatctggcaggtcatgcgccagggatgggcggctgtggtgggcctcatgttcaacttcttcgtcatcgggctgacgttctggccgcttgccgccggcctgggctccggcattgtgccgaagcccctggcgtacgtgctggtggttgcggtggtatggcgggttgccgcgcgcgtgcgcgagccccagggcggcatgctggaggcgttctaccgggtggcgctccccgtggcggcgactttgatgctggccagccccttgctgtcgggggtgttccccggcgtggatgggatggtgctctcgattctttcgtacttgggcgttgcgacgatcaacgtactggggctcgtggtgcttttctggtctgcgaaaagctccgaggtggggttctcgaagatgtttgcagcgttctgcgccagctgtgctgccagcttggcgctgggcatgcttgtattccagctcttggggccggaggcttcgcgctggtttgcgctggtgctgctcgtggcctatctgggggccgtgctgctgggcgaggtttggcgtactgcgatgcgtgcgcatgcggcagcgccgggctcctcgggcggcgaatccgcctgcgaatgcgaggcggtcgatgtcctggagggcggtgactgacggcagctgcacgacaacggggcgccgaaggctcccgccgtgcagcacgatggcccggctctggtggtcctgtgctgattctgggagtccttcctcggcggtttcccccttcttgcggagtgggagtatcattgattccgacaatgatggtagctgcggtgccggctggcgcgcagcgtgactccgaggaggaatcatggacgagcgagtgtacgagctgctgaacgaccagatcaacaaggaactgtattccgcctacctttatatgtcgtttgccgactactacgaggacgaggggctgtccggtttcgccaactggtacatgatccaggcggccgaggagcgcgaccatgccctgatcttccgcaagtacctgctggacaacggcaagtccgtgcagttgaagggcatcgaccagcccgacaaggcgttctcgtcgtacctcgggccgctggaggccgcgctcgagcacgagaagtacgtgacgagcctgatcaacgacatttacggtgcggcccacgacgtgaaggactaccgcaccatgaagttcctggactggttcatcgaggagcagctggaggaggaggcgaacgccgaggacatgatcacgaagatgaagctgttcggcaccgatgccaaggcgctctacgacctggaccgggaatacgcggcacgagcgtatacggcgcccacgccgctcgcgaacgcgtagcgcacaggcgcgcccttcggcaagcggacggggcgcgcggttgaagatagaaggggtcttcccgcagggggatgatgagaaagggtcgcaggctttggcttgcgacccttttgcttttggtgggcgataacggattcgaaccgctgaccttgtgcgtgtaaagcacctgcgctcccgctgcgccaatcgcccttgtcccgcaacgcgtcggatgacggcgggtcattcattctcccacagaatgctggttcgcgcaatgcagcgggccggcgcagcattctttcattttccattcggcaggcgctgttgcgatacgcgacggctgttggtgcgccaggcgccttgggcgcatcgcgctggcggggaggttttccaccgtccgtgttccgcgcgcggtccccggtacgcccgcctcggcatcgggggttttggatttccgcttgacccatgctggatccacgttggatccgtgcatggttccgacggtcgggatgctggaaacgtgcaagatcggggcggttccgcgtggagtgccctgacggttcccgggcaaggttgcggatgcatactgggagcacggaatcccggatgcggaggcgacgatgagacgaaggaagacgacggtggcgggcattgcctgcggcgtgctgtgcgcggcgtgcgtgctcgcctatctgaccagcgtgcgcggcgaggcagatgcagcccgtgcggaagcgcttgcccggtacgggggcgagcaggtggaggtatgcgtggcgcggcgcgacgtagccgcgggcgagaagctcgacgcagcggcggtggagacgaagctgtgggtggccgacctgctgcccgccgatgccgttcgcgccgcgggcgatgtggtggggcgcatggcaacgtcgtccatcctggcgggcgaggtgctgtcgctcaagcggttcggcgaggtgtcgacctcgatcgacgtcccagcgggtttcgccgcgctgagcgtgccggcgaagacggtgcaggccgtgggcggcgcgctggcgccggggtcgcgggccgacctgtacgcttcgggcgacacgtcgacgacggccgtggcgcgcgacgtgctggtgctggccacgagtgcgggcggggccgacggtgcggtgacagccgacgtgacctgggtgacggtggccgtggagccggaatcggtgcaagaggtcatcgcggcttcgcggaaggcggagctgtacttcgcgctgccggcgtcgggtgacgccgcggggggcggaggggctgccgggctggcccttggctcgacggtcggttcggatgcttcgagggaggggtcgcgatgatgccgacagtggcgctgtgcgcggatgccgagagcatccgaaggcccgaccttatcgggctggcaggcgagagcctggcgcgacaggaatggctgcggctgttctcgtcgggcgaggaggcgcggcggttcctttgcacggaccgcagcgtggccgaggcgtgggttgcgggctgcgacgacgtggagcccatcaacctggcggctgcgctcaaacgcgatcgggcggacctgcgcgtgtgcctgctggctttccagggaaccggttcgttcatgagccgggcgacggccgccggaatcgacgcgtcgctcacgcgccaggcgttcgtcgagcgctataccgcggcgaagcgccggcatgcgcttgagggagtcgcgagggagcccggcctagcatcgggcaaggcccgtatggtgggcgacgatgcggcgcgggcgatgcgcgagcacggccagggaagcggcacgctcgcgtttggcggagcagtcgcctcgggaggtgccttcggccgagatccggttgcggaaggccgggactccggtgctccgcgctcggccgtgcggttcgctccggtcccggcgacagcttcccggccggcggtttcggggcgcccggcgttcgtgctgccggtggtgagcggctccggcggtgcgggcaagagcacggtggccgcgctgtcggcgctgttcgcccaaggcttgggataccgcacgctgctgctggatttcgacctgcgcttcggtgatgcgcacgagctggtgggcgtgcccgacgcgcttgccgtggacgaggcgctgtcggcgcccgcgcggctggaggggcttgcgcccgatgggctggtgcctgcggtgctcgccgcgccgaagcggttggaggatgccgaggcggtggtgcgcgaggcgccgcgtttgctggacgagctgcagggccgcttcgacgtggtggtggcgaacacgggcgcatcgtgggcggaagagcacgcgctgctgctcgaacgctgctccaaggcgctgttcctggtggaccagcggccctcgtcgctgcgcgcctgccggcatgcgctggagctgtgctcccgctgcggtattgccacggggccgttcctgttcgcggcgaaccgctgcgccaagggcgcgccgctcacgtcgatcgatgtgtcgtgcgcgctgcgcggcgtcccggcggtggagctgcgcgacggcgggagcgaggtggaggagcttatgggagccggtcagccgctcgacctcatcgcggtgaagaacgacctgtgcacgagcttggagcacgtgttggtggatatcctgcccggctgcgagggacgcacgctctccctggccgagccgagcggcggacgccgggagcgccgattcggccgcagccggcgccgcagtggaaggaggggtgccccatgtccctgctagaaagggtggagcgtgcgggtaacggcgcgtgccctcgcgagggggcggagggggctttgggcctcgacgcgctgaaggagcaggttcagatgatcgtgtccgccgacgaagtggcggctctgcaggcagagaatcccggccgtgcgcgcagcgaggtgcgcagcgcctgccgtcgcgtgttcgagagcctggcctgggccgatgtgccagccgcgcaacgcgcgcgactggagggcgagctcttggacaccgtgttcggcttcggcccgctggaagggctgctcgcagacgacaccgtcaccgagatcatggtgaacggtccgcgaagcgtgtacttcgagcgcgacgggcggctgtaccgcagcgagcagcgcttcgccgacgaagatcagctgcgggcgctcgtggaccgcgtgctgggaccgctgggccgccggatagacgagtcgtcgcccatggtgaacgcgcgcctgccgcagggccaccgggtgcatgcggtcatcccgccgcttgcgctggacggccccgtgctcaccatcaggaagttcgcacgacgcgtgatgacacttgcggacatggaggcgctcgggtcgttcgacggggccatgcgcacgttcttgacatgggcggtgcgggcccgcaagagcgtggcggtgtcgggcggcacggggtcgggcaagaccacgctgcttaacgcgctgtcgtgcgccatcccgcacgaggagcgcatcatcacgatagaggactcggccgagctgcggttcctggagcacccgcacgtggtgcggctggaggcgcgtccgcgcaacgcggaggggcgcggcgaggtgacgatccgcgacctggtgacgaacgcgctgcgcatgcggcccgaccgcatcgtggtgggcgagtgccggggtgccgaggccctcgacatgctgcaggccatgaacacggggcacgacggctctcttaccacgttgcacgcgaactcgccgggggagtcggtggcgcgcctcaccaccatggtgcgctacggggccgacctgcccgtggacgtgatcgaggcgaacatcgcaagcgccatcgacctggtggtgcaaacggcgcgagcgttggacggctcacggcgcattgccgaggtggtgacgctgtcctacgaccgcgagcggcggcgctgcgtggttgaccccctgttcaagcgcagggaagcggaggcgcgcggaacgtgggcggccgtgccggcatggatagccgacctgccgtcgcggggatgcgccgggcgggcggaggtggacgcatggatgcgcgcgtgctgcttggcggcctgagcgtggggctggcgttcgcgtcggcggcgctgctggcctcgggcgtgcgttcggccgtgccgcgacgccgcgatgcggcggatatggcatgcggagccgacgcgccgcgtgccggaaggctggcgtggcggctccgcaacggcttcgcggtggcgagcccgattgcggagcggctgttggcgagcgcccgcgtgcggcggttcgcgggcggggccgtgcagctattggccgagcgccgctacgtcaccaccgagcgggcgctgctctcctgcatggttgcagcgtgcgtggtactgggcgccgtggccttcgcggctacggggagcgcggtgggcgcggttgccatcgtggcctgcgcgttggcggaggcggtcgggcttgcgcgcgcggcggccgaccggcgcggcgactccgtgcgggatgccgtgcctgatgtgctgcggtcgatgggaacgtgcttcgatgccggtctctcgctgcagcagacgctggcccaggtagcgagcgaggcggacgggcccctgcgcagcctgttcgcgcatggggcccatgtgctggacacgggcgggagcgcgacggaggcgctcgggggactgcggcaaggctccggggcctcggagcttgcgttcgtcgcggtggctctggacgtgcagcaccagacgggcggcagcatgaggcaggtgctcgatgcggcgcgcgactccgtggagggcgagctggcgctgcggcgctcgctcaaggtccagacggcgcaggcgaagttgtcggcccaggtggtgagcgtgatgccgttcgcgttggtggctgtgttctcgctggtgagcgaggacttcctgtccccgttcttcgccagcccggccggttgggcgctcttgggcctggcgctgggcatgcaggcggcgggcgtgggcatggtgcggcgcgtgctggcggccggagcggcgtcgtgagcggggcggagggtttggcggccctcgcctgcgcgttcgccggcgtatccggcgcatgcctggtgcagggggcgctgcggcgccgacgtgcggccgatcggcggcgggcggcgctcggcaaggcggacgccgaagcagcaggcggcgaggtgtcaggcgggtgcgccggggcggttgtgcgctatgcggcggatctgagccgccggctcgcatttggcgcagtgcggccgctcgccttgccggtacagccgggtgggagcggccggcaggctgcgggctcggcggtacctgcggcaggcggtgcggggacgccggcggacgcgtgcggcgccggttggttcgcggcgcatgcgcgcaaggcgggccttgccgacggggtgagccccgaaggatttcgcgagtgtcgtgtgcgcctggctctggggctcgccgccgtcggtggcctggcgggggcggcgctgtcgaacgagctcatggcacttctcggcgcggtggggcttgcgtcgggtgcgctggctccacgctgggccgtgcgcgataccgagcggcggcgtgcgcaggaggtggagcgccacctttcggagatgttggaggtgacggccctgggtctgcgcagcgggttgtcgttcgaccgcagcttcgagctgtacggcgcgcacttcgacacgcagtttgcgaaggcctgcgcgtcggcccggcgccgctggtcgctggggctcacgacgcgcgatgaggcgctgcgcgatctggccgcgacgtatgactcggagcagctcgcgcgcgtggtggagagcatggtgcgatctcttaggttcggctcctcgctggccgggagcctggaggcggctgcagcggaggcgcgcgccgagcatcgcgcgcgcctggaggagcgggtggcgaaggccccggtgaagatgatgatgcccacgggcgccctcatcctcccggccatgctgctgctggtgctgggcccagtgctgctggagctggcgaatggggtttgatggcagcgcggcagcggcggggcggctgtggaggccgactgggggatggacttggtgagacgagaggagcgttcgatgaagaagcggatggcagcgggacgggtggcgtgggagcgctggagcgagcggtttcgggtggatctcctgcgctgggcggccgcctggcgggcaagactcgtgcaggcgagagggcagggtaccaccgaatacgccattttggtgggcgtgctggtggtgatagccatcctggctatcacggtgttccgcccgaagctgcaggagctgtgggatgccatagccagcggcatcaacgggctgtgagcggcgatcgcgcttggccccagatggggcccgacgatgagcaagggcagggaacggtggagttcgcgctggtcacagccgggctgctcgcggttatcgtggcatgcggggcgctctggcgctccttcgagggagggctgttcgtggagcacgcgctcatagcggcgtcgcatcacgtgcagggcaccgccccgggagcggtggcggacgtgttcctgtactaggcgattgatcaagaggggaaagggaaggaggcagtcgtggcgggtcaaggacgctggttcggttgtggggcgctgggcgtgcgacggctacggagcgtgccatctggtttcgcggcccgcgagcgggggcaggctaccgtggaggcagcgatgcttatcccggtgctgttcacggcgttgcttctgctgttgcagccgggcatcctgctgtacgaccgcatggtcatgcagggcgcggcggcggagggctgccggctgctcgccaccaagaccgccgctttgggcgatatggacggcagctgcgaggcgttcgtgcgtcatcgcttgggcgcagtgcctcctcatgactgcttccacgtgcaccatgggggctgcagttgggacatcgtgatgacgggtgacgaggggtctcagatggtgagcgtgtccgtgggcaccgacgtgcgcccgctgccgctgctggatgtgggcgcgacgctgctcggcatgaccgacgcagcgggcaacctgcatctggagacgacggtttcgttgcccgtgcagcctgcgtgggtcgatggggccgaggcagggcgcgatcctgcggcatggatcggggcgtggctgcgatgagcgggaagctgtttgcgaaggatgcggacggatgcctgccggggcgccggggcacggtgccgggctggttgcgcgctgtcttgcgacgacgtgccgtgcgggcacgcgagccgttcgccctgttccgcgacgaggccgggttcaccacggcgggggttgcatgcgcgctgctcgtcacgttggcgctggtgttcacgtcggcgcaggtgtaccgcgtgagctcggcctccgccgatgtgcagaatgtggcggatgcggcggcgctcgccgccgagaacgaggtggccgagttcatgatcgccgtgcgggtgtgcgacgccgtggtgctctcgctctcgctcacgggggcggcgacggccggcttgggcgtggccgcgctgtgcacgcctgcgacggcgggcgcgtccgaggtgctgctcaaggccgcacgcaaggtggtggaggcgcgcgacgagttcgccgagaaggcgtctgcggggctgaaccgcctgcagaaggcgctgcccttcctggcggcagccaacgctgcctcgaccgcttcggcgaatgacggaggcccgatgggcgcctcgtacgtggcgctcgccgtgctggtgccggccgacggtgaggagctgggcgtgggcgctgcggagggcgcgggggacttggtggacgatgccgagcgcgaggcggatggtatccgccaggctgccgcggacgccgaggaggcggcccgggaggcgaatgcctggaaagagcgtgcattcctgcgcgattgcggcgaagatccttcgtactgcatgagcgagcgcgcccgcacgctggccggcatggccggggcggacaacccgcgctatgcgagcgtcgatgcctggtcgttctcggtggccctcgaccgggcccgcgcctactatgcgcgccgcctggccgtggaggcccccgagggatcgtcgacggaggagcgggcccggtcggccctgcgccagcgcttctacgcctatgcggccgacgaggtggggcgcggctacgtgcacgagagcgttgactcgttcgacgcgcgcttcccgcacctgccgaagaacacggacgagatgcgcgggacggcgctgtatacggaggcggtctacccgacgacggtcgacgggtccgggagcctggtcgtgcatgcctggcacgggtgccccgaggcgggaggcgcggcgggtgcggcctccatcgccgagatggaggcgggcgggagcgccccctgccccgcctgcgggttcaccgccgcgagcatggggaaggtggccgccgcctccacgtccatccagaacggcttcgagtaccactacgaggccgtggcccaggctgccgacgggtaccagaaggcgcgcgcgaagctggatccgctcgcggccgaggtgaaaggcaaggccggcggactgctcgaacgctgtcgggacgtgcttcagcgtgcgggcgggatgcgcatcgacgccgcccctcccggtcggttcggcgtggtggccttcgtggcgaacacggctgcggccgccgcctccaccgggttcgcgagcggctatgtgcacgaagccggctcgttgggcgtgcgggccgccgtgtcggccgcaacgctcctcgccgagccgtcggacgagggtcgcagcgtggtctcgtcgctgctcgacggcctgcgggaggagggcggtgcggcggtgggcgcgctcggcgtggtgctcgattgctggtcggggctgctaggggcttacctggaagggcaggaggccgtggaggaggccgtcgggaacgctgtgggcgcgctgccgttcgccagtgcgagcgggttgggaacgtgggcggcaggcgccttcaaggcggctgcggaggcgttgggcctcgagccggcggagctcgaagcgctcaagccggtgctcgtgagctcggctcacgtggcgggggcggacggctcgtcgttctcggcacggttccttgccgtaaaggctcgggccgtggcgcatcctctggcgtcgaccgatttgttctcgtcggtcatcacgtcggcggaggcggctgccgtggaggcgatcgcgggactcgacggcaccatagagatcgcctcggtgaggctgttcggcgacgaaggtccggccatcccggtgaccatcgcgctgccgcaggcggcgaaggacgccgcagcggggttcgcgagcagcgcggccagcgccctgcgctcggtgtacgcgcaggttacaggggtgaagacatgggagtagcccaggcggatgcccgcgagcgcgggcagatgacggtggagttggccgtggtgttcccggcgctcttggcggtggcggtgatagcggtgaacgcgcttcttttcttctcggagtgcgcggcgttcgaccgggtggctcgcgaggcggtacgcttgcatgcggcgtcgccggcatacgggcagggtctcgagcagagctgcgcgcaggttgcgcagacggtggagcaggcgttcgaccgcccctatctgggcacccgggtggcggtggagggcacggccgacggccatgctcgcttcaccgcgacgatcgagttctcgccgacgctgttcggcctgggtctgaagtcgtcggtgctcggggtggccttgcctcgcctggagcatgcggtgtccctgacggtggacccgtacaagccggggatgctgctgtgagcgcgcccgcacgccgcaggcgtcgggcggtggcggcccttgccctgctgctggtcgcggtattggccgtggacgctgtggggagggcggtgcgtccgggcgtgctgcgcgaggcggccgtcttggcggtggacggtgcggccgcatcgcgggagccccctcggctccccgagggcttctcgcaagaggtggtgcctgcggaaggcttcgccggcctgcgggtaggggctggcggatcggtggttgggtacgaggtggaaaaggatccggcgcgagcgttcgacgaggtgaggagcttgctggacgaacgcgggtggaaggcagtgccctccggcgaccgcgcgggcgggtcgttcgtgaaggagacgggtcggttccggtgggcttacgtctcgtgcgtgagggcaggggatacgacgagcgtcgtcgtgcagtgcgcgacggccgacgagaagggatagacatggttgaggaagcgaaaatcggggcgcggcaccgcgtgccgggagaaagggccaccgcgggcgacgtaccgcagccggagcagggcccgcgcggacgtgcccgtataacggtatcgccgaatgctggcaagggggatcggaacgaggcgcgcacggcgctcatgctggctacgcgcacgcggagcaaggcggcgggcctgctgctcagcggtccgagcgacaaggcgctgctgctggtgtcgtgcaacgacgtgcacacggtgggcatgcgccatgccatcgacgtggcgttcgtggatcgcctggggagggtcgtggaggcccatcgctcggtcggcccgctgcgccggctgcgcaatgccaaggccgtggccgtcgtggagcgcttcgcctcgtgcgattcgccgtggttcgcgaaaggagaccaggtagtgatatccggtagaagggaggtttccagatgaagacgtgtcctgtgtgtcgggcgcgcaccttcgaagacgccgaggtttgctacggctgcctgcaccggttcgagggtggcggtcgggttgcggctgcgcccgaggatgcggcctgggagcccgccgatgtcgcgcagcgcgccgcgtcggtgcccccgagcgcgcagacgcagcaccggttgcaggcgaatacgcagatgcgctcccaggtgcaggcaagcgcgcggacgcaaccccacgagccggcaggtccccggacgcagcccccgatgccgtcggacgatgcttccgccatgggagatccctccgctgcaggcggcgttccctccgcgggaggcggcgcttgcattgcgggcgagccgcctgccggcttatcgccggcatcgcggtcgaatgcggggggagccgcctgtagagccggcggtccttttaccgcgggtgatgtggagcgtcccgaaggcgcggcgctccacgcgaggcccgccattggtcttcccgcgacgccgttcgaccatgccggctggatcgtgcgcttcgagctgccgggcggcgttgcgcgcgcatccggcgcaacgggcggaggcgcccggcaggcggaggcgtacggaactctcccgccaggcggggaggcgggaaccggccccctgtcgttggtggtcagcatctgccctctgcgcgaaggggaaggggccgccgcccgtgcgccggttccgcgtgatgcgccgaaggcgggtggccgcctgcccggcggagacgtgacggtagacgatcctgcgcccgctgccctcgccgccaggcggggaaggcatgccggccttccggtgccggcaactggcgaaagggcaaggccatgagcgcaccgtacgtcatcgcggcgtccgtgctcggctgcgcgttcggctggcttctcgtcccttgggcgagcgacgtgctgctgcacagggtgcgcgagcgggcggacgcctggtgggacgagtcgctggaagcttaccgcgcgttcaagcgcgctcatcccgggagcgagccgtccagcgcggcgccgggggccgagggggcggttggcatatggcgcgacgaggcgtttgccgctggcttggcgggctcgctcaccgaggagcgcttgaaggcgctcgccggggtcgggttcaaggttgggggcctggaagcagcggggaccgccgacgagcgtggccggcgctactcgttcgagccccgcccccggtcccgcatgctctgcgcggcggcccttggggcagcgttcgccgtcgcggcggccatcgccccgagcgcgcccgctgccgcgatgctgggcatctgcgcggcagccatggccacggccgtagtctgcgacctgcgagcgcgggccatcccgctcgaggcatgcgggttgatggcagtggcgggcacggcgttccagctgctcgcctgcggttccgagggtgcggcaacgggcttggcggttgcgcttgtcgtggcggcgggctcggcgctcgcgaaccgcctgttgggcgcacgctgtcctggcggggcggtgggcaggggcgacgttcgttgcatgggggcgctgtccttggcaacgggcgccggcgccctgtgcgggttcgcggcctgctatgtgctcgcgggcctcgcggccctggccggatgcgtggcaggcaggctcaagctgggcgacggcatgcccatggcgccgtttctctcggcctggcttgcttgcggcgcggcggtcggcgtgacgttggcatgagcgcgataagggaagacgggatccgaaaggacctttgaaaacgtgagagaagggaagttccatcatgaagcaggagaagaatcggtcctaccagcacagcaagcttaaggcgctcgtcgtgcgcggagaggagggaggcgggtccgagatcgtgcagacggtgatcgtgctcggtttcgccgtcggcctgggggcggcgctcatgctgctgcagggcaacatccaaacggccattaccacggcaggcacgaacatcaccgacctgttctcgaaggtgacgaacggtgcggccaagtaggcgctctttccgatccgagcggggcggcagcgtcgtggtcgccgtggcggccatgccgctgctgctcacgatcctgttcgcgtccatcgacctggggcgcgtcgcgttcctgggtgccgaggcgagcacggccgcccacgccgtatgccgtttcgtggagacgaccccttcggcgacggcctttccggaccggttgcgggtggccgctctcgaggcggcgccgtcgctgggcgccgcggagctggagctgtccgtggctgcggaggtgggcggcgccgtggagcgggagatcgcctaccggctgcacgacgacgaggacggctcgttcgccgtccgcagcgtttgtacgcgtacgtgcccggtggcggtcgagctctcggtgcgagcacgctacctgacgccaatcggctccctgctctcgcaggaggagtccggtccggtgttctcgtgcacggccagggcgtgcgggtcggtcgacgagacggctcggggggaggcggcatgaggacggggaaaggcaggtggctgggatgcggtgcgcgggcgggatctggcgctccggcaagaggcggcttgcgggtgcggggtgcacccgagcgggggagcgagatcgtgcaatccgtggttgccgtgtcgcttgtgctgctcgtggtgttcgcggcggtgcaggcgggcgccatgatgctctccgtcaaccgcttgacggccgatctcacgcgcgcctgccgacagatggacacggccgggctcgtccttgccgccgatcgcgagcggttcgtggcagacgaggtgctgggcgcggcgacgcagctaagacccgatcttctgacggtttcgaacgtgcgggccgaggagcttgccacgatgcagggcgcgcgccttgctgcaatggcgccaagcggaggagctggcgaggagggcgccaggtcggacgcgggagtggtgcagcgcacagacgccgtgagcgtgtcgttcgacgtgcgctacgagctgccttccctggcggcgatcccggggttggcccactgcgcgatcgcgcggcacgtcgtgtgcgagctgatggcgggaaggatcgtggaagtggaggtaggggcatgagccgtgctgtcgacaagagggcgttgcgcgtccgaccgccgcgcaacgcccttcacctgcaccgcatgccggacgagcgcggcaccattgcgccgttggcggtgacggcggtgctgctcctgttcggcgtgctcgcgttctcggtcgaccagggcatcgcgtgcgcggcgaaggttcgccaggaaaacgcggtcgacgcagcgcgcgatgcctgcttcgacgcctcgttcgcgctgatggcgaagaatgccgacgacccggggctcgcggttgcgcatcgggttgcggaaacgttgcgcgcggatgggttcttcggggcggtcaccgtgtggttcttcgaggttccgaaggaggagctgccggattcgcgccgcgtatggggcatggcggtgcagctgcaggagcaggtgcccacggtgttcgcgcgcgggttcggcatcgagtcgctgcccgtggcgtcgaaacgggtggtggtggccgagccgttcgccggatcggtggtttggagacccgacgggtcgggaggcgaggtgttcgaactggccaccggcgccgactcgacggcgctgttgcgggggcgcttcgaccggttggatgacggacccgctgaattagaccgcgaagttcgtgctgccgttgcggcggcaggcgggcttgcagagaggaaggagccatgatcatgcaacgggcaagggagcaggcgggggcaccgtccggctatgccagccgtgcgggtgcctccgcggtgccagaagggcagccggcctcggtcggcggatcgcgtactcggcccgagcggccgcaggcgccgcacagcccacaggatccccggcgggtcaagagcttggccgccgtagcggcagcctcggtggcggtcgcgctggttgcggcggcttacggcacgtgggcggcgctgtccgcgcaagcgatggtggaggctgcgagcgcggacgcgcagcccacgctggtggccgccgccgacatacgggcgggggacgtgcttgcggcctcgtcgctcgaggtgcgctcggtgccgcgcagcctgcgcgtgcagaccgcgctcggtgccgacgccctcgagggctccgcttcgcccgtcggccagcgcgcgctggccgacctgcccgctggcacccaggtcacgccggcggcggtgtccggacgtgcggacggcgctcgcctgtcggcggcgctcgccgcaggccggcaagccgtgacggtggccgtagatgccgagtcgggcctggcgggccagctgcgtccgtcggaccgcgtgagggtggtcgccctggaaggcgcggcttcgggggaggccttcctgtccaccatctgcgacgacgtgcgcatcgtctcgctcgacggcgaccgcgtgggcggggacggcgcctacgcgtccgtgacgctggaggtgacgcccgagcaggcagatgccgtgcgcgctgcgcaatgggcgggaaaggtgagcctcgtgctcatgccggcgctcgtggagcctacggcggccggcgagacgggggacgggcctgcaggtggtttcggggcgggggacggcgaagcgccggaggcggccacggctcatgctgcggaggaggccgtcgatggataaggcgctcgagcgcgcgctcaaggcctccgtgcgcgacgaggtggcggcaaggctcggcggcctgaccgcgagcccgtcccaggtggagcagctggtggtcgaggcggttggcgagttgaggctcgactacggtgcgcagctggaacctggcgaggcgcaggcgctcgcccaggcgctcgtcgacgacttcctgtactacggaccgctccaaccgctgctcgacgacgggtccatcacggaggtaatggtgaacgggggcggcgtggacctgtcagatccatcgctgccgttcctgcctcccatcgtgtacgtggagcgggcaggtctgttggagtatcggccggacatcgccttcgacgatgccgggcatgtgcggaggatcatcgacaagatagccgagcaggccggcatccgctgcgacgaggcgcacgccatgggatgcgccatgctgcccggcggccgggcgcgcgccacgttcgtcgtgccgccgctcgcccctgacggaccggcgctcaacctgcgcatgttcaaggaggacctgatgggcatgggcgaccttgagcgtgccggcgcgctcacgcccgccatgtccgacttcctccgctcggccgtggcggcacgctgccccatcgttgtctcgggaggcaccggctcgggcaagaccacgctcctgaatgcgctatcggagttcattcccgcaggcgagcgcgtcatcacgttggaggacacacctgagctgcgcctgcgtacgcctcacacggagcgaatgcagacgcgcgaggcgaacgtggaaggcgagggcgcggtgagcatgcgcgagctggtggccatcgcgctcaggcgccgccccgaccgcatcatcgtgggcgagtgccggggcgcagaggcctacgacatgctgcaggccatgcagaccgaccaccccggctccatgaccacggtgcatgcgaacgaccccggcaacgccatcagccgcctgcgcaccatggtgggctacgccgacggcgacctgaaccgcgaggtgatcatgcagcagatagccgagtcgctctcgggcgggctcatcgtgcacgtcgagcggctgcaggacgggaaccgacggatcacgagcatcgtggcagtcgacccgctgcccgagggcggcgcggtcatcccgcgcgccgagctgtttgcctacgacgtggccggagtggatgacgatggctgggtggtgggcacctggcgggcatgcggcatccagccccagcacatcaaggagcggatgagggcggcgggcgtctggttcgaccctgcgtggtttttcgcggaatagggggcttctgcttgctgaaggcccgcgggtggtccaagcgaaggcgccgatctgcccggtcgctgagagcagttggtgtcggggcggttgcgcccaaggtcgaaagaggaggaaggcgatggtctacttagttgcatcgaccgccatcatggcgctatgcgccgtactggcggcgagaacgctcggctgcgtgagggaggagcggcttgcgcagcgggcttgggccgcctcggcggcttcgggcagactgcccggccgttcggcgcaagtcgagcttccgatccggcgcgcgccttccggcccggagcgcgacacgccgcttggcaggttgctctgcgccgcaggcatcgggctgacagcgcggcagggggttgccgccacggccggaacggctgtgctggtgggcgcgtgcgcgggtgcggcgagcggggtcgccgcattcggggcggtggcggcaggtgccgtgcctgcgctggcctacctgcgcttgcgccagcgttgtcgcaagcgcagcgagctgctggacgtccagcttgcccatgcgcttccgcagatagcggccagcctgcgcagttcgctcacgctggagcgtgcgctgcgcgtcgccctcgtgcatatggacgatccccttcatggcgagatcgcgcgcgtgctggccgatgcaacctacggcatgcccctgcacgaggcgctcgaaggcatggcgcaccgcactcagagcgaggacgtgaggaccctcgcctcggcggcacggatgcgccagggcagcggcggcagcgtcgctgccgccctcgccctggtctcgtcgcgcgtgaacgcccgtctgaaagcggcgcgcgagctcaaggtggaggtggcggggacgcgcctggcgaagtggttcgtcgccggagccatgcccgccatcttcctcatcatgtacgcgatgaacgacgatttcgcgcgtttctacacgaccgagccgctcggctgggccgtgctcggcgcggcgtcggttatggaagcggtcggcctggcgctggcgcatgccgtcacgtcgctcgatcgaaggtaaacggcctgcacggcagatggaaagaggggcggagcaatggaaggatcgtggatcgcggccatcgtgctgctggttctgggaggcggtgccgcatgcgctgtctacgaggtgctggtaaggaggtttgccccacagcgcaccgggcgcgcgaagatgggcgaggcgccggtgggcgaccggcctcgaacggcgcgcggagacccgggcgcacgggaggggacggggaacgcacgcctaggggcggacgagcggtcgggcacggcgcaacggcgggcggctgcgaggtcgggttcggcacggcggcaagcggaggcatcgcgctcgctttcgggcgtccgcatccatggactcgctggctcatggcgcgcgctcgcagccgcgtgcggcgcccgggggcgtttcctcggggcggccacgaagcgcgtcgagcgcttgctgcccatgacgcgtgccgacggcgacgcataccgtgccgagatagcccgggctgggtggagcatcgagcccgagacgtggcgcgtgctgcgcatcgtggccgcgacaggatgcggcgcgttggcgggcgtcggggcggtggccgcaggcgcggttccgatcgcggcgctcgccgtcgtgggcaccgccgccgttgccggatggacggcaccgcgccttgctatcgcgcaggccgccgcccgccggcgccaggcgatcgaggcgcagcttcccgacgccatggagctgctgggcatcgcgatagcggccggctcgccggtcgagcagagcttccgcgaggtggcgcagaacctccggccgccgctttcgggcgagttcgaggccgtcgaccgcgaggtgaacctgctggggcactcccgcgagcaggcgctcgaccatcttgccgcgcggtgcgcgagcagggaagtctcggcgttcgtcgcgcagctcgcccaggcggtgagccagggctcgtccattgccgaggggctgtcgtcgcaggcggcccttgctcgcgagacggcgcaggcggcggctctcgagcgcatccgcaagatgccgacgaagctggacgtggtgctgtcgttctgcttcctaccgcccaccatcgcgctcgtcgtcgtgccgacggtggtcgacctgctgaagttcctgaacgatacgctgcaatgagaagggtgattgccatgggtgagcaacggggaagcggcgcggcttttggcggtggcgggccgcgggacgcagcaacgggcaccgcgcgtccggatgccgacgctggtgccgcaccgtcgggcgccggcgccgtgcatcccggcggggcgccgggtgggaggccgcagaggcgcggcatctcgcggcgcgcgtttttggggctgggcggcactgcggcgttgacgctgctgctggcgccgcgcctggcctggggtggcgtgggcggcggcagctgggggaatgccggcggcacggcgtaccccgggtcgcacttcggctacgacgggggctggggctactccagcaacggcaaggtgtggctcgcggtgagcagcaatgccaccatcgggcgcatgaccgagctgttcgtggagatagcggtgacatcctactacgccaacggcggcgcttggtcgcccacgtggtttaccgactaccccgacactcacgtcgactcgttcgtgcgcaacgaggcgggggtctggctgtcctccacgagcggcttctacgataccacctacgatagcgcgtggttccaaggcccctatgccacgcaccgcctgcgcgtaaggcgggaggtctgggactggtggtcgtgggccggggtgcgcgcctggtgcgactcccccgacagcgccaacggcataaacaccacggccgaggcatcgcagctgatcccgcaccatccgcttgtcgacgatcgttcgtggcagggcaaaatcgtcaccttgcgtcccgaagccgctccccacctgcgtctcgatgccagcggcggcggcactgtcaacggtaccaacatactggcatggagtgcgtcggactacacgaaccagcactggctcgtgctcacgagcgcccagggccgcacatgcctcgtgcccgtgcacacgggcgaggcgccgctttttgccgatgtgtccagcaacgactggaacgacggcgacaacgtgcacctctggagcggcacgggaggatggaaccagtcgttctggctgcacgacctgggcacgggctaccatatgatcgtgcccgaatgctccggctgcgcccttgacctggcgggtggagggcagggcaacggcacgaacgtcgcccaatggaactgctacggcgattggagcaaccccaaccagcactgggctctggaagagccgctgttccgcgagcgggatccgggtgcgctggtgctttccggcatcgatagctccggcgaggacgagggtgctggcgagaccggcaaggtcgagagcacaagcgagaccgacgatgctggcgaggcgcgcaaggcctgcgaggccgagccaggtgcggtgctcgcaccttccgatcctgatcgcgcgtgcctgccgcgcaactacccgggaacagcgggcatgttctaccgctacgcctggtaccgcggcgcgtcgccgggggagcgtgcggagaccgtgagggagccgagccaggagccggcgtacgaagtggcggagggcgacgaaggcgcgtacctcacctgcgtggtgagggcgtacgcgcgctacggtaacgtgccgtatcagggcgaggtcgaaactgcgtcggtgcacgtccgctcccgccgcgtgcgcgtgcgcttcttcgcggacggcgacccggaaccatgcttcgtggaagagcccgaccgcgggagcgcctacgtgcccccgcaggccgcctggcaagctgccgagaaacccggttgcgccggcgtggacggctggtaccgcgatgcgtcctgcaccgaggccttcgttgatggcgctctggtcgaaggcgacctcgacctgttcgcgcgcaatcgcgtagagctgacgtacgcccaggccgaccgctcctgcctgctggcctcgccacgcgcgtactttctcgacgaggcatgcgagcatccgctgcccgacccgtcggccttgctgccgtccccggcatctcttcactacggcgaccgcgtgtccttcgcccgcggggcgagcgcctggtacgaggacatgggccgcgtccgcgaggcatcgtgtgccctgggcgcctacgccgcccccgatgcggccgacctcccgctccgcagcgcccgcctcacctgcaacaccacggcctacctcctgtggcgcacccctgcctacgacggcatcgcgctctcgtgatataaaccttgctcttgagtaatacttactcgtgcgttatagtgaaaggagcgattagatgccgccgaaagcatccgaagtgtatcgccgtctcttgcgagaaggttggcgtgagcaagaaggcgggaagggctcgcaccgaaagttgagacggaatggcgtgatgataatcgttccctatcatcggagggagttgagggcgagaacatgggagagcattaggaaaaaagccggctggaaataaacagggaacagaaggagtcgacatgcgctacacctatccagtgctcgtcatcgaggacgagctaggaggctactgcacgtacctgaacgatttcgatcaagtgacagagggcgaggacatcgccgaggctatcgagatgggcgccgacgccctttggctcatgatcgacgactacctccagctggacaagccgcttcccaagccgacgtaccccgaggagcacaagggcctgctcgtggccatctcggtggatgtggacaccgagcgcggcttgctcaccacgaagatggcggcgggcctgctcggcgtgagcgacgcgcgcgtgcggcagatggtgtgctcgggccagctggcctccaagaagatcggccgcgacaactacgtctacctgtggagcatccgcgagcgccaggccaaccccccgaagccgggccgccccaggaagaaggccggctccgcccctgcgaaggagacggaggcggtgtagcggccggtcgtcggcgtgcatcgcgtgagcgcctgactgcggcaaggctccggccgccgtgccccctacgcccccgtcaagctggcggccgcgttgccgccagcctccgccgagcgcatgcgcacgcgtcctgcggcaagcgccacggcgaagacggcggccgcgaacagcacgatgatgccgaggttgcccaaaatcggcgcggcggactcccaggtgacctcggcgaggtgcgcgctctcggtgacggcctgggtgtaccagtacgtggggaagaacttcgccgccgtctgaatctcggcgcccagcaggtcaaggctgatccacgccccgcccatgaacgccatcaccatgccgccgatgttgcccaccgcgttcgtggtggcctcgcccacgcccagctgccccagaagaaagcccaccgccagcggcacgagcgccagcgcgaacgccgccgccagcatgagcgcgacggcccctgcgggcacgccctccagcgtgtacccgaacgccgccagcccgatgccgcaggtcactgcgcacaccgccatggtcaccaataggctggcggccgccttccacaggcccagccgcacgctgcccacaggccccacctgcgtgcgccgcagcacgtcggtgcggttgaacgcgcccatgagcaggctcacgcacacgatgatggcggccatgagcgtgtaggagcaccacatgaggtagaaggcgaagcggtcggccggtatggcgccgccctgcgtccgcaccgtctcgacgtccgccgtctgggcggcggcatcgtcggcgcgcgccagcacgtcggccgcggaggcgtccggctcgagcgcggcctcggcccgcacgagccccaaatactggttcgcctgctggtcgagcagcgtgccggccatcgtcccgtagctgtacgccacctcgacggcgggcacgtcctcgcccgagcgcgccgcatccaagaacgcgcgctcgtacccctcgggcaccacgagcacgcacttcgcctgccccttggccacggcgtcctgcatcgcgaaggcgtcgtcggcgatttcgatccgctcgccgtgctcgcccagaaacgcggccaagtgctcggagagcgcgctgccgtcccgatccaccacggcgaacggctccctcgccgcctcatagcttccttcttccgtgtcgggggcgacgcccatggccacgaacaggccgagaaggctcaagaaacccacgtacacgaccacgtacaccgggtgcgtcagcaccacgcgcagggcggttttaaagacttgcatagcgctgcctcctcacgaacagggcggacacggcgaacacgacggcggtcatcgcaagcaacaggccgactttctcggcgaagggcacgagcgagtcgtagtagtacaggctgtagaacgtgtcggtgaccaccttggcggggttgagcgaggcgagcagcggatagtcgcgcgccagctggtcggccatgttcatcaccggctcgccgtagagccccgcgaacagcgacagcaggcaggtcgtgccggtgagcaggcccgtcttcacgccgaaccccaccttgggaagcgatcccaaaagcgtgccgaacgcggtggagaacagcgcgcacaccgcgatggccccgatgcaggcaacctcccggcccgcgaagtcgatgcccgccgtgaagcgcatgtaggccagcgccgccagaaggcacgctgtcgccagcacccagctggccgccagcgcggccgcgagcgtcttcccgcggctcacggcgcccacggcccggcgcgcgcccaaaggcgagaggttcggctgcgcctcgcacacggccaccatccctatctgcgcgcagaacaggcaggccatgcccagaagcgcgtagtagaaccgcaccgattgcgagggctcgctgcgcgtgagcgacacctgcacggtggcgtcgccctgcgagagcgcgcgctccaccaggtcggggtcggccagcgccatcgggttgtcatgcgcgatgcccttgagcaggtcggcgttgcgcacgtaggtgtcggccaccgtgttcaggatggtgcggccgatctgcttcgtgcccacgccgtcggagacgggagacaccgccagatgcggcgcgccctcgccatccacggacagcacgcccatcacgtcgcccgcctccagcgatcctcgcgcctcctcggcggtggcgaactcgcgcacgtcgagcagctggtcctcgccgggctgggacagctcgtccaccagggcggagaattcctcgtcggcgcggtaggcatcgtcggccaccaccgccgtgggcacggcctcgaacgacatcgagctgtcgaggttcgcgaacatgaacatgaacagggtgcacaggatgatggggaaggcgagcgcccacaccgcgagctccgtcttccgcgtgagcaccgccagcgcccctctgaatgcgttccacatggtcggccccctagtccctgagcgctttgccggtgatctcgaggaacacgtcgttcaacgtgggcggctcggcgtagatgcgccccgtggccacgccgcgtgcggcgagcgcgcccagcacgtcggccacgttgtgcgcgccgttgccgcagtcggcctccagcatggtcccgtcgaaggatgcccccagcacgcacggcagctcgcgcacggccgccagcacggcatcgtcgcacgcgtccacctccacgcggatgcgctcgcccgtgccgatcatggccttcagctcgtcgttcgttccggtggccagcgcccgccccgcatccatgatcatgatgcgcgtgcagatgtcctccacctcctccatgtaatggctcgtgtacacgatggtggagccctgggcgttcaggcgcaggatgccctcgaggatggcgtttcggctctgcgggtccacggccacggtgggctcgtcgaagaagatgagctcgggcttgtgcgcgatgccgcacgcgatgttcagccggcgcagcaggccgcccgagagcttgcgcggccggaactttgtgaagtcctccagccccacgaacgcgatggcctcctccacgagctcccggcggcggcgcttgtcgtcgacgtagagcgcgcagaagtagtcgatgttgccgcgcacggtgagctcctcgaacaccgccacgttctgcggcaccacgccgatgcggcgcttcaggtcgtagcgagacggcttcatgtcctcgccgaacaggcggatggcgcccttgtcgtaggtgagcagctgcagcatgcagttgatggcggtggtcttgcccgagccgttggggcccaacaggccgaacacctcgcccggcgcgatgtgcaggccgaagtggtcgagcgccaccacgtcgccgtagcgcttcaccaggttgtcgaccgcgatgatgtcttccatgggaatccccctgccttctcctcgatgatggttccatgatggccccatcgcgcccgccgcgccagtgagcgccgtcatcgatcgcgccgaccgccccatgacaaatgtcacggattctccgcgcacgcgcgcatgcggcgtgtgcggccgcatgcgacctgctaccatggcccccatggagagaatcgtcgacaaggccatcgtgctcgtgtgctgcctcgcgtgcttcgcggtgctgccgtgggaggtcgcgctgctgctcgcgctgctcgcggccgtggccgcctcggcgctcggcgaggcgctgccggagcggttcgccttcgtcccggcgcttgtctatgcgctcgcagcattcgcgtggccgtcgttcgccgcgtttctggcgctcgcggtgtacgatctcgcgcgcgatgaccatctggcaatccgctggtgctggctgctccccgcgctctcggcgttcgtgcgcctcgaagccgcgctcgcgctcctcatggcgctggcctgcgccatggcccttctgctctcgtaccgcacgcgccgcttccaaaccgagcttgccgcgtaccgccgcctgcgcgatgacgtgcaggaaacctcccttgcgctggaggagaagaaccgcgggctgcgcgacaagcaggacctcgaagtaaggctggccacgctggccgagcgcggccgcatcgcacgcgagatccacgacaacgtggggcatctgctcacgcgctccatcatgcaggtggaggcgctgcaggtggtgcaccgcgacgacgagcgggtgcgctcagagctggcgcaggtgggggccacgctgcacgaggccatgagcacggtccgcgccagcgtgcacgacctgcacgacgacgcgttcgacctggagacccagctgagggaggcggccgaggccttcacgacgctcgccgtggacatcgactaccgcgcgtccgacgtgccgtccgacgtgggctacggcttcatagccattgtccgcgaggcgctttcgaacgcctctaagcactccgacgccagccgcgtgtccgtgtcggtggccgcctacccggcgttctaccggctggccgtgcacgacaacggctccgtaccgccgcccgcctccgtgctcgaccggcagggggccgactcgccgctcgcctccgggaccgctcgcggcatcgggctggccaccatgtccgaccgcgcccgcgcgctgggcggcatgctccgcgtcgactacgaccagggcttcaaggtgttcgtcaccgtaccgaaggaggatatcccatgagcgaggagaaggccgcgggcccgtccgcggcgcaggaggggcgcatccgcgtgtgcatcgtggacgacgacccgttcgtcaccacgtcgctcgccaccatcctggccgccgagcccgacgtggccgtggcgggcgaaggctgcgacggcgaggcagctgtggcgctgttcgagcgcgagcggcccgacgtgctgctcatggacatccagatgccgggtacggacggccttgcggcggccgagcgcatcctggccgcgcatccggaggcgcgcatcgtgttcctgaccacgttctcagacgacgagtatatcgtgcgggcgctgcgcctgggcgcgaggggctacctcatcaagcaggaggtggccaccatcgccccggcgctgcgcacggtgacgtccggccagagcgtgctgggcggcgaggtgctcggccgcgtggaagccctcgtgcagggcagggggccgtccggcacggcacggctggcacctgctggcgttgccgcggtgccgccggcgcagagcgccgagcaggcgcatgccgccgccgcgctcgagcttttgtccgagcgcgagcacgccatcgtggagcaggtggccgagggcctggacaacaaggagatagccgccgccctctacatcagcgagggcaccgtgcgcaaccacatcagcgccatcctgcagaagctccagctgaagaaccgcacccagctggccatcgcatactaccgcgcacggtagccgtccccctgtcacgtccgcagcccctctggcgcgcccgccgttgcccggccgttgccggaaacctcccgcaagcctggcgtcgctgtgctatgatggcttccgtaaatgatactaaaactataccaattaaaggagccaccatgccccagaagatcgaactgaaggtttccggcatcgacgtcgccatcgcctacgccaacgagagcgaccaaacggttacgcagcgcgagatcgaggcgtacatcgaccgtgcgcatgcccagcatcccggccaggtgctgcagtccctgaatctggacgtcgacggcgaagacgtgggtatcacgtatgggttcgaggccgtgccgttcgaccgcatccgccgcatcacgggctacctggtgggtacgatggaccgctggaacgatgcgaagaccgccgaggaatcagaccgcgtcaagcacggcctcgctcgcgaggaccgcgccctcacctgctcgaacggctgctagcgttcccgcagtgcgcgcgagccccgagaagcggccgcccggctccctccggacaggcgcgctctcggggctcgtcgttttttctgcggcctcgcgcgcggcgcaggcgagggcggcttgattgctagccgaggatgcgggcgaactccttctcggcatcttcctgcagcttcttgtctatggccacgtaggcgtcgagcagcttgtcgccggcttcggtcagggtggatccgtgcgcgccgtcgcggtcgagcagctggatgcccagcgccgcctcggtgtccttcacgatgcgccacgccttgctgtaggccatgcccatgcccttggcggacgcgttgagcgagcccgtctcgcgcacgcccaggcacaggttcgcgatgccgcgcccgaacagcgagccgctctcggattcggggttcatgatggacagcctgatcgtcggcttcaggttcgcaagttcgctcatagtctatcctcgtccttttctggtcatgtccgccgtcgctgcggggaccgtcagtcgttgcgtgcgggcgtcgtcgcgtccagcttctccaggaagcgcgcggcggccgcctcgatgctgtccgtgcctccctctatcacctcgccgaagcggacgggcagcgcatcgagctcggccaggccgcgggggatgtcgtcgtgccccgtctcgcgcgcgatgagctggttcagcgcgcagccggagagcgcggccacgtcgtcgggcagcggcgcgcccggctccaggccgtgcagcgcgcggtacacgttgtcgccgaacttggcccagtgcgccgtgctggcgatgagcacgggattttcgccccggaggttctcggcggtctggtaggcgacggccgtgtgcggatccagcaggtaatcgtgctcgtcgagcacgcgcttgatggtatccaggcacgtggcgttgtcgatggagtcggaggcgaacagctccctcacgcgggcgaacgtttcctcgtccacgcggaagcggcgctgctcgcgcaggtcggacatccagccggcgatggcggcggcgtcgcgccccgtcagctcgaacagctggcgctccaggttcgacgacacgaggatgtccatcgaaggggagggcgtcagcacgaaggggcgctcggagatgtcgtaggtgcccgtgttgatgaagtcggtgagcacgcggttctcgttgctggcgcagtacagcatgcccagcggcacgcccatgtgcttggcgtagtaggcggccaggatgttgccgaagttgccggtgggcacgcatacgtccagctcgtcgcccagtcccagcttgccgtctgccaccagctgcgcgtaggccgacacgtagtacacgatctggggcatgaggcgcccccagttgatggagttcgcgctcgacagcgcaacgccgtgctcttccagcagctgctccgcgaacgcctcgtcgccgaacacgttcttcgcgccggtctggcagtcgtcgaagttgccgcgcacgccccacacctgcacgttgcgcccgcgctgcgtggccatctgcttgaactggatgtcgctcacgccgccgtcagggtacatcacgcctatgctcacgccgtccacgtcgcggaagccctcgagcgcggccttgcccgtgtcgcccgacgtggccacgaggatgaggaagtcgtggtcgagcttcccctgttcgcgcagctgggcggcgcttgcggagaagaaccgcggcaggcactgcagcgccatgtccttgaacgcgctcgtggggccgtgccacagttccagcacgtgggtgtcggccgtaagcgacgtgatggggcagatgcgctcgtcgtcgaagttgtcgccgtaggcatgcgccatgagcgcttcgatggtctcggcgggcaggtcgacgtcgaacgcccggtagatgcgcgccgcgcgctgggcgtagggcagctgcgccagcgccgcgatgtcctccagggagagctccgggacgcgctcgggcacgtacagcccgccgcccgccgccaacccgtcgacgacggcttccgtgaacgtgacgggccggggtccagcgccccgcgtgtcgatgtagaggttcaaagccttgtcctgcgctttctggtcgaattcgcacgtttcgattatccatcctaagtatactatgttccgaaaacaaccggcgcgtcgcgagaccctgtttttcttcctgaaaactcgattcgacgagaacctgttcggcacatcgcccgagtattggttgaacttgcagcgcaacaccgatttgtgggagtcgctcgacctccatcgcgatgatcttgagcgcatagagccgctcgccttgggcatggtgggctgagcctctttcgcccgcccgaccgccttgtttccgctgtgcaacggttcgcctccgcacccgcgcgatgccgctgtcgcgtcctaccctggtgctcgatagcgcaggcagggcaaccgatgaaggcgaggcgaggcggatgggcgggcatgacggcgaacacgaggatgtgcgggacggctcttccagaaaggacgcctccgggggcggcatggcgatgcacggggcgaacctcaagcggcggttcttcgcgagcctcgtgctcacggtgcccatcctgctgctgtcctcgcccatggggatggcgctccccatcacgctcgcgttccccggctcggactgggtcgtggcggcgctcgccacggtgctgttcgtctacggcggcatgccgtttctgcgcggggcggcggacgagctcaggcgccgccagcccgccatgatgacgctcgtggcgctcggcatcaccacggcctacgcctacagcatctacgccttcgtccagcgctccgtcctgcatgcggcgggcatgcacatggacttcttctgggagctggccacgctcatcgtcatcatgctcctgggccactgggtggagatgcgggccgtcatgggcgcgggcgacgcgctcaaggagatggccgagctcctgccggcgcagacccacgtggagcagccggacggctccttcgccgatgcgccgctgtccgaggtgcaggtggggcagaccgtcatggtggaggcgggcgagaaggtgcccgccgacggcgaggtcgtgcgcggcgagtcgcaggtgaacgaggcgctcgtcaccggcgaggcgcgcgacgtggccaagggggcaggcgactccgtgttcggcggatcgcagaacggcgacggcacgctgtacgtgcgcgtgaccggcacgggcgactcgggctaccttgcccaggtcatgaagctggtgtcgcaggcgcagcaggagaagtcgcgtgccgaggtgctgtcggacaaggtggcgcgctggctgttctacgccgccgtgggcgtgggcgtcgcggccttcgccgcgtggcttgccgtgacgggcagcgtgggcgacgcgctcacgcgcatggtcacggtgttcgtcatcgcgtgcccgcatgcgctcggcctggccataccgctcgtggccgcgcgctccacgtccatcggcgcgcggcacggcctgctcgtgcgacgccgacgggcgctcgaggtggcgccgcgcgcgaacgtggtgatgatggacaagaccggcacgctcaccgagggcgacttccgcgtggcggaggtgcgtgcggtgggaaagccgggctccggcgacggcaagggcgataatgccggaggggccgccggcattatcgccggcaatgatgggaaaaacggcggcgcatccgccgacgaccgtgccgacgaccgcgtgctcgcgatcctcgccgggctcgagcagtcctcgtcgcatccgctcgcggcgagcatcgtggccgccgcgcgcgaccggggcgtgcgccccgtgcccgtgcgcgacgagcacgccgtggccggcgtgggcgtggagggcacgctcgaggatgggcggaaggcgctcgttgcgaacgcgcgccacctcgacgagcggcgcatcgtctacgaccgcggcctgttccagcagctcgcaggccgcggcctcacggtgagcttcctcgtgatcgacggcgtcgtggccggcgtggtggcccagggcgacgaggtgaagcccacggcgcgcgaggcggtgcggcagctcaaggagcgcggcatcgcgcccgtcatgctcacgggcgacaacgaggaggccgcgcgcgccgtggcccgcgacctcgggatcgacgagttccacgctgggctcgtgccccaggacaaggtgcgcctcgtgcagaagcgccgcacggcgggcgacgtggtcatgatggtgggcgacggcatcaacgacgcgcccgccctcgcgaaggccgacgtgggcgtggccatcggcgccggcaccgacgttgccatcgactccgccgacgtcgtgctcgtgaagagcgacccggaggacatcgtgcggctgctcgacctgggcacgagcaccacgcgcaagatcaagcagaacctctggtggggcgccggctacaacatcgtggccatcccgctcgcagccggcgtgctggcgccggtaggcatcctgctgagccccgccgtgggcgccgtgctcatgagcctgtccaccgtcatcgtggccgtgaacgcgatgacgctcaaggccggcgacgaggggtagggcccggtggtgtacgcctcccgaaaatcgcctacgggccgttgagcggatgcagacaaaaaaagaaaagttaaccaaggcttccatttcatgaaagtttgctatagaatacttattgttatacgaagctaactgatgggagcacagatgggcaatgcaacggtagcgggcatgggcgggcaggcgggcgtgcaagcccgcgcgcatgccggtacgggtatcgcatgcgccgatgcggacgcggttcccagcgcctcgtgccgacagatgccgctttcgttcctcgggagcggcgagacggccacgatagcgaaggtgcgcggcaggggcgacctgcaccaccacctggagaacctcgggttcgtggaaggagcgcgcgtcacggtgacggccgaggctgcgggcgaccttatcgtggaagtcaagggcacgcaggtcgcgctcaacaagcagatcgcgtcccgtatcatcacgaacgccgccgcctaggcgctgcggtgcggcggggcgcttgcacgctgcttgcagttcgcttgcatgctcttgcagtttgctggcgtgcggactgccggctttcgccgctgttcgttttttcgtacaaatgtttcacgtgaaacattcggaagcgaaaattcgggcaaccgagagccgaatggtcgacggtccgcttttccggacgccccaaagctctgcatggtcgcaggcgccaaggttgcaggttcggcccgcatggccaggtcgcgcattcggtacgagtgcccagatctgcaggtttcgcattcccttgagttggcagaagagttggcaggaatcgggtgccggaggcacctggcgaggaagaaaggatcggcatatgacagaagggcagggtaagacgctgcgcgacgtcgccatcggcgagtcggtcacggtgcgccgtctgacgggcgagggagccatcaaacgccatatcatggacatgggcatcacgaagggcacggacgtgttcgtgcgcaaggtggctccgctgggcgatcccatcgaggtcacggtgcgcggctacgagctttcgctgcgcaagagcgaggcggagaacattttggtttcgttggcctgacggccggcgaaacgacgctgcggctttccgtggcactccatcttgccacgctggcttgagctcacgtgcaaaagcacgctcgcccaacccgtcacgccaatctggagcaccacgaaaatcctcgctgaactcgatggaccggcggcttcgttttcgcgcgtcgcgcgaacaaccggagccctgttttttgagacatagttagttacagttaacttcacgacgaggggaccggcaatccccttgcagcgtgaaacgtgtgcaggacgatgtcgggaaagcatcgacctgcgcaaatggaacaaggaagcctgcccgatgcccaaggcaacgggtagggacaagtgggaaaggcagaacatgggaattcgcatagcgcttgccggcaacccgaactgcggcaagacaacgatgttcaacgacctgaccggcgcctcgcagtacgtgggcaactggccgggcgtgacggtcgagaagaaggagggcacctacacgcgcgacaaggacgtgaccatcacggacctgccgggcgtctactcgctttcgccgtactcgcccgaggaggtcgtgacgcgcgactacctgctcgacggccgccccgacgcggtcatcaacctcgtggacgccacgaacttggagcgcaacctctacctgacgacgcagatcctcgatctgggcttgccggtagtggtggcgctgaacatgatggacctggtggagaagaacggcgacaagatcgacgtggccaagctctccaagaagctgggctgccccgtagtggagacctcggcgctcaagggtcgcggcatggaggacctgctgaagaccgccatcgacgcggcgaagaagggcacgccggccgcgtctgacctgcgcttcacctccgaggtggaagaagcgctgggccgtgtcatcgacgtgctgggtacgcgcgtgaccccgaacgtggcgcgctggtacgccatcaagctgctggagggcgagcagaaaaccatcgacaagctgggcctgcctgccggtgacctctcggccgttgcaagcatccgcgaggcgctcgagaacagccaagacgacgacgccgagagcatcgtcaccggcgagcgctacgacgccatcggcgacgtggtgtcggagacggtgaagaagtcgctcaaaggcgccaccaccacgcagaagatcgaccgcgtggtcacgaaccgctggctcggcatccccatcttcatcgtcatcatgacgctggtgtactacatctccgtatccaccgtgggcacgctattcaccgactgggccaacgacggcgtcttcggcgacggctggctctacaccggcaccgagcagtacgacgaagcggtcggcgtttgggaagagaacatgacagccgccgaggaagccggcgcaagcgagagcgaactggcactcttagccgaagaggagcccgatcccgcagagttcggcttctacctcccaggcctcacccccgtggccaccgaggcgctggagtccatcggcacggcgccgtggctcacgagcctcgtcgtggacggcatcatcgccggcgtgggcgcggtgctcggcttcgttccccagatgatcgtgttgttcctgttgctgtccgtcctggaggcctgcgggtatatggcgcgcgtcgcgttcatcatggaccgtatcttccgcaagttcggcctgtcgggcaagagcttcatccccatgctcatcgcgtcgggctgcggcgtccccgccgtcatggccacgaaaaccattgagaacgagaaagaccgtcgcatgaccatcatgacgacgaccatgatcccctgcggcgcgaagctgcccatcatcgcgctcgtgttcggtgccatcgccggcggcgatgcgggcaccacctggtggatcgcgccggtgttctacttcctgggcgtcatcgctatcatcgtgtccggcatcatgctgcgcaagaccaggatgttcgccggcgaggccacgccgttcatcatggagctgccggcctatcacgtgcccgccgtgaagaacgtggccctggccacgtgggagcgcgtgaagagcttcatcgtgaaggccggcacgattatcttcctgtcgtccatcgtcatctggttcctcatgaacttcggcttctacgaaggcgcgttcggccttctcgacacggagatggaagactacatccagtacagcctcatggccggtctgggcaacgcgctggcgtgggtgttcgcgccgcttggcttcggcaactgggagtccgccgtcacgtccatcacgggcctcgtggccaaggagaacgtcgtggccacggtgggcatcctcaccagcctgggagacgccggcgaggccgatccgtccatgtggatggcgttcggcgccctcatgggcggcagcgtgccggcgatcatggccttctgcgccttcaacctgctgtgcgccccgtgcttcgccgctatcggcaccatccgtcgccagatggcgagcgcgaagtggacctggttcgccatcggctacatgacggtgttcgcgtgggccgtgggcctgatgatcaaccagttcggcatgctgctgggcggtggcgagttcagcgtgtggactgccgtggccgtcgtggtgctggtgggcatgctgttccagctgttccgccccctgcccgagtacaaggacaagggcggcgcgccgcaggccgaggccgagcagggtgttgcgtaaggctcctgcaggaaccgaacggcgggcgcatcctgcgcccgccgttcggtgcgttcggacgcgagcgcgtgaggatatttctcgcgaatcatctgtgcgaaaagcaatgcgccggaaagcggcgccgtggaaaggaggcggctcgtgctgccattggagataagtccggcaaccgtcatcatcggccttgttatcgtggtgttggccgtgctagccgtgcgacgcctggtgcgccgcggcacctgcgactgccacgaccacggaggaggcccggcgaagggcggctgcgcggcaggaggctgcgctgggtgcaccgggtgcggagtcgcagatgccctggtcgccgacattgagcgcgccgccaagcagggaagcgctcggtaggcgctcggcaggcgcagggaaatccaatatatggaggaattgtaaaccaaggaaaactttgccttgaccatacgtgtaagttagcatagactaacaaatgtcagaaagcgacagcgaaactttcccggcgcaaggcaggcgccaaaggggaaggctcgagctctctgcctcctcttcttgctgacacggcggcgaaggctcctctcgtctggtcattcgccgcacagcatcgccgacgggggatccccccctcttcccccgtcggcactcctccctttcagcctcttctcatcttcgccttcggcgttctctcggatctgcgttttcctgtggcaggctgtcaaacttcgcggcccaccgtttcgagtgcgaccggccgcgacactttctgcctcccggcgtgcaacgctcggggactaccgggggggggctgatgccgccctttcggagggggcgaggggtgtggtaccatgggcgaggcgcgaaggagggttcctgtggaaaaaatgtccatgtcgcacgaagattatctcgaggccatcgtcatgttgggcggtacgacggaggcgtcggtccgttcggtcgacatcgcgacgaagctcggcgtgtccaaagcgtcggtcaacaaggccgtgacgtccctgaaggagaagggcctggccgaccagccgtactacggcgacatcacgcttaccgaagagggctacgcctatggaacgtcggtgctcgaccgccatcacatgctgttctcgttcctcacgaaggccctcggcattcccgaggagcaagccgagcgcgaggcgtgcctcatggagcatgccatcagcgacgagtcgttcgaaaaatggagttcttatattaagaagctcgatctctagcccttgagaacgccgccctcgagcggcgttttttacggtttcacccgcgcttcgggccgcgattcaacggtttctcaacgggccggctgtgcgcctgcgtccggtggcggggcccctgcttctgtggtatccttgagcaagcttctggcattacacccaccatcaacgaaccacgatgctaagaggagcgcactccattgggcaaccaggcgaatatactttcgtttgacgaggtgaaacgcgattcgggcgcaaggcgctcgtctgtcgctgcgcctttgcggccctcgcggaggcgccctgccggcagcgtggagcagggcgtttccgcatcggtgcgcccggccgggcgcgcgggcgcctctgcccgttacgcggcctcgcggcccctctcggatgccgcgcgcatctccggcaccgcaccgcgcacggcttccctcgcaaatcctgcccggccgcgttctatcgtcgatgatttccccgcctcctcggcgcgggccgccgttaccgcgtacgccgaccgcggttcccgcatcgaacctgccggcaccgcgccgcgccgtcgccggggcgcccatgccaggcaatccttcgtcgacctcgacgagcccgacgagcgttccgctgatcgcggcgaggcggaggacgaagcccccgataagcgctcgcgcctgcaggagttccgccgcaggcgccagaaggaccgtgccgacaagaagttcgacaagcagttcggcggcagccgcgcaaccgatgcgccggccgcgggatcgcgcgcggccgtgtacaagggcgagatgggctccaaccacaagcgcgccgcgcgcatgcagaacgacgcagccggcaaggcgcgcacgttctcgctcgcatcgctcaacccgctcgcactgctctcctcgggaaaacagtcgccgaaggccatcgccggcctcggttttgtcgcctgccttctgctcacgtgctggtttttgtacactccgacgcagcagctgtaccactcggtgcgcgagcacgaccggctccaagcggagtacgcggccatcgagcagcgcaacgcctcgctcgagtccgaggtgggcacgctgcagacggacgccggcatcgaggaccgcgcgcacgagcagttcggctgggtgccggagggcgagcagaccgccaacgtgcacggccttgccgccgacgccggcaacgacgagggctcgaacttcacggcgaacatcgtggtcggcagcgtggaggcgcccgagacgtggtactcgccggtgctcgacgccctattcggcgtgaaatagccccgtattcgcgcgcgtccggcccgcacggggcggcccgtgcgaccgaagcatccaaggaggaagcgaccctatggcaacccatctgacggatcccgcgcctacctgcacggcccccggcacgctgcgtcccggccgctatgccgccatcgacatcggcacggtgacgtgccgcatgctcgtggccgacatcgacgaggcgggagcgctgcacgagctgcggcgcgagtacgccatcacgaacctgggcgagggcgtggacgcctccggcgtgctgaaacccgaggccatgcagcgcgtggccgacgtggtcgcccgctaccaggccatcctcgacgcgtgcgagccggaggacggcggcggcatcaccgtgacggccgtggccacgtcggcctcgcgcgatgcccgcaacgccgacgagttcgtggccctgctggccgatgcgggcatcacgctgaccgtcgtgccgggcgagcgcgaggcggcgctgtcgttcgcgggcgcgtcgtgcgacttcgcgggcgagcgcatcctcgtggtggacgtgggcgggggctcgactgagctcgtcgccgggcgggcaggcgaggcgcccgttcaggcgcattcgttcgacatcgggtgtcgccgcgtgaccgagaagttcctggaggccgatccgccttccgacgaggagctcggccgtgcccgcgcgtggatcgccgaggagatgcgctcctacttcgacgacctgggcgccggcgggttcgcgcccgagcgggtggtggcggtggccggcacggccacgagcgtggtggcggtgcacgagcgcatggcggagtacgactcgtcgcgcgttcatcggtccgtggtggagcgcgccgtgctgaacgaggtgtacgcccagctggccagcgtgggcctggacgagcgccgccgcacggcaggcctcgatcccggccgcgcccccgtgatcgtggcgggccttgtgatcttgcaggtggtgctggacctggccggcatgccgtcgttcacggtgagcgagtccgacatccttcacggcatcgtgctggaagccgcgcgcgcggccgtgtagcatgcgttgcggccgccttgccccgtcccgctggcgccgaaagtttgctaccatataccgtgcgcgccgcctgttcggggaagaggcgcgcgaaggcggagctacgtggggacgtggcggaattggcatacgcagcggacttaaaatccgccggcctcggtcttgtgggttcgagtcccaccgtccctaccatcgaagctaacagggataacgctgaaaaaattgcgctatccctgtctttcagcacggcttttaattgtccgaaactggccgaaacataccgaacaaaccgggagattacgccaaaaactcggccttggcccatgcctcgatcaccacgcgctgccagccgtcctccggatcgccgattgccgtgagctcggtgccgtcgggcaccaccttgagcaccgctccgccgggctcgcagcggatgttgagcgcgcccgcgtcggtggccacaatgcgacgccgcggcccgatctccgggccaggtcccgccggatccggctccgggtcgggcgccggcgtttccggggccgtggcggcgccctcggcagctttagccagcatctcctccagctccggcttgcgggcatcgggcgggtactcgacgcccaggtcgtccagctctcgcttgatctcgtctacggtcatagtctctccttagggccatcgatggtagtagttgctacgcagatcgtccttgctcggcgcgcgcacgagctggtaggccgcatcggccagcatcagcaaggacgcgacgagcagcacgccgctcataatcaggacgccggtcacggctacgccctcaccaggtagcgctccccgccgacaacgccgacggcaatgtacctgacggcgcccgaccaggccgtgtagcggccccacaggtacccgtccgcctcggtgctccaggcgtcgagcaccacgggctcgccctcgtcgtagccggcaaccacggcgccggaggtggacgcccggtcgcgcacgttgaggtggtcggccaccacgcggtacgtgccggcctcgaggccggcgggggatgcgggctgcgcctccgagaggtcgccgtcgacgtatgccaggatgccgtcccacgggaagtcgtagtagtcgcgcacgaggctctcgcgccccgtctggtcgcccacctgcccgccggtgatggtgccgtgctcgttgatcaaaaactcgctcaacttgtcgggcaccgccgactggcacatggccgtatgcttagattcgttgaggtacacgtcgccgcgctgcgcgatatagccgtcgcccatggggtgccactcgaaaagccccgagccgacgaacacggcgcgcatgttgctcgtgcatgaggcggcgtccagcgcgccctcgtaggcgctgccgcgcagggcctcccgccagcagtcgatgacggaagacgcgcagtcgcggtcgccgacggcgaacggcgcgcgcacgccctcgcactcccaccattccacggggcctgatccccacctgccgtcgccctgcgtgtagccgaaccgggcatcgtccacctggcggcggtgaaacgtcgccgcaacgttggcgcgatcaggcatccggggcctccttcttcggcacgtcctgggcagcaggggccagcgccgcctgcacggtctccttgtccgtcgaggttgccgtgacctgcttggtcgtataggtcatgttgctcgcggcgctcttgccgtccacgtaggcttctgccgccgcgtagatagcggccgagagcatggtgcacaccagccccgtggtggccaccgcctcgttgtcggtggcgaagcctgcgatgctcgtgccaatggaggctaggcccgcggctgcggccatccagaacttgcggctcttcagcttgtacatatcgtcactccttaccttcgttttcctccgactctaggtcggcgatgatcgagtgcttgcccttgatgcttcccggcactttgcgccccttggccacgcgatagagggagaacgtgaccacctcgccggcgcaaaccgcggtgacgaacgtccagaagcctgctgtgaactgctcgaatccgtgcacgatgagccagacgttggcgccgcacaccgagacgatgagcgcgaagatgaagagcagtatgaggtcgaacttgctcattgctcacctcgtaatgacggcgaagagggccgtgacgatggcgccggcacaggccgtgactatggcccaatagagcttctgcagctgcgagaggatggcatccatccgcgccagcagctgcgttttctcaaaatcccgctgctccaggtcgcccacgcgcgcgtccaagcgctcgaaatgctgctcgtgtgccgtgtgatcctcgcaaaaaaccatgggtagcctctcgcctcggtgtcttgccccgcatgttcgggtaggtgtcacaacgcccgaggtcgcgcagaatcccacgctcgcttacgcttgggaccgcgcgaaaaagcgtgggattcggacgagggaagagggcaaaatgaagttaggggcctattacaacgaaacttatgcactgcgttatctgtctctgtcaccgagcacggtgcaggggtacgagagcagctatcacctccacgtcgagccgcagtgggcagattgggaaatgcacgagataagagttaggcacatcaacacgtggcttgcgaccgcctttattgacaatccgggaggcgccgagaaagcatacaaggtgctgcgtcagatactccgctcggctatggctgacgagtgctatcccgatgacgtggtggatcccactacgcgcggcgtgcggttgccgagaaagccatggaggggcgaaccgcagcatctcacacctaaggaagtcaagaagctgctgctaggcgtgcagggctgggagtacgagccggtcgttgtgtgcggcgtttggatgggccttaggcgttgcgaagcgtgcggcctacaatggggcgatatcaacctcaagaccggcctggtgcacatccgccggggtcttcaatacatcaaggggcaagtcgtagaaaccggcgtcaaaacgcaccgatcaatgcgcccacacatgctgccgcgcaccggcgtgatgcgcatgcgcgagattaagcgcgagcgccgcgctaggcccaccgactggattatgggcgtagagttcggggtggacgttaaccccgaccgctacgcccgccgcctgcgcgccttctgcaagcgagagggcatggcacacgtcgcgccgaagtacttccgtcatacgttttcaaccaaccatgatcgcgctggcaccaaggacgaatatatccagaagatgatgggccacgaggagttccagacgacttaccgctatatgagcctcgacgaagacgtgctacgcgaggctcaacgcgctcacgagcggttgattcttcgtgcgtagcattcggtatgccaagactttctcggcctaaggtttcgatcagccaaaaacatgaggatgccgctcgctgccggatggtctagttggtcggtaaatgcatttgatgcgtttaccgatattccgctggacaagatcgccgttgccatccccgttttcagcgcagctgaaacgaggagcgaagggtgccaatgctcatggaacacatggggcaacaacagcaagatcgagatatacacaccggtggcgcagacgctttacttcaacctcgccgtaatttggtcaacgtagccttcggtagcccacgttgtgatgtactcgggggatgcatccatatcaatgccatccggacaagaaacatgggcaggcgtaggggtccattacaggcccgacaaggcgcaggcgttctcggccacgcctatgctttctgtcatccaaacatcgaaattcgcaaaggagaacatcagccttgccagcatcgacacaaacggatttgttatcgatgcctacacacccggaagcggcgggacatactcgtttcgatggatggcaataggcttcaaaccggaggcgtagccttcgacgcttgccgaaggctacgccgtcaaccagcacgcatgacagatgatgttgttgtgctccgcgatcttgcatatcgaccgcacgcgcccatcggcgtggaagttgcacacgccctgcgagtacgagaacgatgccatcgtggctggcacgtagcccgtatcttccgcaggtcgaaacccatccggaatataggcgtaaacgccatcaaacaaagacggctcatgaaaccttatgtgcatgttacaaacaaccagcttgccgaactttcgcaggtcaaagttatcgatcgaccagaagctgtcaaccacggttccgcttgcgtgggttaccgaaggctacgccagcttgccaacccagacaagctggtagttgaagtatttgccaacggccgaatcgccgtttggccatgcgacgatattgatggtgtcgacgtccgtccggtcgatataagcgttgagggccatccagctgtcttcgcgcatggacagcccggcgtagaggcacgactcggcccgtttcggcaggctcacgaccttcctgttctcgcccgctttgagcagcgtaaacgagtcccaaaacgtgaggattgcgtagttgtcaggcagttgcaggatgctccagtggccccctagatcggcgggggctaccgaaggctacggcaggacatcgacggcgacggagaacttgcgtgttgctgttgcgccgaggttgaaccacgagaagaacttgaagtttaccccctcgccgcccgcgtcgacgcagccgacccacccatcctttgcggggtcgcaaagcgatacggagacggcgatggccgacgaggccctagcgggatacgtctcggtcagcgtgcctgatgcatacaccgcgccggcggtgccgaacgagaagctcttactggccatcttggtatagcgcacgactcctccgacgttctgcctcgtccactcgccatcgggggcatgggttaccgaaggctacgccacgtgaaacgcgacctggccgaagcacgcctcgccgcttacggcctctccctgggcatgcaccataacctgtccgtcggggtaggcggcgaggtggacgcccctcatgccggtgttggtttcgagcgcgcccatgcacgtcttgaggggacgcatgccctcggccaagtcccatatcttggcgcctccccaggcgccggcggtggcggcgaacccgttgagcgacacgaccaccatcccagcgttgcgggtgatgacgaagccgtccacgtccgtcggggctaccgaatcccacgcttctttagccggggttaacacatcgaacagctgtaccggagtgccgaccgttatgccgtttagggggattcgccacaggggctgctcgttaacgagggcggcgccctccaggatgtcgccgcgcgtgcatgcgggatccgcgggcgtgccggtagtcggcgtgcccttgatcaccttcagcgcaacgctctctacgttgccgttcttcgcgtcgcactcgtagcgggccacgatcaggtcgttgcgcttctgtccttgcgtgccgttctggatggtgagatccaccccctccgcgtctacgagccagtggcggccctgcatgagcccgtgcccgctcgcgacgtgggccttgttcgccgtcgtcatcgtgcacgccagccggtcgtccaggtcgagcacgtactcgcccttgccggcgatcgccgcgtagagcgcgccgtcgtctgccgagtcgacgtgcacggtgcccttcttgcccgttaccagctcgatggccatgatcatgcctccttcggggtcgcggaggccatgaacgcgttgaactcggcatcctggcgctcggcgagggcgcggtactccttgtagcacgcggcgcacagccagcgctcgatgggcgtgccgtccgcgcgcacgcgctggatcttgtgccactcgctggcctgcggagcggtgtccttgaggtatgcctggtcgttgtcgtgcgccgggtcgcggtcgcagtcgtagctgctgtagccgtcgtctttagccatggtctctcctagctctttcgtgcccacaggtacccgtggggccattcgcggcgctcccagacgccgccgtacttcgcctgggggcttgtcggtgactcggtccagtacaggctctggggcgggtaggcggccaggaacgacgccgccccgccctgctccgcgctcagcgtgccgtccgaggctaccttgaccgtcacgccgtcgggcttgacgaggccggccttcgtggccgtggcgacgtcggagggcgccttggcgctccatgccgtcttctcggcgtcggtcgcgaagcggtgcgtcgcgtcctgcgcgatcatcgcggcggggtgggttgcagggtgggagtacttggtgtcgggcggcacggtccactcgccggcggcgttgaggtagcgggtcgcgcctccggccgccggcgccggtacgaggccggctttgcctgctgcagagcccgtcgcgccggccatggggccgtaggtcgtgttgctgtcggcgccccagacggccgttccgtcggcagaccagcgcaggatctgcccggaggccccgccggcggggatgtgcctgcttcccggggccgtggggtgggtgtacaccgtgttcgtgtccgggggcgtctgccacgatccatcgctgcgcaggtagcgggttgccgcgcctttcgcaggggctggcgcgagcccggcggtgccggccgccgaggccgtggcgcccgtcatgatgccgtaggtcgtgttggtgtccttgtagtacggcacgcctccgatgatcggcgtcggcgtgtagccgctcgcgctcgtcaccgtgctcgttgtcttgacgccgcccagcgcggcccccgccgtcggcagcacgtaggcgttcgcgttctcggctacgccgtcgagcttggccttgtcggcggccgcgaggaacccggccgtcttcgccgtggctgtcgtgtgtccgtgcgacgagcccgccgcccccacctcggcggcagtgtatgacggcttgctcggggccttggcccacgcatagacgtccgaggcgggcaggctggcggggaagtcggcgatctgggtcctcgtgtggccatggcccgcgtcggctttgcccgccagcatcgcgtccgtctcggcctcggtgtagtagcgttcgtcgtgcacgtgctccagcgcggccttgccgtccgcggcctcctgggcccgtccggcggccgccgaggcgttgctggcgtctttgcgcgcctccctggcctcgtcctcgacggccgcgaggtcggcgaggccgacgtcggcgcttatggtgctgcctgcgatcgtgatgttggcgccggcgacgtaggtgcggcccccgccgccggaggactcggcggtggccgagagggacgaggtgcgcgcggcctcgccgatcatgtagctctcgcgcgcgccgtggcggtcgaccgtggcggccttccccacgacgggcgcgctcacgaagatgccggtctcggcgtcgtaggcgcccacgatgtcccccacgtcgtagctgtacccctcggccacgtcggcgtcgcaggtgtcctcgttctgcagctcctcgagcttcttgcggccctcctcggcgagcgtttcggcgtccgcgttggtgtagtcgtacttcgccgcccgctcgtccacgccgaacagcgtctgggtctgcgacacgttgccctcggcgtcggcgaagaagtgcacctcggcgcggtcggtcagctcgccctcgccgacgcacaccaggtggttgaccggccggtagcacttggccatgtcgaagcccaggcggtcggtgtcgagctcgtctgccgccgaccagtccttggcgggcgcggccgagagcaccgcgcggtccccgtcccacgagaccgcgagcttggcgccggaggcgcgcagggcgccgagggcggccgtgtaggcgtcggcgaaccgcacctggtggtcgagcgctatgccgctgttggcggaggaggccgtgaacaggtcgcccaggcccacgcggtggacgagcgcgagcagcgcggcgttcgcctccccgcggatgcggtagtgggtccggccggcgtcggggcacacgatcttgccggcgagcagcccgtgccacgtgcggccgcggtacaccgcccgcttgcgccgcggccgcttggcctccacgccgatctcgtccacgatgcccccgaactccgtgccctccatgtagacgaggctgcgcggctcgatggcggggcgcgacgagagggggcaggcgagggcgaagctgttgcgggtcgccggcccgtgctccatcgcgagctcgtaggcgacgaccacgcccgcgtcgcgccagcgcgcgtcggtgtaggtcagatcgtccacttgggcgcgctcctctcaacgtaggcgcggacctcgaagccgaacgagttgtcccatgcgaccgcgttgtagccgggcgccacccgctcgaagacatagctgcccgagccgcgcgcgccccgctggcgcaaggcgtaggcgtcggtcgcgttgccgtcgatgtcgtagagcacgaccgacttctcgcggccgtcgacgacgagcaggccccccgccggcacgtcggcgtctaccccgtagcggttggcgccgatccacacgtagggggatttggccggcccgtacacggtgatgcggcaggcggcggtggagcgcgcgtccaggacgtagcccttgaccgtgcgccgcgccgtgtagtcgtagggatagtcgcaggggtagtccttgccgagggccggggcctgcccgctgcggtcgatcgcgaagtcctgcgcctgctcgcgcgtccacaccgggtcgggccgcagcagctgcaggcgcgcctcgaagtagcgcccgtcgaaccaccaggcgtccttgccctgggccgtgcagaggcaccgcgtgtaccattcccccgcccgcagcctgccgagccgaccctcggccgcgccggcgtccaggacgtcctccaggcggttgcgcgcctcgacgccggcggcctcggttggcgcgtccacgtacacggtgagcgcggacgtcgtgggcgcgcgccgcgcgccggaaacccggccgttgacgagctcgcactcccatgcggagtccaggacgtccaggtcgccgaagcggtagacgctcgtcgggccgaactccagcagctcgccgtccgggctctcgtaggccagggtcatgtcggtcaggtccatccctacctcgccatctcgcgggccagctcccgggcgttggccacgtacgcgtccacctcggcgggcacgttctcggcgatcgtgcggcccagcgaggagcgcagggcctcgatctcggcgcgcacctcgcgcacctcgcgcgccacctcgcgcgagcccgcggcccccgccgcctgggcggcgaccggcgcgacgggggcggccatggcgcgtgtggactcgatgcgcgccgcctggacgctgccgagcggcacgccgaggccggccgaggccgaggccacgttcgctcgcaggatcccgagctgcgcccccatgccccgcgcggccgcgacggtcgcctcgcgggcggcctcgacgctgcggcgcgccatgtcggcggcagcggcggcggacccgccggcctcgtcggcgatgccgagcgcgtagccctccgtgtagtagcggcctacctcgcgcatgaccttcgacggcgacgcctcgttcagggcgctcctcgcggccgccaccgagtcggccgccatcctcgcggcggcgctcacggcgagcgactgcccggccgctatgccctgggccatgccggccgccatgttgtagcccgcccaccaggcgtcgccgttgctgctcgaaaagtggtctgcgacctgcttgctgaccgtccgcgcagcggataccgcgctgtcctggccgctgccgataccctgggcgtaatgctcgccggccatgctccgcccggcctgctgggcgtcgcccgaggcgctggagaggtggtcggccgtctgcttgctcgccgcatcggcctcggccacggccccgccagccccgtcggccacgccgtcggcgtacgactcgccggtgccggagccgctctcgccggcaggggccgcgccggcggcgaaggcggcgttcgccccgtccacggcggccgctgcggcggcgcccgccccgtcggccgcgatccccagctcggcgagcgccgcgtccttcgcggccgccgacccgctcgcccacgcctccgcgagctctggcagcttgccggaggtgtcgtcgagcagcgcctgcacgatgggggcgtactcgactcccattgacgctatgtagcggacgaactgcgcctcgctgtcgctgccggcccgagagtagagcgccgtgatgttgtcggcccagttcttggtggcgtcggcgttgtgccgcagcgtctcgagcatcgagccgagcgagacgtcggaggcgtactcgatcttctcgaaggcgtcggcggcgccctcggcgtagccgtcgatggccgaggtcaggtcgtcggctgacaggccgcagtccacgagcttctgcgcgagcgtgtcggcggagaagccgctgtccgcgagcgcgccggcgaacacggggttctccgccacgtactcccgcagggcctcggcggcctcgcccaccttctcggcgagctcctccttcgccttggcggcgcgccagtcggcctcctcctggacctcggtcgcctggatctccacgccggcggcctcgccgtacttctccgcggcctcggcggccgagagcgtgcccgcctcgacctccctcacggcctttgcgagggcgtcgtggcgcgcggcgttgcgctcgaccttggcgcgcgcctcctccatctccctcgagttctctgcctgggcgtcggtgaggtcccgcaccttgcgctcgaggtccatctggttctgggaagtgtagacctgcagcggcccgagcttgccgtaggagcttacgctgcgctccacctcggcgtcgagctccgcctgcgcggtcgccaggtcgtcggatatggccgcgccgtcctgcatgaggtccaggtacgcctccatcgcctgggcgccgcgcaggcggccggcctcggccttgccgagggccgatatcgcgtcggcggtcaggttgacggagtcggtcgcctcgtcgtaggcaacggcctcggttccgagcgcctcgttcaggcgcgctgccgcgcccgcgagctcggccttctgggcggcgtcgcggctctccgcgcccgcgagctcggctaccttggccgagaggttgagcacggcgcccgcctgcgagctcgcctcggcctcggcctttccgagcgatccgataagctgctcgtgggacgcgagcgtgtcgtcgcattgggccatgaactcgcgcacggtctgcctcgacgcctcgaaggaggccgtctcgccgtcgagcgccgctttggcggccagcgcggcgtcggagctctcgccctgcgtgtagaccaggcggtagtactcgccggtgagccggttcacctcgtccttctgctcctgcgaggcctcggtgagccgatcctcgccgcccacgaaaccgtcgatcgcgaacgtggccgccccgagggccgcggtgagtccgacgaacgcggcgatggccacgcccacggggttggcggcgagggcggcgttgagcggcgcgagggcggctgcggcggccctgctggccacggcctcggtggtgagcgctgccgtataggcggcatgcacgccggcgccgatgccggcggcggcgctcgccgcggacgtggcgccgctcaaaaggcccatggccacggacacggccttgagcgcggggccggtgaccgcgatggccacgagcaggttgccgatcatggcaaggcgctcggtcggcgtgtcgcgcaggtagcgcttgaactcgccgagggcgccggtgacgttctcccacttgtgcgtcgactcgtccaggcgcgcgtttgaccctacaagcgcgtcaagcacgcgccctatggcgtcggtcacgccggagaacacctttgcgagcagggggatgatctcggagatctccgtcacggcggccgtgagctggcggatgcgcttctcggactccttgtagccttcgtcggtttctttcagtgtcgggttgatgccgacgagcgcgagcgagaacgagcgaatggcggtgtttatgctgtcgaaggcgcccgtgagcgtgccggccttgagcgaggccgccatgccggccatggcgttggtggcgccgttgacgccctcggtgccgtcctcgatgccgctcgtgagcttggcgatggcgtctgcggccggcacggcgccctcggagatcatggagcgcatctcgtcggtggacacgccgtactggttggcgaggatcttgagcgcctgcacgccgttgtcggagagcgagttgatctcctccatcgacacgcggccggagttcgacatcttggcgaaggcgtccgtcacgttcttgatgttctcggccgagccgccgaagcccgccacggcgtcggtcgtcgcctggaggatggccttggtggtctcggcgtcgatgcccatgccgacgagcttcttgccgcactccaaaaacgtttcctgggcgtacgtggagcccttggcgatgtcgagcagcgaggagtacagggcgcccgcggcctccttgccgccgagcatcgactcgaacacgatcatcgtggtctcgtagagcttcgtgaagttgaccgccgtgcgaccggcgagggcgccgacggcgaccagcggggcggtgacgcccaatgtgatggcggtgccggcggcgccggccgccgaggcgaggcggtcgaaggactgggagaagccggcgtcgatcgacgaggcggccctctgcgtctcggccttgagacccgccatcacgccgtcgaacgacgaggtgtcgaccccgatgtcgaagatgactgcctcgccggccatagccctcctagatgtccagcgtcacctccgcggcggtcctcggcggtagcgcgatttctttcttccgggcgcgcagcagctgccgctcctcctggcttctgcagtcggagaggtcgcgggcgcgcactcccatcgcctgcatggtcaaggaggtgtcaccgggcagcccctcgaggagagccatgaagcgccaccagtggacgtggagggacgggtcggcgatgtcgaggccgtagaaccgctggaagtcggccacgaggcggctctcgtccacctcccagtcgaagacgcggggtccgggcctgctctgtttcctgatcctcttcggcgcaggttcgccgcggcggtagaaccggatcgcggcctcgaagagggcgtcggcgtcggcgcccgcgggcagcccgccgaagtagtttcccagcacggcggcgcgggcgacgggatccgccacggctggatcgtccaggatcgcgcccacgcgcacgccgcagtggtgcgaggtgttgatgggcacggccctgcctccgacgtccaccgccgagggcaggccgtgcccgatgatgctcacgacccctgcgaggccagcatctcggccgagagctgcgcctcgccgggcagcagcgcgtcgatctgctccatcatctgccggccgggatccagctcgttgaccagcttcatgacggccgtgagcagcagcatcgagttgaacatgtcgggcgcctcgcccagcagctctcgggccgcctcgggcccgagcgcggagcggacgaggcccgtgctcttctccgtgaggtccccgtagtcgtagcgcgcgtcggcgagcccccgctccccgatctcgcgcacgagcccctcggccttggccacgaacgcgggatccgagatggccacctggtaggagcccacctcctcggtcgtgccgtcgggcagcttccgcaccacgtcgagcgtctcggttgtgctgaccagcgttacctgcatttgcttcctcctcttctcggtttcccttacccctgcgccggcggcgtcgccggcttggcggtgaacgtcttcgtcttctcgtcgaacgtgccctcggtccagccgtcggaggtcatcgagagcgttcccttggccttgagcgcgccctcggcgtcgccgtcgatgggggagagggtcatggcgaacgccgcctccttcgcggtgctcgtgccgtcggggaagcgccacacgcgaaccaccgaggtgggcacgttgatgtcgtcctcgtgcttgacgagccactcctgcagctcctggccatccacgatgtcgatgtccatctcgatgttcgtcttgcggccggtcacgtacttggggttggtcttgttgcatttgtacttaggctcgtagctcgcgtcgttgttcgaggggttgaacccctcgtcgtcggtcacgagcacgtacttcgacgcgccgctcgcggcgtccgccacgtcgacgtaccactggtggtcgtaggtgtagctgatggttcccatggtcatcgcctttctcgtgttcgcttgaattctgtggcaaacgtcacctgccaggtctcgtagtcctcggcggcatcgcgcatggtcggcgtgccgtcggccgccgtgccgcggaactcgcagcccgccggcaggtcgggcacggcgtcctctatgcggtcggtggcctcctggagcacctcgaccgccccaacgcgctgctcggtgtcgcgcacggccacgcgcaggtagagcgcccagcgctgcacgcccacccagtcgccgttcttgtacctcttgcgcacgggatcgcccggcagcatctgcaccatggccgccggcagctcggccggcgccgtcgggacgatctccagcgtggtgggcgcgtccatgacgcgctcggccatcgtgtagagcgcgtccgccactgccctgatgccctgctcgtcgctcacttcgtcctcctcgctatcgcgtcggcctggcgcttggcgatagcctgccaggccgtgccgttggcggcggtcgacgcctcgtcccagcggcacgtcgcctgcgggtgcatgtcgcgccgcttgcccggcaggccgtcgtgctgtgcctgcgcgtagttgttgaccggctcgccggtctcgctgttgaccgtgttgccgtagacgatgcggccctcctgcaggtccgcctcgttgacgaaggccgaggtggcgagtgacatcgtgcgcgccggcacgtaggggtcggtgtcggtgcggatgacgtcggccatgaagggcaggagctcgtcgtgcatggcgtccgccacgcgccccaggcgggagaagtcggccttcttgagccccatcagaactccgcctccacgtggtcgacggacgcgcccatcctgatcgcctcggcgaccgagacggtcagcgcgcccttcggcggctcgggcgacgtctgggcgcccagggccaccatgtcgcgcggccggagcgtccagcccgccgagcccggggcgaagtccgcgggtgccgtgtagcccgccggggcgatgacggccgtcgcgacggccgccgggcggtcgccgcctggcgcgcgcaccgtgcctatcgggtcgaacacgcgcgcggcctcggtgagcacggtgcgctgccacgagacggcacggccctcgccgcccaggcggttgtatacggtgacggtatcggggtagagcaggctcatagccaccgccccctcttgagcgcacccgtgccgccgagccagcgccggatccccgcctctgccgtgagggagaacccggcgcctccgaactcctggcgcaccttgccggccgtgtaggagacgagccttcgctccgtgttgcctgcggcgtcggccaccgagcacaccgccatcttgacgcggtcctcgatgggcgcgaggtcggcgcccggccacagcgcccacgacacctccgcgagcgcgtcgggcagggcggccccgaaggccgcctcgcccatcgtcccgtggtagacgtccgcgtagtagctgtagtcgggctctatgtcctgcagcaggccctccacgacctagccctgcgcgggagtcgcggccttcggatgcagcacgccggcggccttggtcttcttcaaggcgcagccgcagacgaactcgctgtcgccgctcttgacggcgcccggcgcgctccagtcgggcagcgccacgttgatgccggagtcgcccgtgagcgtgatgccgtggaactcctccaggccgaagcagatggcgtagatgtcgttggtggcgagcgcgccgtcgcgcagcttctcgatgcggatgccgtcccagtgctgcacgcgcttgccggcgtcgtccatcgtgagcgactccatgccgatgtagcggcagatggcgttcatgaccgtggccatgtgaggcgagacggccagcacgtcggggtcgcgcgtgagcgaggcgagcagcgtgtccatctccgtggcgaaagcgagcgccgtcggcttgtcgagcgccgtgaggtccacggcgctcgtgaactcggtgctcgagtccttcagcgccttggccaggccgtcgaagcccttctcctcggtcgcggtgtcgcctgcgatcagcgttgcgttgaacttgcggatgatggcgttcttcgactccgccaccttgagctcgtagaggtcctcggcggcggtcttggccacacggtccatctcccacttgctcgacaggatgcccggcttggtggtgacgcgcttgatcttgacctcggaggccttgggctcctcgttgagcgagcggaacgcggcggaggcgccggtctcgacgcgcttgtaggcgtagacgaggtcggacgtgccgttcgcggacaggcagtcgtcgaacggcatcatgttgaggatgtagctgtcggtgatgagctcgttgatgaagccctgcttgagcttgtcctgcgagttgatggcgagttccgccaatgtggtagccatagatgctccttacttcttcagggccgcgaggccctccttgatggtctttgccgggccagttcccggagaccctgcgggcgctgcgcccgtcgtcaccgtgggcactgccgcggcggccttgaacaggtgggggaactcggctttgatcttggccacgtccgcgcccttgggcgtgccgtcgtcggccagctccacgccgtcgagatcgacgtgcgccatggctccgacggtgtcgatgcactcggccgtgagcagcgcgcgctcgaccgcccagcgcttcgcctcctcggcgtgcctggcgttgatcgcgtcgatgtcggcctgcgtgtccgcgacggcctgcctggccgcctcggggtcggcgccgtccagcttggccaggcgctcgccgatgggcttgagcgcctccgccacgatgcgggcgatctgctgctcctggttcggctggcccttggggccgccctgctcggtctgcgcttccggttgcgccggcgtcgcggccggctcggctccgggctgcgctgccggagcggccgtggtcgtggctgccgttgctggtgtcggtgtcgttgcggcctgcgtcgctgcttctgctcccaattcctgctccttcgtcgcgtttggtacgcgcttccctgcgcgcttgacggcgcccctctgcgctcggggcgtgcggatgctgcgcctctgcgctcggcgctcgcgatggctgcatggtgggggaggtgtcaccggggcgcaaaaaagccgccctggaaggcggctcgtgctactagtatcttttcgtccagggcggagggtatcctatgccgtaatattctaaagcgcttttgcggaaccacaggcgcttgagttctccagagcccgttctaacccagcttgcgcccttgcggtctgtgaaagccacttcgactgcaagggcgcgattcatagaagtgtctatgtgaccgataggttgttcgtgacgtcccggtggaacggtcggatagacgaaccgttgcgtgctgtcgtttgcttctgatcctcgctttggtcccgcaccgtaaaacagcacaacggttgcgatgacgttatagatcaggtctccgctgttgttgcttattacggccgtcatccctccctgcgggacgaatctccggtcgatgggaccaggatcgggcgcgttcgcttccttaagccatgcggatatggcggaggcctgctccctgctggaggcaaggcggctcttaatgaacgacgtggcgagttgcaagagcgtcagcgcgagtgcgacggcggcaatgatgttgctgaagttgagctctccgttgaattggatttccatggagcgctcctattcgtcggggagcgagacgatgacgcttcggcacagctcgccgtaggcgttgagaccgtcgcctgactcatttatcccgcgcagctgcaactcctcgctcatagcgtcgtcgatcgcgaagtactcgtcatcgtccaggttcgagaagtcggtcggcaggccgaagcgctgcagaagctcgatttgctcatcggtcaaggccatcccggatcctcctctcgtatttcctccgcgtcttggagctcgttctgtatgccgtgattatagcacccgtgtccgggttggccacgacggtcgcgacccgtccaacgaccttgcgcgccttacggccgtcggcaccggttttgacagggtcctcgtgcagcggatgagcaagcgcgttggctacttggaggtcgctgacgccgcgctcggcgagcctttgcctcgcatggatcgtgatgcctggagccgccctgagcgcccttggctgcgagtccacgccgtaggccctctcgcgggcgtactgacgcacgaggcccttctcctcgcagtgcgagcgcagcgcggcctgctgacggccgagcacaaggcgcttctggacgtacgtcgagctctccagaccgagcccggcgcgctccatggcggagatctcgcgcttggtcttgcgcacgcgccgctccagctcgcgctggcgctgggtcgcttcgtagtactcccgggcgtccatgccgttgaccttctcgggcagcccgggcagcttggagaggcccggaacgtggacgccgaagtggtggcggcagttcgcgccgcacaggcccgtcacggtgccgtagccggttgcggcgtagaagtcggggtagcgcacgccgcccacctcgcaggcgccgtcgaggcagaacgccttgccctgccactcctggtgctcctcgcgggcgccgaagtgcgccgtggtctgcacgaagcggtgcccgcacgcatccaggcggtcgatctccatgcggccggccgcctggttgacctgcgtgcgcatgtggcgcttgacggcgacgtccacctggctgctggtcccgctgcggtagtccaccgtcttgacgccggcgtccgccaggcgcacgaccgccttgccgatccagcccttcggcatggcccctgcctcggcgtagcggatgccctcggcggccacggcgtaccacgcctcctccgcctggcgcgcgagcgcgacgttctgccgctcgaccatctgccgtatcccgacggcggcctgctcggccatcatccgggcgcgcctcgtggcgccctcgggcgaggcgtgccggaaggcggctatggcctcggcgtcgcgctcgtcggccgcgaggagcgtcctccgcacctctgccatgaccgtctcggagatcttcgcgcggtgctccatgagcagcgtgtccacgtgctcccggttggcggccgccaacgcgccaagggtgctgcgcgtcgtcgcgttgaccacgccggccatgaggtcgtcgacgagggcggccgtgaggccggccacgagcgcctcctgcgcgccgcccgtgatcttcgcggccagctcctcgatgtcgcgctcgccgagcatcctacgccggctccggcatggcctcggtcacgtcgccgtgcagcagcttggcggcctcctccttggtaacgccgatggccgtggcgatgacgttgacggcctggccctcggtgagctcgccgcgctggtactgcgcgatgacgccgagaagcgcctgggtctgcgccccgttgagcgtcttgccggcgatctcctgcaccgccccctggtcgaccgccccgccggaggccccctcgcccgtccactccttggccgtctccgcgctcacgccgtagtacgtctgcgtgtacttccaagcgggcacgaggccggcggcgacgtcggcgcgcatgcgctcgcgctcggtgtcctcgtcctggatgatcgtgtcgccgaacagcacgcacgccttgccggagacgtccggcaggcctgccgcgcagaaccggttcgcgagcgccaccgccttttccgcgagccgggagacctgcgcccccatggcctgctcgtgttttttggcgttgcgcatgagctcggcgttgtcggcgccgacttccttggccgtcttggggttgcctgcctcgtcgagcgagtagtacctcatgccgaagccgcagcgcttgccgagcagcgcgagcgcggtgtcgacggccttgcggttgtcctccacgcgcaggctggggttgtactcgtagggcttgcgcggctccccgcccacgctctcgcccggcagcgccatgaagagctgctggtccctggcccgggggacgaccacggtgccgtcgggcgcggcctggagcatctcctcgggcaggaacagcagcttctgcccgaggaacacgtcgcgccaggcgttgtcgaagctgccgtcggcgagcttgagcgcgcccagggcgccgtcgaacaccgacacgccgaacggcccgcagtcgcggtaggtgttgtcgatctccgggctagcgagcacgaacagggggccttcgatgccggtgcggacctcggaggcgaagccgtccagctccacccgctgcccgttgcccttgaagtgcgccgtgcggatgacgcagcggccctcctcgtcgagcgtgtaggccgtccattgggtgtagggccgccccttgtgcatgatcgcggcgcagaacgcggcctcggtgcagccctccgaggtccacgacaggggcacggtcgacggcgcgtcgtagcggtgcagcgtcacgcgcgtgccggcgtccgccccgccgtcctcccgcagcccgtcgagcccgagggcgaacccctccgtgccgagcccgaacgcgcgctcccagctggaggcgtcggcgaacagccgcacgtccttcgcccactgcgccatccagtcgcaggccgcctgcagcccctcgtcgggctcctcgccgtcatccaggtcggtcacgccctccaggccgagcgaggtgcggtagttgaacaggatgccggcccagtcctcgcacaccatcttcgccgggttgaagctgatgcgctcgaccttgaacgttgtcccgttcgggtcggtctcggcgtacgcgtagaagtccccctccgcgcggtaccagccccaccactcgtccagccggcccttgatgggcaccgcggcggtggggtagccgagcgagcgcacccagccgatgcccgcgtagccgttggcgctgttctccatgctatacctctttcttgtccgcgatcagcggcgatagcgcgtatcgcaccgcgtcgatcgcatggttgtccctgtcggggtagctctcgagcgtcttgccgtccttgtccacctcgtactcgtatgccgagaactcctggtaggcgagggggcagcgcttgcggtctatgacgatcttggcgcgcgtctggagccattggacgccctcttcgacagagcccggccatttggccgcggcgcggcagtcgatgtcctgggcgcggtagctggcgacgctcttgggctcggcggcgtcggcgtacacgcggttccgaggggccctcggcaggtacgtcgggctgccgtcccgatcctcgtcggacagccgcgccttgatgcgcgatgccgtctgctcgttcgacaggcgcaggcccctgtcctcgtcgaacacgtagacggtcttcgtcttgcggtcgtaggcaacgcggacgaagacccacggatcgacggcatagccccagtcgacgccgcagcgcgtccaggcgaaccccgcgacgtcctcgtcggtcagctccctgtcctcgacgttgcggaaaacctcgccgtctgtgcccaccatctcgccgaggtactcgtgccggtaagcctgctcgttgatctccttgagcgcctcggcgtcgtcgacgaacgctcgcccgagccattcgggcggcacgtcgaggtaggtggagcggtggacgatcttgccaggcgcgccgtcatcggcgaacgcgttgacccagctgttcttcgaccggggcgggttgtagctgtagaagcgccagaaaagctcgccgccgcgggtcagcgactggttgacgctgcggatctccgcggcgccggagaactggtcggtctcctcgtaccagacgacgccgacgtagccgaacggcaccttgagcgacttggccttctccttttcgtcgaggcccaggaagctgatcgtctggccggtgcgcctgtgcctcatctgcatcggggacaccgtgcagtcccattcgtcggccttgcccatcgccgagagcgcccacgacatctgcgcgtacaccgacgtcctgagcgtgcgggccaccttgcggaaaacgacggcgtggacgtcagggtgctcggcgaggatggcggggatgtgcagcgacacgtcggaggacttcgccgagccgcgccctcctgggaacacgtagtcggtggcgtcgtgcgccatgatcgcgcggtggacgccgttccatgcgccgggtatcagcagcgcgaagtcaacgccgaagggtcgctcgtcgggttccgtggcatcgatctcgcgctcgacgccggtgtagcggttgaggcggtcggcgctgtccatcacggccctgtacgccggggacttcttgacgaagcccaggtgctcgatctcctcgatcgccttgtcgttgacgattcgcatacgctccgttgcgagcgcgagggtccatcgcgccgcttcggcggcggccttgcggccctcctcgacgattagggaaatctgggggtgcttgagcttgcgctgtgcctcgacggcaatcgacgcgggggacatgcgggcgcagctgtacccggccgccctgtaggcttccgaggggttcataccggcgacgatcgcgtcggcgaacgcttgctgcttggggttgagcttgtccttggccatggcgcccatcttgcccgacgcgtcacatcgacgcgtcacatgggagcggcccgcgggaaggggggaccgcgggccgctcgagaggagggtgccggcacgttgccggctaggtgcatggtgggggaggtgtcacctgccgaggctgcatgagccaccatccgacaggcttggctcccaaacctacgtcccaagccaggttgtactcgaggctcgccccacggctgccctgccacccgtccagcatggccacggcgtcgcaggccatcatggcgcggatcgacagccgcatggctgcgtcccacgtcgcgtccggcggcaccgtgtcgtgcgggatctccacggcgcaacccagcgcctcatgcagctcccgcgcggcggcctcgaaggcagggcgattgttgtcctcgatgcccgtcaccgggccgatgacaaagagcctcatagccccgccttccggcgcatgtccctgatcgtctcgcggatctcgcactcgaggttcgctatcgcgctgttgatgtcatccgcccagtcgagccctacggcatcgatgacctgctgctgcaggttgtcgaggtcgatccagtcgaatattccctccaacgcgatgatctgctcttcggtgcatgtcccgctcatcgctctccctccttgcactcaatgcagtacttccgggcattcgacgccgtctggaacacatgcccgcacgacacgcatcgaacgctccgcgtggtcttgcacgctcccggatccatggccatgcggtcgagctcgggcttgtgagtcacgaaggcgtggagcgtgcgggcgaatacgcggcttcgcttgccgtgcagtacggcgtcgagcacctgccggtcaaggccgcacgtcctggctatctgcgcgacggccaggccggcgtcgcggtactcgcgcagccaccccgccatccaccccgcgtcgacgttctgcccctgggtgagccggcggcggcccttgatcgtgcagatggcgtccttcgtctctcgcctgtacctctcgacgggcctgcctgtgcgccagtgccgcaccatgatgccgtacagggtggagtggccgacgcccgataggcgctctatctcgtcgatcgtgtacccctgccctcgcagctgttcgatcttcctgcgcacgggcccggcgtcgacgaactgcgagggcctgccgtagagcctccggcggcgcctgtcctcctcgtaggcgcggttggcttcgcggcaggctccgcagcggcagccctgcacgaagcgcccgtggctcgcgcgaccgcagtcggagaggccccgcgtctcctccttgaggcgctcgcgcaggcgcgcctcgcgcaccaggtgcctttcggcgcagtcggtcctcggcctgctcacgccctccacccctctcgtttcttgatcctcttgacttcgcactcgtcgcagtgcggcacgtagcacctccggcacatgcggcacagtttgcccgtcatcctggccgcgagccgctcgtacctcgcggcggccttcgcggcctcggcgtatccgtcgcagctgcagcccggggcgcctcctcccgccgtcatctcaagcccccgtcccggggcacatgtcgcactcgtccgggcatccgtcgatccaggcgtgctccagcgggcagtagaccgggccgtcgcctctgtcggccatgacggccagccatacccggaacttcgcctgctcgtcggtgctctgccccgtgcggatcccgcactccgggcattgcagccgcgtgttgccgcagccgttgagcgtccggttgcccttgatcacgggcgcgcatccgcacgccctgcacaggggcatgtcttccagttcgaggtacctccccatgtcattctcctctctctccgccccgcagggcgtccatcatcgcgtcctgcagcgtgcgcttgcccgccaggacgtccatcacccgctcgtccaccgtgcccttggccaccaggtggtggacgatcgtcgtttctttctgcccctgcctgtccaggcgcgcattggcctgcaggtaggcctccaggctccaggtgagcccgaaccagacggcgatgtgcccgccgtcctggaggttgaggccgtggcccgcctgctgggggtgcgccagcagcagcggcacctccccgcggttccaccgctccaccaagtcgcccgaatgcgctcccagggccttggaggccggatatgcggcccgcaaacggtcgaggtcgtgccggaaggcgtagaacacgagaaccggctgcccctgggcctcctcgacgatccccgccagcgcgtcgagcttcgcccggtgcacctcctgtgcctccccgccgtcgtcgtacaccgcgccgtcggcccactgcagcagcttgttcgccagcgccgccgcgctcgccgccgtcacctcctcgcccaagagctcggtcgcctggtcgcgctcgaagcgccggtactcggccatggccgcgggcggcatctccacctccacgacgttgtccacgcggcccgggagctccagctcgtccttcgcgcgcatggacagcgccacgtcgccgatcgcgcggaagatcgcgtcctcggcgcccggcttcggcgcccagtcgtagaccaagtggccgctgcggcggccgggggagaagtagcgttcgcggtaggggccgatgtagcgccccaggcgctcgccccggtcgacgaggtgcatctgggcccacaggtccatgaggccgttcggggccggcgtgcccgtgagcccccatacgcggcggatcatcggacgcactcgccgcagggccttccagcgcttcgcctggcggttcttgaagctcgacagctcgtccacgatcacggtgcggaacggccagcgcgggccgtaccggtccgtcagccactgaacgttctcgcggttgaccacgtagatctccgccggccgccgcagggccgcctcccgctcggaggcgctgcccaagacgaggctcgcccgcaggtgccgcgtgtggtcccacttggcgacctcggccggccagacgtggcgcgcggtcatcagcggggcgatcacgagggccggccacacgtcctccccgaccgtcgcgaggtcgacgagcgccgtgagcgcgatcagggtcttgccgaggcccatgtccagcagcagcgccgcctccggcctctcccgcagccagccggccgccgtctcctggtaggggtgtaggacggccttcatcgtcttcctccgtcgggcgctatcccgaacgcccgccgcacgctttcggacagcgcttcggcgagagcctcacgcttctccagctggggccgcatcgtgcaggaggcgctccatccgtcacaaggtgcgcccatcgcgatcaccagcatgcacctcccgccgtcgctcgccgggcactttccgctcatcgcgcctcgccccttccgaacctccagcggttgcgcgcccagaacagctgcgcgccggccttggagtcgaccaccgtcaccgggtggccctgggccgcgagccgcgagaacacgcgctgctgcaggggccgggggcgcttcccgggggccttgagctcgacgagggcgtgcgtcccgtcggggaacagcacgagcctgtccggcaccccggcgttgccggggctcgtgagcttgagcacctcggcccccaggcgccggccgtgctcggcgaaggcgcgctccacgtcccgttccgtgacgtcggccgcgctcatcggacggcccccggaaaactaccaaaccaaaaaccaaggcttcgggaaaggttttccatgcgcgcgcgcacgcgtacacgcgcgcgcacgtatgtgtgtgtgcgtgtgtgtacgttatagctatctcttacatatacatataggggttttggttttatggttttcgtttttgcgcttccgcaggtggcgccgcgcttttcggcgaaaccgaagcggaaaccaagccggtgactagaattcaggtttcgcattctcgcccctttcgtaggtcttgacgtacccgtaggcctttagttttttggttttcccggtcggctcccaaccggctttcttgaggatcgccgctatctggtagctgtcgttgcgcgttggtttcgtcgctggttgccggaggcactcgtgccatatctccatgacggacaccgcctcgcggggctccgcggccgcttcggcgccgtccccgcccgccccgaagtcggcccgcagggaccagaactcgtctcgctcctcggccgtgtagccctcgaaccccgcggggacgggcgtgtcgaggtacgctaggacgagcccctcgcgcgggtccgtctccatggcatggcgctgggcctcctgggcggcgcgctccacgtcgccctccaggtagagcgcctcgcccgcggcctccaacgcggcggcctccgcccacacctgggcgacggccgccgcgtccaggcggcggtggtccagccgtgcggtcacccgcacgggccagaagcggcggttgcccgtggcgtcgcgcaggtagccgtcgaggttgttgacggtgccgaccacgatgcagcggcgccggtagccccgcgcgcggtgcttgaaggccgcgcggtagttgtcctcggccgtcgacaggaagctcttcagccgctcgatggaggccttggccatgccgtccagctcggccacctccacgatccaccgcccctgcagcttctcggccgccaccttcggcagcttgacgtcctcgagcgacagcgcgtcggtgaaccactcgccggcgagcttggagaacagggtggacttgccgaggccctgcgccccttcgagtatgagcatgtagtcgaacttgcacccgggctccctcgccctgcgcacggccgcgcagagcgtcttgcgggtgacggcgcgcacgtaggccgtgtcctcggcgcccatgaggtccacgagcagcctgtccacgcgcgggaccccgtcccagccgggcagggcgtccaggtactcgcccaaggggtcgtagggtgccgcgtcggcgaagtgggacacggcgtcgtccaccttggccttgttgacgatgccgtagcgggtctcgaggtagatgcgcaggttcgcgtcgtcgccgtcggtccagagcgcccggcccttcggcacctcgcgccagggcagcctctcggcgacgacccacacggcgtcgctctcggcgtcccggcgcagcctgccagccaggccggggtcgcgggccagcaccagcccgatgttgccggcgctcgacagcacggccccggtgcggggatccttctccaggtccttcttccacgaatcgtcggcctccaggggctcggccaggaagtcgtcgtgggccgagtcggcggcggcgcgcgcgagctcgagcgagacgccctccaggcccgccgcccactcgcgcatcgccctgttcgacggaagcgacgccaccggcgtgtcgggcttggcctcggcgtccagctcgccgaagcggtggatccgcacgaggtcgtaggcgttgcagagctggccgccggcggggtcggtggcgtggttggagtagagccacagcccctcgtaggcgaccgcgcccccgtaggagctgccgcccgtgtacgtccagcgcccctccccgcacggctcgtagacgtcggccaggaagccctcgatcgccccctcgatggaatgggcgcggcagaaggccccgaccgtgcccgccttgccgcgcgggtcgggcgccttgtcggcgcggctgcgggcgccgcagcccgggaggggccagcacgaggcgtcgcgccagtcggggtagagggcgagccactcgtccgggtccagcgggtcgccgccgcactccacgagctcgtagggcgcgtccatgctgcggctgggggcgtacatgagccgggagggctggtaggtcgtcgcgtcgaaccgctccgcccccagcgtctcggccagcttgagggccagcggcacgtactcgtcggccgacacctcgcgggcgagcggcacgacgaggcggtgcttggggctcgccgcggtggaggagtgcgtggggtacatgagcgccttggcgcccacgagcatgaggtagtcgccccagagcccgtcgtcggagctgtcggcgtcgagcacgaccatggagcggcgcgcgaccgacccctggcgccggcgcccgccctccaggtagccggccacgtagcacgggccgtccttggccgcgtcgcgctcggccttggccatggccgcgtactccgcggccgtctcgggcgtgcggcggggctcgcgcatccaggccgcgaactcgtcccatgccatgcgcttgttgcgccacgccttggccctgcggccctgtgccgtggcgacggcatagtccttcggcaacgccctcactccttcctgtagctctcgcaggtgtagccctccgcgcgcaggggcaggcccgtcgcccattcgggcgcggtggcgcccatgagggcgttgacccgccccaggcaccagtccgcccgatcgcacggtacctccactatcacctcgtcgtgcacgtgggccacgatctcgtagccggccttctccaggcgagccatggcctcggccagaaggtcgcgggcgatcgcctgggtgacgttctccacgatgcggcctccgtaggtctcgaccttgagcacgccggctcccttgccggccgcgcggtagctaaggctcccgtcggccggatccacgcgcgccctgcggtagtgcaggctgcgcccgctggccaggtcgatcgccaggccgtctatcgacgggtcgagcctggccctcgcggcgccgcgcgcgaacttctgcgggccctcgcccgagagagccgcgtgcgctgcccgctcggcctcgccccagagctgcttgatgcgcctgttggcgttgcgccacatgcgcaccatcctcggcagctccccctcggggatgcccatcttgagggcccccatgcgctcgagcgccttggggcctccctggtagccgagggcgagcgtggccaccttgccgcgctgccgcagctccttgtcgacccggtcgatgggcacgccgaacatgcgggaggccgtggcctcgtagaccctgccgtcgccgcggaacacttcgagcacccactcctcgccggcgagccaggcgagcacgcgcgcctcgatcgccgagaagtccgacacggcgaacacgtgcccctcgcggggcacgagggccgtgcgcacgagggacttgagcgtgtcctggacgtcgccgaagagcaggcgcacgagccccgggtcgccgtcctcgcgcacgacgtcgcgcgcgacgtccagggccggtccgtggatgtcgccgcgcgggaggttctgcagctgcatgagccgtcccgcccagcggcccgtggccgccccgtagaactggaagcacccgcgcagccggccgtccgacccggcggcctcctcggcgaccgcgtacttcttcacgctgctcttggcgctcgccaggcgcagctctatggcctcgcgggcgagcgggtcgcagccctcgcgcgccgcctcggcctctagcacctcgcgcccgcagctctcgatggggcagccccgcccctgcagccagccgagcagctgcgcgggggagttggggttggcgaggccggtgagggaggcgaggcggcgcttggactcgtgcgcgtcggcctcggccatggcgcgggccgaggccgcgaggcgggcgtccacgcccaccccgcggtcgttgatgcgctggtccagcacgtagagcgcctgctcgcgctccgggatggggccgggcagcttggacgccacctccatctcgcagtccacgtcgcgcgcgcagtaggccacgaagcgctcccagtccccgccctcgaaggcgacgggcttggccgtggccttgctgaacttgttgatcagccgggtgccggcggcgtccttctgcgcgtcgacgttgaggaacgccgccacctgcttgagcccgccctggacgccccagtaggcggcctgcaccatggtgcagcgccactgggacgggtccaggtaggcgccctcgggcatacccagcatccgggagaggcacacccgctcgaagttggcgttgaaggcgtgcttggtcacgtccgggtccgcaagcgccgccgccagccccagcggaagctcctcgcgcgtgaggtctgcgacctgcgccggctcgccgtcccagctgtagccgaagagcagcacctggaagtccggcgccgccacatacttgtagacgcccaccgagggcaggtcggccgagctgcgcgtctcgatgtcgatggacaggtgcctagaacccgaggagctcatcgaagtcctcgccctcgtcgtcgtccagggcgtcgaagtcgtccgccgcgcggctgcgcccgccgagcgactcgccgtcgcgcaggaactgcacgttgttgaggcccgcggacacgcccttgttgcccgccgcgtcgtaggggaacatgttcaggctcacgcgggcgtagcagccgctgtacacgcgggtcgagtcctcgatggcgacgtgcgggtcgtggcgctccaccacgccgggcttgttgcgcgaggaggcgcgcaggatccagtgcccctcgaactcctcgccctcgtaggtgggatcgtcgtcgccgtcgcgcagggggatggcgaggcccttcggcaccttgcccttccacttggtggccttgcccttctccaccgcggcctcgtaggccgccttgagcttcgcgacggtcgccttgtcggacttggggatcagcagcacgcagctgtacttcgcctcctgcccgtcgtcgaacgagtagggctcgaagaggtgcacgtagctcaggcgcacctcgccggtgatcaccttcgtggggtcgttggtcgtcatgtcgtttcctttcgtcgtatggtcgattcttctctcgatcctgcggggtatccccgtcaggcgctcctcgttgtcgtcgaagtagctcattcctcctccgcgaagtcggccgcggccgcctcggccgggtcgatggccgggcgcttgtcggaggcgggcacgagcgccggcttgccggcgggcttgtccacgtaggcgcccagcacctcggcgaaccgggccttgcccagcagcttctccagctttccgatgggcacgagctcggcgggcttctggtagtccgccgcggcgtagccctcggcggcgagcgcgtccatggcggcgccgggctgcactaccttgcggttcgaccgaccctccacgagcttgtagcccgggaacgccacgccgtggtcgcgcgcctgctcgagcgcccactcctgcacgtccttggcccatgcctcgatgcgggggagcagcggcagcagcgccgccacctcctcaatcgagagcagctcgggccgctccagggcctcgtcgacctctgcgggatccggcggggagtcgagcgagaagtcctcgcacgccgccttgaggttggcctcggcgcgcgcccggcaggccgccttcgcgcggcaccagcggcactgggactcgccggggctgtactcgccctcgccggcgtcggccaggcgcgccctcggggccacgacctcctccgcccagcgcagcagctcgccgtagggcatggagtcggtggaggaggagccgaggcgcggctggacgatcgtcatgcgcacctcgccgaactcgtagatcatctggtacttgagcgccgcgcccagggcgtagaggcgcagctgggggttgccctcggccgagacgggcacgcccttgccgtacttgaggtcgatcacgtgcagcacgccctcggagagcacggcgacgtcggccgtgccgaagccgccggggacgtactccgagtagtccacgcgctgctccagctccaccgccgggtgcccgccctccaggcgcaggcactcgacgatgttcatgacctccgtcgcgtagtcgtcgacggcctcctccatctccggcccccaccactcggtcgccttgtgctttttcaacctccccgagtactggcgcctggtgatgtgcccgaggcggtaggacagctccagctccgcgtaggcgtgggccgccgtgccctcggcggcgtaggggctgccctcgtcgggcacgccggccgcgagctcgaggcgcgccgagggcgggcactcgagccagcggtgcgccgaggaggcgcccaggagcgcgtgcgcgcccatctagagcgcctcgatctcggcgaggacggccgggtactcggcctcgtcgatgctgcgcaggtacttgctgccgtgcgcctcgaacacggcgaggacgtccttctgcgccgccttgccgtcgttcacgaccttgcgcgccgccgccgcgaccgtgccgaagtccaccccggcggagggggcctgcgccctcgcaggcgcggccttcggctccggggcgggcttcggctccggttcccgctccggctcctttttcggggccgcctcgggctcgggcgccttgtacgcgcgggccttgtccggcgccggcacggacggctgcgccggcgccgcggcgcctgtatgcgcgcccccgatgacggcgcagaccgtctggacgagcctctcggtcgagtccccttcgagcgtcatggtgatgttcatgcggtttccttcctctcttatgccaggacgtcgagcactttgccgagcgtgcgctttatgtcttgctcgatcacgtcgttcacggcgctcctatagccgttgagcacgaactcccgaaacgtcttgccgtgcatctccgcgcccacgccgattgccacgaatcccaggcctgccgacaccccgcgcaggaaaacctccgacaccccgtcccgcacgagctgctcgagttcctcgcacagctccgtttcccattgctcgggtgcgagcgagccgcagccgctcaggatctctccggttttctcgttctccatgcttcttccttcctctctttcctgttgcgatctggtaaaacgacactcattcgcttccttcataaaacgtacacattcagcctcggccctttcgagggttctcgcccaggacctcgcgcatccgctggaggcgcttcttcgccgcgttgtacggcagttccaggcgcctgtgctcccacgcctccagggccagcaggtagtcggtccgcgcccgatcgcgctggtagcggctgaccgggcagctcgcgcgcatcctcggcctcggttcgagggaggagggcctggtgccgcgcttggcctcgctgctgctgtacacggcacgctgctcgggcgacatgcgggagtacacctcggcgcatgccgcctcgcgcccggccagctgctcgcgcatcctgcagacccggcagcggcccgcggcgtccacgctggaacgccagccggcgcactcccggcaccagacgagccgcgtgcggatgcaccgggtggagagccccagcctctcggccgccttcgccgtcgcggcgcccgaccgccccagcacctcggcgatgcgcgccagggggatgctgcccgcgagctcctgcagcgtctcgatctcctcggtcgtccacggcctctgggccgagcccctgcgcgtcaacggtcggacaccgccccgcaccccgcatgccgccagctgcgggccagcggacgcctgccggtgacgtcggcgaacatgatctgcatccatgcggtgccggcctggcagtccagggcctcggagtagcgcgggcggatccacccggccaggccggggttgtccatcacgagcatgcgcgagaggcacggccagtaggcggcgacgagccccggcgtgtccacgggcacgggcacggcggatccggcgccggcggccttcgcggcgtccagcacgtcgaggtagagcctcccgtagttggtcgtggacgggtcgccgtcgcttggcagcttggcccaggcgcacgcctgctcggcggcgaccaggacggggttgcgctccacgcctaccaccacccctgcgacatgccgtgggcggccagcacgatgatcgcgtaaatcgcagcggggacggccgcggcgaagcagatgtcggccttgtccttgtccgacagcctcattcaatccctgccttcctccgcagccaaccgggcagctccgggacgatcacgcggtacgtgctcttcccggtcttgaatcccggcacgcggtcgcgcgggttggccaccttgctctggccgatgaggtagtcgtaggaaagccccgtgatctccgacgcctcctgcagggagcaggtaagctggttgccgcattcttcggtgggctcgggtgctgtcgcttctgcttccaatgtgctatccttcctctcgatggcgggcgttcctggcagggattggcacccgcgattgtttaggggccacagcatcacgctgtggtcttttccgttcttggggtgacgcctcgcgcatcatccggccatgggcaaaatcggcaaatctcactcggcgtctacagtggtcttcatggatcgctttgccgacataccccggtcgcttcccgaggcccgcgccaagctgcgcgatggcctgggcgagtgcgcctcattcattctcgccgcgccttgctccgccctctgctccgccctctgctgggtgctcggacgggctcgagcggccatcgaggctatgacggcatttatcgcgttgcatcgcggagctatcgggttgataggggacctttgcggcatcgcgggttttgttctggcgctcgtccagcttcttttctaagcgagaggtccttcgttctacagctactgcaatgacggtcatgccgcccatccataccagggtggcccactccatttggatatcacctcctctctttgatccgcgaacttcgcgtttcgaatatctcgtggagtgacagcggctggacaggctgctagactctctttgtccttgaatcctctattgatcgggggtggtcgttttgaccaacattttgaggacgctgtccctgtgattcggttgggctgaaaggcgtgggtgccgaaagccgacgaccgaaggcgctgcggtaacagcgtgttgccaagcgaagcgcttccgcaaatcggtagcatcgaagccgagtttggcgaccttggtaacaaggccgtcgaaggaggtcgtcccggcgacgggtccgacgagtgccaagcgaagcatgcaggacagggagaaagcccggcagcgggtaggctgcggttaccgacgtggaaccgcccgctgccactctgcgagatattcgattctcaaagttcgttaattgaacaggttttatgcttattctgtgtagggttaaaaccagtggcactttcttttcccgtcagaaagcaaaaacaaaggctctcatcaggtgaaactcgtggaaagcgctcgggtgacactggcggtttgatacggtcgtggacacctttcgcgacataccgccgagctacttgagcgacgctttcctgcgctactcgcggtacaaccagcgatacttgaaacacgctcgttcgcggcggttaccgcgcgctgcggtcgtggtgcttcgactcctttggtgggtcgtgacgacggcgttcccggctgcgtgcttctacacgcaactcctttctgaggccgttcacctctagggcgatccaccagagcacgcccacgacggaagccatgaacgccacaaacagaccctgactccattccattgggcatcaccccctttgcaaatgagaacttaaacatctctgtctagagcaaaaaaatatcgcgcaaaaagtcctgaatcaacttttttccgctgttgctgaaccctgcaaaaagatcttcaagctcgtcaacggtaaaagacttcgggagtttttcccgcgcaatgtaagtgggcggagatacgcagatcagctcagcagcctgttcctgcgtgagtccgcttgaaacacgcgcggcgcgcacggttttgtcgcgatcttccatagacacctcctttctaagagaagtataaatgcacatcatgataatgtaaatagtgaaataaaaagattcttttacttaatctaaaagaagcgtaatatttcacaaagagaacttttgaatcagacctacgtaaggagatcgtagtgagtattggcgacaacatcaaaaagttgcgcgaaatgcatgatctcactcaagagcagcttgctgaaaaattgggagtaacccgtgaatctgtggtgaagtgggaaagcggcaaaataaacgtgcgagacaggcacatcagcaagttggttgaactgttcgggattgagcctgacgacataaggtctgaaaactacggtcttgccgcaaaagggcatgggcgcgttggcactccgacaatcaagcctacctactcctaccacgtcgtgcccatgttaggtaacgtcgctgcaggtgagtggcgcgaggtctacgagcagcgggacgagaccgtgcacatcccggacgtgttcgccgatccgcacccgcgagctttcggcgtcaaacccgccgggaacagcatggatttgattttcggcgataaagagatcgcgatctgcgatcccgacctcgaggtgcgcgacaaagatatagcggtggttggcgtcaacggcgacgaggccactataaagcgcgtgttcttcgcgggcaatatgatcgtgctccatgccgagagttccgacgaggactcgtacccagatatcgcgatcgacctcaaggatccggcttcgccacctgtgcacatgataggcagagtgttttggaaaacgctgccagcaaaggaaatgagattctagggaggcaggtatggattttcgcattgaactggaaagttatttggagctcgggccagaggacgtttatgcccctccgtgcaaagaggcgcggatggtgaggaacctgtgcatttacccggattgcccggaaaagtacgacgagccagttttcgaggtgacgttgaactcgttggaggacttgacggtgcttgtctccgaggttgggcatcctgtcgagatcgacgggaacaccataacgatcaaggataggtgctattaaccgggtaggtgccaagaaacgcacatcaacgacatgggaaggagctgcaacatgagattcgccgtgcgacgggtgagcaactatttcatcgggagcgagcttgccggcatccccgtagagaccgacgggaaggacgcgcgcgaggggatgttggacatcaagacgctggacgagcttatggccgtcgttggcgtagagggcagcgcggtcatctactcggccgaacgcgacaggctcccagtcatcgcgctcgccgatgactggctcgacggatgctgaaaagtaaaccccgcccgtagtttggcgacggcaggcggggctcgcagaataccaaccgaataaacggaaggcaaggtgtattgtaccatgaagcgtccaggctacacggtcaagccgctcgaggagggcgtgtcccgggagaagtgcaggcggtggatgatccgcgtctcggtcgggcacgatcccgtcacggggaagcgcctgcggccctacgagacgttcgagggcaccgagggcgaggcgcatctgcgcgccatggccatgaaggttgagcacgggctcgtgccgcccaccgggctgaccgtcgccgagtacttcgtcggcgtctacctcccctgggcgaggagccgcgtgcgggagggctcctacgacggaggcccgcgcgacaagacgaagataacgcgcgagacctaccgcaactacgagcaggtcgcccggcgctacatagtccccatgttcggcagtgtcggcctgaccgacctgaagccgtactacgtcgaggccaagctggcgacgatccccacgctcggcgcgcgccgttccgcctacaaggtccttcggcagggctaccggcgcgccgtcagatggcagctcgccacgttcgtcgtcacggacgcggtggacgagcccgtgcccgagaaggtggagaagtccgtcgtgaagtcggcgcagatgtgggattacatcgacgccttcgagggggacgaggcgctggccgccgtcgtcatcgccttcgcggtcggcctgcggcgctcggagatcctcgccctcgaccgggaggagatcgactggacggtctccacgccggaggctctcggccggttccgcgtgtggcggtcctaccattacatgaacggcgaggggtacttcgagccgccgaagtcgttcacgtcggccaggacgctgctgctgcccaggtgggccggcgagatcgttcggccgctcgcggagggaacgggccctctggtggtgcacgacggcgagcgcatgcgccccgaccacctgtcgcgccattggcgcgacgtgacggacgccgccggcctccccgtggacatgccgctgaagaacacgcgccacagctgcggcaccatgctcgtgcgcgaggacgggctgccgatcgccgacgtgcagcagctgctcggccacagcacgcccgtcgtgacatcggagttctacgtgcaggcgggggaggagtcggtcgagcgggccgtggcggccatgagcaagaggacgcgtccgactggcccaaactggccgaaacctccggaaaacggcggaaagccacccgaaacgccgggttcggaaaaagagagaaacggcattccatcaggcaatttcaagatcatcaggccggacttcaaaagggcgtcgaacggctgatggctcttaaaatccgccggcctcggtcttgtgggttcgagtcccaccgtccctaccattctcccggccgccctcgccgcttaggtgcttttcgcggccctcaaggctccatgcaccggtttcgcatactccaccccagccatgcagttttcacgtagatgatgctgccggtcgccttgcctgttcatagtgcgcgaaaaccttgtggtacgattgctcaagctgtcgcggcgagcgcgatgagcgcgttttggggcagagcctatccgtcgagcgaagaaagcgttatggacaacatcaacgacatcatcgcggccatcgaagagccgcccgagaccttcgaagaatacctcacccgctacgccgcccaggtgggaacgctggtgaactcgtacatcccccagggatcgcaccccgacatggaccgctacctgtacgagccgctcaacgcgtacagccagaacggcggcaagcgccaccgtccgctcatctgcttcgcggcctgccgtgcggtgggcggcgacatggcgcgcgccacgagcgcggcggccgccatcgaacatttccatacggcggcgcttatccatgatgacatcgccgacgaggccgagctgcgccgcggcgagccctgcctgcacctcaccgagggcatggggctggccatcaacatgggcgaccttgcgctttcgttggtgaacggcacggtcatcaacgacccgctgctcgacgatgccaccaaggtgcgcgtggtgaacgagctcatagagatgacgcgccgcaccatcgagggccaggcgctcgacatcggctgggcgcgcgacggccgctacgacattacccccgaggactacctcgtcatggccactcacaagacggcgcattactccggcgccgtgccgctggccatcggcgccatcataggcggcggcaccgaggccgagatcgaggcgttgcgcaactacggtctggacacgggcctggcgttccagatccaagacgacctgctgaacctcataggttccgaggagtccacgaagaaggacttccgcaacgacatcaccgaaggcaagcgcacgctcatggtggttcacgcgctgcagcactccgacgaccgcgaccgtctcatcgacatcctgtcgtcgaaggagaaggaccaggccgtgctcgcggaggctgtggacatcatggagacgtcgggcagcatcgagtacgcccgcaactacgccgagaacctcacgagcatagcgaagaaccgcctggtggacatggtgcgcccgtcctcctcgcgcgagctgctcatctccatggccgactggttcgtgaaccgcttgaagtaacgggttccgcgggccgacggcccgcgccctccctacagaaagcagcttgccacgatgacgatggcggtggtcagcaggcccgacacggcaatgctcacgccgctcatggcgccttccagctcgcccatctcaagcgccttcgtcgtgcccaccgcatggctgcacgtgccgatggccacgcccttggcgatgccgtcgcgcacgcggaacaggcgcgccatgagcggcgcggtgatggcgcccaggatgccggtgacgatgacggccgccacggtgatggacgtcacaccgcccagctgctccgacaccgcgatggcgatgggcgtggtcaccgacttggggatgaacgacagcgccagcgcgtcgtcgagccccagcagcttgcatagtgcataggcgctggtcatcgaaacgatcgatcccacgaggcatccggcgaagatgggaacgaagtggtccttgagcgtctggcgctggcggtacaccgagtaggccagcgccaccgtggccggccccagcagaaacgagatgagctgcacgctctgctcgtacgactccagcgggatgcgcagcgccacgagcgccgcgatgatgagggcaacggtgaccagcagggggttgagcagcggagacttcacgcgctcgtacagcagcacggaaagcttgaacaccgcgagcgaggctgcggttcccaacaggagggtcagcccgaggtgcgccatcgcttccatgccgcctacgcctcctcgtcggccgtgcgagcgtcgcgcttcgccatcaagcgcgatacgagcatcaccgtgtacgctgttgccagaaacacgagcaccgtggtcaccacgcagacgagcgcgaacttcgccgcattgccctccagcagcgacacgcaccctaagatggccacaccggcggggatgaagaacagcgacatgttgtccagcaggcagtcgcaggcatcgcccacgtgccgtgctttcagcaggcccgtccccagaagcacgagcaagagcaccatgcccacgatgttgcccggcaggtggatggggagcgccgacgcgagcgcgcaaccggcggcgtacacagccaccacgacggcgagctgcgccgcgaaccgtgcgccccgcttgccggcgcgcccggccctcgcgcgccacgaggcatcgttgggagagggtgcgcaagcgcacccggagacgcccgatacggcgtcgttcagctgttccatgacacggattcctcaccagtaggcgggttgcatgcggcgccccgccccgcatgttccgctcgtttttccgtgcttattgtacggctgcgcaaaaatatatgcgcggcaggcgcccagaatccacgtaaaacgaaagcgacaccgccgaaacccggcgatgccgcacgcgatccgatggcgttcctgcgctagtccttgccaaccaacgcattcaccagggccgatacgatgctgataacgatggaggccacgaacgcgctgccgaacgagtcgataacgagccccacctggaagatcccgttcgccagccacgcggcgatgtagagcatgagcgtgttcaccacgaggtagaagatgccgagcgtgatcacgctgatgggcaagctcagcacctgcatgatgggcttgatgctgatgttgacgagcgacaggatcaggccgaagatggcgatgcccacccaagcgtccgtgccgccgaggatctccatgcccggaacgagccacacggccacgcccacggcgacggcggtgacgagccagcggatgatgaagttcatggcgggtcctctttcttgatggttgcatacggattgcactataggcgcgaaaaacgaagccgcgcgaaacagtggggaaaccgttacgcgcggcttcttggggacgtcctcgaccgccgccctggattccctgcggggttagaagcgcaggctcaggcagctcaagcccccgtcgagcttgcggtactcgctcgtgtccacggtgatggtctcgtagccggcgtcttgcacggccttcaacacggtggggtagccctcgggcactatgacggtgccgttaacccagatgcagttggcggcataggcctcgtcctcggggatctcgatgcggtggtactgctcgaagtccggcttggtcacgaactcgccggacaccagcatgttgccgtcctccaggtagttcacgccggtcttcaggtgcagcacgtgctccagcggcacctcggagccctcgaggccccagccctccaggatctcgaagaactggcgtatgccctcctcgttcgtgcgggcggagcgccccacgtagaagtggtcgcccaccatcatcacgtcgccgccgtcgagcgtgccggggctttcgatgtgcttcacgcggctgtcgtcgaagaactggcgcacggcgggctctatctcgtccttctcgccgttgcggctggccgcgcctgggttcgtgatgatggcgccgcagcgcgtgatgacggccgggtcctccacgaagcaggagtcggggaactgctcgagcgcaggcagcaccgtcacttccacgccgcagtccttcagggccgcgatgtagtcgtcatgctgcttgcatgccagctcgtagtccggcttgcccagctcgggtgccgacgtgatgccctccaccatgctcttggccgggcggcggacgataacgttggtgaacttggtcatgtgtgctccttcagttgcgcggtacgggtatgcgtttcgatacgtatactatagtgtagctttccgcgatgacgatagacgggttcgaaaatgacgaaacggttgcaagacgcgcacgccctccacggtcccgaccgccctcggaagggctccgagggcgccggcgcagggacgcccgtctgcccccatgcccaaacgtgcggcgcctgccagcacgtgaacgagccctatgcggcccagctcgcgcgcaaggatgcgcgcgtggccgagctgttcggcggcttcgagggcgccgagctgcggcctatcttgggcatggacgacccgttccgctaccgcaacaaggtggtctcgccgtatgcgccgggcaagaagctgccgggtgccgcgccgggtggaagggccgagaagggcaagggctcgcgcggcgaccgtgcccgcgaggcgcgcggccgccgcacggcgggccgggcgcgccatgagatactctgcggcatgtacgccgcccactcccaccgcatcgtgccgaccgatgggtgcctcgtggagaacgagcaggccaagcagattatcctggccatccgttccctcatgccccgcttcggcatcgagccctaccgcgaggatgcgcacagcggctttctgcgccacgccgtggtgcgcgtggggcatacgagcggcgagatgctggtgacgctggtgacgaacggccgggagttccccggctcgcgcgcgttctgccgcgagctggttaagcgctgcgccggcatcaccaccatcgtgcagaacgtgaacgagcgccagacgaacgtgatcctgggcgagcgcgagcaggtgctgtacgggcccgggttcatcctggaccagctgtgcggcttgagcttccgtatctcgtcgcagtcgttctaccaggtgaacgccgtgcagaccgaggtgctgtaccggcaggccgtggagttggcgcaccttgccggcgccgagcgcgtggtggacgcgtactgcggcacgggcaccatcggcctcgtggccgccaagcacggggcggctcgggtggtgggcgtggactccgtggcttcggccatccgcgacgcgcgcgagaacgcgcggcacaacggcgtggagaacgcccggttcgtcgtgggcgacgcgggcgctttcatgcgcgaagccgccgccgatggcgagcaagtggacgtggtgctcatggatccgccgcgcgcgggctcgagcgaggagttcctggaatcgttggctgggtgcgcgcccgcgcgcgtggtgtacatctcctgcaacccggagacgcaggcgcgcgacgtgcggcagctggagcgccgcggctaccgcctgcgcacgctgcagccggtggacatgttcccccacacggaccacatcgagacgatcgcgctgctggagcgcgaaggagggcgatagcatggacgagcaggcgaaggcgggcggttgggacggggcgtccgcgggcgccgggcgcgcaggcggggaaagggccgacgcctaccggttcgcgctcgacacgatcctcgacggcatgcgcgccaacgtgtacgtcaccgaccccgccaccgacaagatcctctacatgaaccgctacatgagggaggactacgggctggaccggcccgagggcacgctgtgctggcagacgctgcagcgcaacctggaccgccgctgcccgttctgcccggtggacaagctcgaggccgccgagcctggccgtttggtggaatgggaggaggcgagctcgaaaaccggccgcgtgtaccgcaactgcgacagcctcatccgctggttcgacggctcgctcgtgcacctgcagcagtccgtggacatcaccgacgtgaagacggccagcatcgacgagcttaccgagctgctcacgcggcgcgtcggcaagggccgcctgcaggcgcgcatggaccgcgagcgcgacgagggcgacgtgttcagcgtgtgcctgttcgacatcaaccgtcttaaggagatcaacgaccggttcggacatgccgagggcgacgtggtgctgcgggctgcggccgacgcggcgcgcagccagctctcgggcgaagagttcgccttccgcctctcgggcgacgagttcgtctgcgtggtggagggcgatgccgccgaggcgcgcggcaagatggagcgtgccgacgacctgctctcgggccgcgtgaagggcgatctaagggagacgggcttctgcttcggcatcgtggaggtgcaggggagcgacgtcgccgaggtcaacgaggtgctcaccatggccgacgagcgcatgtacgagcagaagcgccgcctgcacatcgggcgcagcgaggcgcgtgcgcaggaggcgctggagcgcaacagcgtcctgaccgacgaggacgtgggcgcgttcgcgttcgatgtggacttgctgtacgacgccctggtggacagcaccgacgactacctctacgtatgcaacatgaagacgggcgtgttccgctatccgcaggccatggtggaggagttcggcctgccggcgcaggtggtggccgatgcggcggccgtatggggctcgcacgtgcatcccgatgaccgccaggcattcctcgagtccaaccaggacatcgtcgacgggcgcacgacgcggcactgcgtggagtaccgggccctcaaccgtgcgggcgagtacgtgtggctgcgctgccgcggcatgctcatgcacgacggcgacggcgagcccagcctgttcgcgggcttcatcaccaacctggagaagaagaacaaggtggaccacctcaccgggctgttcaacaaattcgaattcgaggacgtggtgcgccgcgccttggaggcgcgccctgacgagcggctgggcctcatggtgctggggatcgacgatttgcgccacatcaacgaccgttacgaccgcggcttcggcgacgacgtcatccgcatcatcgcgcatcgcatccagagcgcgctcgtagggcgtgcgtatgtgtaccgcttggacggcgacgagttcgcggttgtggcgcgcggcgacgacgccgccacgctgcccgacgtgtaccaggcgctgcaccagtccttccgccgccagcagacgcacgagggcaagaagttctactgcacgctctcggccggctgcgcccagtacccggcggatgcggaaacctacgaggacctggtgaagttcgcgaactacgcgttggagtacgccaaggcgcacggcaagaagcgccgcgtgccgttctcgcccagcatcctggcggagcgctcgcgcacgctggagctggtggagcgcctgcgcgacagcatcgagcacgatttcgagggcttccggctggtgttccaaccgcaggtaaacgccgcggacgggcgcgtgatcggcgccgaggcgctggcacgctggagttgcgacgcctgcggcgaggtgccgccgttggagttcatcccgctgctggaggagagcggcctcatcgtgccgttcggcgcttgggtgctgcgccgcgccatggacacggccgcgcggtggcgcgcctggaaccccgacttcgtcatgagcgtgaacctgtcgtaccgccagctcgacgaggccaagctcgtgccgagcatcgccgaggcgctggcgaccacgggcctgccgccggcgaacctggtggtggagatgaccgagagttgcttcgccagcagcagcgaggcggctcagaagctgttcgccggcgtgcgggcgctaggcgtgcgcatcgccatggacgacttcggcacgggctatgcggcgctgggcatgctgaagcagtcgccggccgacatcgtgaagatcgaccgcacgttcgtgcgcgacatccgcgacagcacgttcgacgccacgttcatccggttcgtggtggagctgtgccatgacgtgggcatccgcgtgtgcctggagggcgtggaggtgccggaggagtacgaggccgtgagcggcatgggcctggacagcatccaaggcttcctgttcggccgtccctgccctccggacgagttcgagcggaagttcctggggaaggggtaggcttcgggcgccagggtgcggcagacgccgttttgccggcggcggcctgcgggctctttcccgcagcagccgaccgggcgggcggatcgcgaagattccgtggcggcgtccttctttccgcggccggcgtggtacgatttcctaaaacccagcaaaacactaggagatagacatggcagaccatatttcagagctcatcggcgagaccccgctcgtgctgctggacgcgctctcgcaggagacgggccttcgcgtgctcgccaagtacgaggcggcgaaccccggcgcgtctatcaaggaccgcgcggcccgctcgatgatcgaccgcgccgaggagcggggcgagatcgcgccgggccgcacggtgctcgtggagcccacgagcgggaacaccggcgtggccgtggccatgatcggcgccgcgcgcggctacgaggtggtcatcgccatgcccgagtccatgagccgcgagcggcgcgcgctcatggcggcctacggggcgcggctggagctcacgccggcggcggcgggcatggccggcgccgtggcgcgcgccgaggagatagcgcgcgaggtgccgggcgcatggatcgtcggccagttcacgaacccggacaacccccgcgcccacgaggagaccaccgggcccgagatcgtgcggcagctgggcggcttccccgactacgtggtggccggcgtgggcaccggcggcacgctgtcgggcgtggcgcactacctgcgcgcgcagggcgctcccacgaagttctacgccgtggagccggcggagagcccgctcgtgtcgcaagcgctggccggcgaggagctggcgcccgcgtcccacggcattcagggcatcggcgcgaacttcatccccgccacgctcgatttggacgcgctggacggcgcgctggcagtctcggtcgacgacgcgctggccgacgcgcgcgacctggcgtcccgcgagggcctgctcgtgggcatctcgtcgggcgcgaacgccgccgccgtgcggaggctcgcggccgagcgccccgaggcgcgcggcgcgaccgtggtcacgttcgcggtggatacgggcgagcgctacctgtccaccccgttgttcgcgtaaggagcccccatgtccgcgccaaccgccatcgatcgcatgcggtccacccttgccgagcgcgtcctcgccggtccggacacgccggcgctgctcatggtgtcgggcgggtcggactccacggcgctcgcgtacctggccgccgagttgcacgaggccggggagctgggaccgctggccatgctgcacgtgaaccaccggctgcgcggcgaagccgccgatgccgacgcgcgcttcgtggcgcagctggccaagctgctggacatcccgctgttctcgtgcgagatcgacatcgcgcgcgaggccgagcgcacgggcgagaacgtggaggccgtggcacgccgcgagcgctacttggcggcgaacgaggcgctggagagcctgtgccgccatgcggccgcgccgctggtcgacggccgcatcgtcacggcccatacggccgatgaccgggtggagagcttctacatgcgctccatcgtgggcacggggccgggcggcttccgcgccatgcggtaccgcaacgggccggtcgtgcgcccgctgctggatgcgagccggaacgatctgcgagcttacctggtcgaacgggagcgggcggaagagccggtggccgtggatgccgaggggaacctctggcgcgaggacgccacgaacgcccacacggaccggttccgcgcctacgtgcgccacgagatcgtgccccgggccaaggagcgcaacccgcagctgctcgacgttctgtgccgcagcatgaacctcatcgccgacgaggacgatatgctggaggcgcaggccgaggcgcttgcgaaccgccatgcggcgtggatcgagcagtcggagaccctgggaatcgaccacggcgccggctgcgtgctggcccccgcgctgggcgccgagccgcgcccgctgcagcgccgcgccgtcctgcgcgtgctgggcctcgtgctgggcgccgaggcgcgcgtggaggcggcgtcggtcgaggccgtgctggccgcctacgacggcgccggcgtcccccgcggcggctacgtggcgaacatccagggagacctggccgtcagcgccaacaagcgcggcgtgcgcgtcgagcccatggccgcgttccgcgcacgccgcaagcgagggtgacggaaagacgggttcgcgcccctctgcacccggccttgcgttacaataccgggcatggataacgaacagaacacccacgaggcggccgcgcgcagcgcggaggccgccgcttccggcggggagcccgtccccgacatcatcctggccagcggctcgccgcggcgcaagcagctgctggaagacgcgggcgtcgcgttctccgtgcgcgtgtccgaggtcgacgagaccttggagcccgaccttttggccgacccgcccgaggcggcgaagaagctggccgagcgcaaggccggcgccgtggtgcaggaggtgctgtcggagaactacctgggcatggcggccgtgctgggagccgacaccatggtcgtgctcgacggcgagatattcggaaagcccgtaagcctctcggatgccaagcgcatgctgcgccgcctgtccgggcgcacccacgaggtgatcacggccgtgtcgctgtggatggtggccgctcctgcgatcgaggacatctccgtgggcttccgcacgttcgtcgaccgttccgccgtcacgttccgctgcctcaccgacgaggagatcgccgactacctgcggaagggcgagtcgttcgacaaggcgggcgcctacgccgtgcaaggggagggggcgagcctcgtagagcgcgtcgacggctccttggactcggttatcggcctgcccgtcggccgcctgctggacgagttcccggacctgttcgccgcgcgctgacggctggctgacgaaaacgaaaccccttgttttttcaacctatacgccctgttcccgcggcgaaatgtaaaaatcgtggcccttggcccggcgttaccgtctcgtctccttttatgaagaacgcaatggtacactaaccgaatctcaaggtaagcgtgacgcctccgctcacgtatcgcgcttcggcgcggagcgaggaacggcagagcgcggatatgacgaagaggatgcgagctgtgcagaacgacctggccgaggtgctgttcaccgaagatgagatcgccgcgcgcgtggccgagatcggccgcgccatcacgcgcgattacgcctgcaccgcggacgagggcggcatcgtcctcatctccgtgctgcgcggggcggccatcttcatggcggatttggcccgcaagatcgagctgccggtggagatggactacctggccgtctcgtcgtacggcaacggggcgaagagctccggcgtcgtgcgcatcctgaaagacctcacgtccgagatcgaagggcgccatgtgatcgtggccgaggacatcctcgactccggccttaccttgacgtacctgcttaaaaacctgtcgtcgcgtcatccggcctccctcgaggtggccacgctgctgcgaaagaagacgcccgcgcaggcgaagatcgactgcaaatacctcggcttcgagtgccccgacgatttcatcgtcggctacgggctggactttgcggagcgctaccgcaacctgccctgcatcggcatcttgaagccggagatccaccaataacgacgtacccgcggcggacgggcggcgcaccgacaggtggcggccggttcgccaggtaagcgtgcggcggcggctcgaacgggcggcggacgggaagtccgcaccgggtgtcgcggccgaccgttcgggaaggaaagtcaggctccatggcacaggataacaagaacagcaacaagaagtcgcaattccagcagccaagtccgcggacgaccatcatatcggtcgtcctgttcctgatcgtggccttcttcgtgggccagcagttcatgaacatgtccagcaccacgcagaccgacagcctcatcacgtcggaattcgtgcaggccgtggagcaggaccgcgtgacgaaggtcgtgtacgacgccggcggccacaccgtttccggctcgtactacccggccgtcacggccggctcgacggcggccaacgcgttcaacgacgcgttccaagcgctcaacgcgcgcatggccacgctcaagaaccccgacaccggcaaggcgctgggcggcgtgggcaccaccgacgtcaacgcggccacgctgggcgacgaacacaacttcacgtccacctacgtgggccaggactcgctcggcgagctcatggccgcgcacccgaacatcccctaccaggtgaacctgccgtccggcttcatggacctgctcatcacgctgctgcccatcatcgccatcggcgcgctgctgttcttcttcttcaactccatgcagaaggcgaacaactcgcagatgtcgttcggcaaggccaagacgaagaagtccatcgaggagcgtcccgacgtgaagttctccgacgtggccggtgtggacgaggccgtggaggagatgcaggagatcaaggacttcctggcgaacccagcgaagtatcagtccatgggcgcgaagatcccgcgcggctgcctgctggtgggccctccgggcaccggcaagacgctgctcgcgcgcgccgtcgccggcgaggcgggcgtgccgttcttcagcatctcgggctccgacttcgtggagatgttcgtgggcgtgggcgcgtcccgcgtgcgcgacctgttccagcaggccaaggacgcgagcccggccatcatcttcatcgacgagatcgacgcggtgggccgccagcgcggcacgggcctcggcggcgggcacgacgagcgcgagcagacgctgaaccagctgctcgtggagatggacggcttcgagagcaacgattcggtcgtgctcatcgccgccacgaaccgcgccgacgtgctggatcccgccctgctgcgtcccggccgcttcgaccgccagatcgtggtggacgcgcccgacgtgaagggccgcgagaagatcttgcaggtgcactcgaaggacaagcccatcggcagcgacgtggacctggcgaaggtggccaagctcacgccgggcttcacgggcgccgacctggcgaacctcatgaacgagtcggcgctgctcacggcgcgccgcggcaagaagatcatcacgcagcgcgaggtgagcgagtccatggaacgcgtcattgccggcccggagcgcaagggccgcgtgctcgacgagcagacgaagcacaccatcgcctaccacgagagcggccacgccctggtggggcacctgctgccgcatgccgacccggtgcacaagatcagcatcatctcgcgcggccgggcgctcggctacacgctgtccatccccaaggaggacaaggtgctcaactcgctcggcgagatgcgcgacgagctggccgtgttcatgggcggccgcgtggcggaggagatcttctgcgacgacatcaccacgggtgccagcaacgacctcgagcgcgccacgaagatggcccgcgccatcgtcacccagtacggcatgagcgccgagctgggcacgcaggtgttcggccagccgaaccacgaggtgttcctgggccgcgactacggcaacacgcaggactactcggaggagacggccaagcgcatcgacgacgaggtggcccgtatcatgaaggacgcgcacgaccgcgcctacgagatcctcgtgagccatcgcgagcagatggacctcatggccagcgtgctcttggagcgcgagacggtggagggcgaggcgtgcctggcgctgctcgacaacacgtgggacgactacctgaagcacgagggagagatcaacgcccgcaaggaggccgaggagcaggcggcgcgcgagcgcgatgccaagctggccgacccgaactggaaagaggagccggtggagccgggcgaccaggatccgaacccgccgttccgcgagccctcggacgaggatgatggggctgcagccggcgcgcaggcatcgggcacaacggcccctgctgcgcccgccgacggctctaagagcttcctcgacgagatggagaagggcttccgcgagatgatgggcgacggcaagggcgcgccgcaggacggcaagcccgccgaccgcaccgacgatgagaaaggcgacggagagcgtaaatgatctggcgctgcgctgatttcgagttcgacaccaagatgcccatcgtcatgggcatcttgaacgttacccccgattccttctccgacggcggcgagcacgaggacgttgatgccgcgctcgcgcacgccgagcggatggtggaggagggggccgccatcgtggacgtgggcggcgagtccacccggcccggagccgcgcccgtgagcgtggacgaggagctggagcgcgtgctgcccgtggtgcgcgcgctcgccgagtgcgggatgtgcgtgagcatcgacacgcgccgacctgcggtggcgcgcgcggccgtcgaggcgggtgcggccatcgtgaacgacgtgtccggcttccgcgacccggccatggtggacgtggcgagcggctgcgacgccgggctcgtggtcatgcacatgcagggagagccggccaccatgcaggacgatcccgtgtacgacgacgtggtgaacgacgtgcgcgactacctgcgcgaccgggcagccgcgctcgaggcggcgggcatcgcgcacgaccgcatctgcgtcgatcccggacccggcttcggcaagacgccgaagcagaccatcgagctcgtgcgcaacttccaggagttcgcgcggctggggtacccggtgatggcggcgctgtcgcgcaagagctacatcggctacgcgtaccgtatcgacgagccgcgcgaacgcgaccaggcgtccgctgccgaggcgctcatggcctgcgagctgggggcgaacgtggtgcgcacgcacaacgttgccgagacggccaaggcgctcaaggacctgcgcccctacgcgctgctgggcctgggttgcaacgtgccgctcgtagccgagccgggcgaggagcgcgagggcaagatcgcgcttctgaaccaggccgtcaccgagctgtgcgcgctgccggactcgcagatcgttgacatctccagcttctacgagagcgagccggcctactacttggaccaggacgtgttcgtgaacgccgtcgtgctgctgcgcacggggctcgcgcccaaggagttgctgggttacctgcatgccatcgagaacagcctgggccgtgtgcgcgagagagagaacggaccgcgcacctgcgatatcgatatcatcgactaccagctgtacgtgacggacaacgacctgctcacgctgccgcacccgcgcgccctcgagcgcgacttcgtggtgcagccgctgctggagctgctgccgggccatgtgctggccgacggcacccctgtgacgtgcgatcgcgtggcggtggggaaggccacacggctgtgagcgagccgctcgcgttccgcctgcgcgtgctcgacgaggttacctcgacgaacgacgaggtgaagcgcgcgttggaggctggcgagcccgagggcctggcgttgcgcgcccgtcggcagacgggcggctacggccggcagggtcgcgcctgggcgagccccgaaggcggcctgtacctgtcgctgctgctgcgcccctcggttgacgccgccctgctgcccaccctgagcctcgtgaccgccctggccgtgcgccgcgcggtagtcgggctgctccccgccgaagctgcggaaagcgtccaggtaaaatggccaaacgacctggtggttccggcggccggccggccgccggaacctctcgatgctgcgtcagcacagcccgtcttccgcaagctgtgcggtatctcgctcgaggctcatgcgggcggcgtgtgcgtgggcatcggcgtgaacgtggagctgccggatcctgccgacaatgccgcggtgggcggcaagaacgtccccgtctacctacccgagctgggcttcgagggcggcatcgacgatgtggccgccgcggtcctgcacgcgtacgcgccgctgtaccgtgcctggcagaccaagggctttgcgccgcttgcaggcgagtacgccgcccatgccagcctcacggggcgcagcgtgcgcatggtgaaccttgcgggcgagccggtggccgaggggacggtggcctcggtggacgcgttcggtcgcctcgtccttcgcgcgcccgatggatcgtgcgtgccggtcgcctccggcgaggcgcatctcgtgtagatcagccgcccgtcggcgaataggcgcctttggcagcgctttgctgtggttgctttatgtatctgtcgacaaggtattctcctttctctgtgcgcgcgagtaaaatatctcgttccgcaaaaatgagaaaggcatctcgagccatggcagcatcctcagcgacgaagacgaaactccccctcgatctcaacgaagaaagcaccggcgcacccctcggcaaggacccgaagaatcctggtcgcgacagcaaggtcagccgcatgggcacggcatccatcccgcgcctcatcaccgagttcgccattcccgccatcctcggcatggtggtgaacggtgcctacaacgtggtggactccatcttcctcgggcaggccatgggcgagatcggcctgtcggcggccaccgtggcgaaccccatcatgatcgtgttcatggccatctccatgctcatcggcaacggcggcaacgcgctcgcggcgctgcgcctgggcgagggacggcgcgtggacgccgagatcagcttgggcaacacggtgctgctgagcgtggtggtgtcggccatagtcggcatcgcggcgctgaaccccgctgtcttggacggcctgctcacgctctcgagcgccaccgacgacgtgcgcccctatgcgcgggcgttcctgcagatcatctgcttcggcttcatcttccagtgcatcggcatgggcgtgaacaacttcatccgcacggccggcgcgcccaaccgcgcgctcgtcaccatgctcatcggcctcgtggtgtccacggcgttgaactacctgttcgttctccggctgggttggggggtggagggcagcgcgctagccaccatcatcgggcaggccgcgtcgtgcgccgcggtgctgtggtacttcgtgttcacgcgcaacgtgccgctcaagctgcacttccgctacatggcgccgcatctgcgcgtcatcggcaccatcctgtcgctcggcttcgccagcttcgccgtgcaggcaggcatggccgtggtgaacttcgtcatcaatcacctgctggtccagtacggcgcgttgagccccatcggagcggacgacgcgttggcgtccatcggcgtggtgcagcgcgtggccatgttcaccgtgctgccgctcgtgggcgtggccgtggccatccagccgctgctcggcttcaactacggcgcgaagctcatcgaccgcgtgcgcaagacgctgtggtacggcattgccggcgctacggtgctcggcacggtcatgtggctggtggtgcacctgttccccgagttcatcgtgggggcgttcggtatcacgcacgacgggctggttgacttcaccgtgttcgcgctcaaggtgcagctgctcatgctgccgttcgtgggcttccagatcgtcggttcgaactacttccaggccacgggccaacccgcgaagtccatcgtgctgtcgctcacgcgccagatcctgttcctcgtgccgctgctgttcgcgctgcccgaggtcctgccgcacattttgccgcagttcacggggctcgacgcactgtacttcgccacgcccatggcggacttcctgtccatcttcgtcaccgtcatcttcatcatcgtggagatgaagcgcctgcggaagctggagcgcggggagatcaccgcgaagttctagcaggggcccgtcgggatttgcccggcggatgccggttgcgctggccgcggcgtgcggtcccacggtactgtgcgccgcggtttggcccggcaggtgagcagccgaccgtgtggccggtatcctgcgtatcgcgcggttgtcaccccgattgtcaacctggaaagagtccgctggtttacgcgaaccggcgggctcttctatactgcgacgcggtctgacggaagcggcgagcaagtcgcatgcaggaaggaagcgcacatggacgagcgggcggtgcagggaaagaagacggcgggcacgcgggggagtacgcgttcgatcgcgttcgtggcgctcacgatcgcgctcatgggcgtttcggcgtgggtggccataccgttcggccctgtgatgctcacgctgcagatgttcgcgcttatgttcgccctgctcgcgctcacgccgcgcgagtgcctggcggcgattgcgggctacctggcgctcggcgcggtggggctgccgatgttctcgggcatgcgcggcggcatcggcatgctgctgggccccacggggggctatctgtgggggtatgtggtggccgcggccgtggcgctcgctgtgcgggcggcgctgcgccgcgcgcttggcggcggcgcagctggcaagaagcttgcaggagggcgcgcgtgggccgtcgacctggctgcctgcctcgtattcatcatcgttacgtacacgtgcggctgcgtgcagtacgccgcggtggtaggggtggatcttgccgccgcgttcgccgtaaccatcgcccccttcgccatccccgacctggtgaaagccgtcgccgccgttgcctgcgcccgcgccgtcacgcgcgccgtgccgcggaggtagggggtcgattctcctgcgacagcgtcggcgaagctgtcggcgagcgaggaggagctttgagcgccgggggtatctcgcgtttgaggagcgtttggcggatcaggcgatgccgccgggcgcgtgtgcctacgcctcgtacaccacggcgccgctggtgaagccgccgccgaaggccaccagcaccaccttgtcgccgggcttgatgcggccggcggtgtacgcctcggccagcgccatgggcaggctggcggccgaggtgttgccggcgtgggcgatggagagctggaacaggtccatcgggcggtcgagcttcttggcggcgtacttgatgatgcgctcgttggcctggtgggggacgatgcaggccacctcgtccagcgcgatgcccgcgcggtcgagcgcctggttgacggcgacggtcatggcctcggcggcgaacttgaacaccttctggccgttcatgtagatggtctggcgcgggcggccgtcctcgatggcctcgcgcacggcgagctcgtcggcgatctgcgcagccgccgcgtccgtgtccgcgaccgccggcgcgatgccgtcggcgtcgaacggttggggcgcgtcgtacgtcgcggggcaggacagcgcgttcgtcacgtcgtcctcgttcacgatgtagctgcccaggatgccggggcgctcgtcgctccactcgagcacggccgcgccggcgccgtcgccgaacagcacgcaggtgttgcggtcggcccagttcgtcaggcgggtcaggcgctcggctcccaccacgagggcgcggcgcacggggttgcgcccggcggcgcccggagttttcggcgcgctcgcggccatcagggcctcggccacggtcaagccgtagacgaagcccgtgcaggcggcgttcacgtcgaaggcgatggcgttctcgaggcccaggcggcggcgcagcaggcccgccatcgaaggcaccaccgtgtccggcgtgatggtggcgaacaccacgaggtcgatctcgcccgcttcgaggcaccgctcggcgaagccgccttcgacccagcccagtgcctcgcgcgccgcctgctcggccaggtcggcgttcgactctcctacggccacgtggcggctctcgatgccggtgcgcgtcctgatccactcgtcgttcgtgtcgacgagcgccttcaggtcgtcgttttgcacctcaagcgccggaaccgccttgccgaatcccaccaatgcactgcccacgatgtttctcctgccttcgaccgccgcgcactgcccggcgccgcgctgccgcaccgctgcgccgacccgttgccggccgtcgaaatacttcgataatcaaactaattcgattatagcacgcgccggaaaaagccgaagaatcccaaagcgatgtccataaagcgccggtcgaagccgtccggccggttccgcggttgagaggaggagggtggcgacaatggcgggccgctgcacgacgaggctcggccgcggttgctgtgcaagaagcagccgatcgcgaaccgcagtacgaggtgcagcctcttgcgggccacgatgtttcacgtgaaacatttgtacgtttcaaaaaaggtatcgcgattggagtgacgaactttcgagtgctgaatggttgccgttacccaggtgctctcaattatttgctgctcgctgtttcaataaccttattgaaacagccatatatataaaacgaacgacagcagcgcgaaagcgccttcccgtccctttcccggcatactaccctcggcagtatgccgcccttcgtccctcatcaatcccatatcgtgacgcttgtggcgcgatttcacgttgccgcggcgattcgcggtcccgccctgcgcggcatgctgtccccagtgctattcgacgagagaaccaaggagggcgaagcatggagaaatcagagggcatcaccatcccgcatgagaagccgtggcgctacgaggaaggcgagtacacggtaacgcgcggcagcgcgtggtcggggccgggatgccacctggggtgcggcgtgctgatgtacaccgacaaggacggcaagctcgtgaaggtggagggcgaccccgagaacccgatgaccgacggccgcctgtgcgtgcgctgcctggacatgcccgagatcgtgaaccacaaggaccgcctcacctacccgatgaagcgcgcccgcgccgaccgcggcaagaacaggtgggagcgcgtgagctgggacgaggcctacgacatcgtggagcgcgagttcaacgccatcaaggacaggtacggtgccgagtccgtggtgttcatccacggcaccggccgcgacatcgcgccgtggcagtcgcgtttgtgctggtcgttcggcagcccgaactacggcaacgtgctctcgggcaacgcgtgctacctgccgcgcgtggccggcatggccgccacgacgggctcgttttggatcgccgacgtggcccagcatttccccgaccggttcgaccacgagggctggaccatgcccgaggtcatgttcgtgtggggcaacaaccccctcatcgcgaactcggacggcttcttcggccactgggtcatcgacctcatgaagcgcggcatgaagaccgtggtcatcgacccgcgcgtgacgttcctcgcggcgaaggccgacctgcacctgcccatccgtcccggcaccgacgcggcgctggcgctcggcatgctgaacgtcatcatcaacgaggaaatctacgataaggaattcgtcgactgctggtgctacggcttcgacgagctgaaggagcgcgtgcaggagtatccggccggccgcgtggccgagatcacctggatccccgaggacaagatcgtgcgcgccgcccgcatgctggccgcggcgaagccggccacgctgcagtggggccttgccatcgacatgacgcgcgaggcgatccccgccggccaggccatcgcagcgctgttccagatcacgggcaacatcgactgcccgggcggcctggtgccccccgcggagatcatggcgtactccggcggctggggccgcgatctgctgccccccgagcaggagccgaagcgcctgggcctcgaccgctaccgcctgctgcagatgggcttcaagcagtcctcgcccgacgtgctcatcgagaccatggagacgggcgtgccctacgagatccacggcgcacacttccagaccacgaacggcatcgcctgcatgggcgccgaccctcaccgcgtgtacaacgcgttcaacaagtgcgacttcatcgtgtcggtcgacctgttcatgacgcccaccatcatggcgctggccgacgtcgtgctgcctgccgccacgttcgccgagcgcaacggcatccgcgtgggcgacgggccgcagcgcggcgaggtcatcaacaaggtcacgcagatcggcgagtgcaagtccgacatgcagatcaacctggagttgggcaagcgcttcaaccccgaggcctggccttgggagaagccggaggagatgttcaccgagctgttgaagcccacgggctactcgtgggaggagctgcgcgaggaggcgccggtgtaccttccggtggagtactacaagtacaagaccggcaagatgcgcaacgacggccagcccgggttccagacggccacgggccgcatcgagctgtggtcgacgttctacaacgcggccgagctcgacccgctgccgtacttcgaggagcccgatccgggccccggctccacgccggagctgttcgagcagtacccgctcgtgctcaccacgggcgcgcgcaactggagctacttccactcggagcaccgccagatcgagcgtttgcgccggatgcaccccgaccccatcgtgcaggtgcatcccgacaagctggccgagctcggcatggaggacggcgagtgggtgtggatcgagaaccagaacggccgtgccaagatcaagatcgagtcgacgcccatcctcaccgatccccgcatcgtggcctgcgaccacgcatggtggcggccggagggcgacccggagaagttcttcgacgtgttcgagtacaacatcaacaacctcatggtgtacagccccggcaagagcgggttcggttccaactacaagacgagcatctgcaggctctacaagctcgaggacggtgagtaacaatggcccagtacggaatcttggttgactacgaatggtgcacgggctgccattcgtgcgagttcgcatgccagatggagcacggctacccggtggggcagacgggcatcctggtgaacgagataggcccgtggaagatcgacgaggacgtgtggcagctggcctacatgccggtgcccaccgaccagtgcgacctgtgcgctgcgcgccaggctctcggcaaggtgcctacctgcgtgcagcactgccaggcgaaatgcctggagtacggccctctggaggagctgaacgccaagctggccgccaagacgaagcaggcggtgttcgccctcggcgagtaagcaaggggcccgcgtcccggctgcgtgccgggacgcgggtcagcggccggccgtgagactgcggccggccgagtcgtcgcatgcaggaaagcggctggacatgcgacgcataccctccaaagtctgccagaattcgaaaaatctgatgcgcggcacgaggcggagaaggcgctctgcgctgccgtgacagaatctttgtgtggaaaggggccgttgtggataccatcgtgctgctcgtcgcggttgtggcgggcctcgtggcgttggagctgctgggcatgcgcgcgtaccgtcgccatcgtgcacgcaagcaggcggcgttcacgcgggagaacgtgggcgcggtctacgacgacctgcaggccgcccgcgcccgatgcctggcggagaaacgcgcgttcgccctgttggccgatgccgcccgctcggccggccgcccggaggacggtgccgtgctggacgcgttggcggctggcgagcgggctcacctggctgcgatcgaggccttccgcgggccgctgcatgccgagagcgtcgatccggcggcgtacacgtccctgccgtcgagcttggacgacgccctgcgcgtcgcgtccgggcggctcgatgattggagtacgggggcttgccgcgacgccgccgcgcgcgcccgcgtgcgcggctaccgcgacatcgcgaagctctaccgccagctgcaggaggtggagcaggccgccgcgtgcctctgcctcgatatggccgagggcgcccgtcctgccgggctcttctcgctctgcccggcctgcggcctcgtcgtggccggccgtcgtcccgctttctgcaccgtgtgcgcgaagcctggcttcgagttcgacgacgtggcgatgcccgcaatgccggaagcggcagctgccatgttaaaacctgaaggcgtcgcgtagcggcgagccaaggcccgtggggcggcgcccgtcaggccgaaaccaccatctccgccagctccagcaggttggatgcctcgtaatccgcgcggacgcccagctcctcgggtggcaggccgcggcggttgagccaacccacggtgaagccgaacgccttggcgccggccacgtcccagccgttcgacgacacgaacagcaggcgctcccgcgcaacgcccaggtggtcgacggccaactggtacacctcgggccgcaccttgaacagccccgcctcgtcggcgctcaggcaggcgtccaggtgcgcgcccagcccggagcgcgcgacgagcggctggatcatccccaggttgccgttcgtgaggatggccttcttgcgcgtgccgaaacgcgccatggcctctatgacctcggggtacatctccagctccagataggttgccatgatggccgctatcttcccctcgtcgccctccaagcccagctcggccagcgtgtagcgcagcgcgtcctcggtgacgcgccagaagtccgcatagcgtcccatgagcgtgcgcagccacgagtactccagctgcttctggcgccacagccggctcatggccgcaccgctgccggggtactcctcctcgcacttccgctccaccgagtacacgtcgtacagcgtgccgtacgcatcgaacgcgatagcctctatcatggccgtttccctttcccctgagtatcccgccgcagccgccaacgctgcagcctcctccattgtgcgccgaaaccatcggcgcggcaagcagaaaaggacccgcacccgttttgaggcgagcccctgcagtttggtcggattcaacgaaagcgaccacaattatcggggtcaagttcatagaggcgcgggcccttgggggaaggcagtgcgacggcgaggtcgttggggcaggcggcgaacccgctgtggcgctcggacggtcttcgcccgggcccgcacggccggccgctccggcaccgctttcggaaaagggaagggcccggaccccttgcggggtccgggccctggaaacgcgagtccggagagagctcgaacgtcgcgaatcagtaccccaccaggcccacgagcggggcgaggatggtggcgtggaggatcatcatggcgatggtcggcgcgatgccggccttgaagaactcgcccatcttccactggccgtgcttgaacgtcatcatgttgttgctgtccacgcccagaaggaacgtcgtgttggcgttgaacgcgatgatgatggcgaacacggcggccgacacgcccatggcagggcccatgcccgcaagcgggatgaggctgatggcgatgagcgccgggcccaccgggatgatcaggcgcatgagcggcagcgccacggcggtggcggcgaccacggcgaaggccgacacggccatcttgcccacggtggcgccgaagagccagctggccgcgccctgctccttgatgccgcccgcgatggactgcacgcagccgatgagcagcacgatggcccactgcacgctggcgatgtactctttccaggtaagcacgtcgatgccgggcaggaagaacagcgccaggcccgcaacggcgatggccgtggcgtcccatcccgtccaattgctggccacccagcatacgatcatgagcgccagaatggcgagcaccttcttgtcaaacccgtcgagcttgcccaccgacgcgcccgatttctcgatggcgagcatcgtctcgtcggagatacggtcggtcttgaagatgaacaccaccgacagccagcacaccaccagcaggatgagggcgataggcgcgcagatgatgacccagtcgaggaacgagatggtgaagcccgcgttcgcgcccagcatgttcagcgtcatgatgttcagcgccgagccggccggcgtgatcatgccgcccatgcacgaggcgtacgcgatgcctatcatgagcgccttgcccaggttggcggcgtgcttcgcggtgccgttcttctgctccacctcgatgatgctggacatggcgatgcccgcgaacagcgccgtgcagggcaggttcgaaacgaaggccgagatcacggccgtggccaccatgaacatgagcaccgtgagcttcgcgttgcccttcgtgatgtgcatgagcgtgaacacgatcttcgtggggatcttcgtcttcagcagcgccgacgtgatgccgaacgacgccaggatgaagaagatcacgttgctgatgaagttcgcccatacgccgggcgtgccgttgtacgggaagatgccgaatcccggcatgaggcacatgagcgccaggcccgatatggccatgggcacgggctccgtcacccagagcacgatgccggacaccatgagcgctatggccatcttgcccgcgtaggacagcccttccggcgtgggaaggaagtgcgctatcacgatgatggccacggcgacgccgataagcgccagcctcttgccgagcgacgtgccttgttgctttttgttgtcggacatgagatgaatcaacccccttgcttttccagttgcttccttgttctgttggagcttcggtccatccccctttctccgctgcgcgccgtgcaagggacgcgcctctccgccgaatgctcgcctcccactatctccgagcgcgcgggatcgtgaatcgaatggccgttgctaaaaccgggggaagtcatcgaaaaatccgtatgaagaacccgcatgaagggggtcatacgcacagtagtatggcgttcgtgcgctttcctttcaggcgtccgattcgtgccttgcgggttcacgttatggtgggcgcctgttcgagggctcggcgtgcgagggggaggtattcgatgggcgaaaagggacggagcgcgaaacgaagccaggcgctggcaggcggttcggcggccaagagggtcgcctgcgtggcggtggcggtggcgttgatcgcggccgcatggttcgggcccacgccggaggggctctccgaggcggggaagatgtcgctggcgctcatggtggcgggcatcttcctgtgggtgacggagccggtgcccgtggccatctcgggcctcgtcatgatggtgctcatgcccgccttcggcgtgctggaattcaacgggggcgtgtggagcgggttcatcagcagcgtgatcttcttcatcctggcgtcgttcggtatcacggcggcgctgctcaagacgaagctgcccacgaagatcgtgttcgcgctcatgcgcctgacgaagggcaacgcgcgggccaccgtgggcgcgttcatggtgtcggccgccgtgctgtcgttcttcatctccgacctgccttgcacggcgctgttcgcgggtattgcggtgtcgagcattctcaagatcgaggggtgcgagcccggcaagtccaacctggggcgggcgctcatgataggcatcacgtacgcgtcggtggtgggcgggcagtccatcccgtcgggcagcgccatgaacatcatggccatgaacgtgctggccgccaacaccggcatagagatatcgttcctggactggacggccatctgcatgcccatcgcgctcgtgctgctggttgcgtgctggctgtcggtgacgctcgtgttccgcccggagcccatctcggcggccaccatggcctgcatcgaggagaaggggcgcgccgtgggcaggctggaggcgcttgactggaaggtgctcggcgtcatgggcgtgacgttcgcgctgtggatcgcgagcaactggacgggctgggatgccacggccatcgcggtgctgtgcctggtgctgttcttcctgccggggctcgacgtgctcacgtggcgcgagtacacggcgtcggtgtcgtggaacatcgtgctgctcatcggctgcgtgcagtcgctgtcgggaggcgtgaaggaacagggggcggccagttggctctttggctccacggtgggcaagctcgcggtgagcggcacggccatcgtgggcgccacggcggcgctgctgccgctgctgcgcctggtcatacccgtgggaccggcgttcatcgccatctgtctcataccgctcgcgtcgctgtccgccgcgttcggcgtgagtcctgtcgtgttcacggtcatcgtggcggtgaacgcatccaccacgttcctcatgggcgtggacagcaacaacatgttgtcgttccgctacggctactggaagatgaccgacttcttcaaggcgggcgtgctgcccacgctggccatgatggcgctgcacgccaccgtgctcgccccgctcgtggcagccgtgggatactagggtagctggggcgtcagctggcaggcgccgttcgcccgccggaacgccgcgcccgacgaacccggcggcgccttactggtacacgacctccgtggagtccacgatgctgatgagctcctgctgcgagttgatgcccatcttctggtagatgtggtacacgtgcgtcttggccgtgtacgccgagatgttcagctcgtcggcgatgaactgggcgttgcgccccttcgccaggtagtacaggatctcgccttctcggttcgacagcttgtacgtttgcgctgcctggttgcagcgctgcttgaagtagcctccctccacgatctcggccttcaccgttttgtcggcgaacgtgttgtccttgaacggcacgaacgcggccagcagcgccagcgccagcagcaggccgagcgccaggtagggcacgtaagcgaacaggctcggattcgcatactcgatggccatgcacaaactccagcttacgatcatgcccgccggcagcaccagctggccgcgggcgatgcgccagaacggcgagggatggccgctcgcgaagcccacgagcgcgctcaggttcgagaagtccaggtacacgtacacgccgacgatgaacaggcagcatgccagcatgagccccggtccgaggaacgcgagtcccagaaagcccaccaccagcagcagaagcgccaccttctccgcggtgccgaacggcacgtagcgcttcaccagaacgctcagcgccaggtgcagcccggcgccgcacgcgacggccgccgcgacggccagcgggtccacggcgtccaggttcgcgcacagcaggtacagcgcgatgccgaacagcgcgccgaacacggccacggtgaatccggtaagcgggaacaggcgcgtctgctcgagcggcgagtcgggctcctgctcgctgcccacgatgtgggtgcgcacatagtggagcacggccagcgatgccagcggcagcagcacgagcgcaacgtcaccgtagggcggcagcagctcgcaggcgaagaggtagaccacggcccccgccaaggcgcttgccgacaagtacgcccccacgtccttttgccaacccaccatgaacaccttgggccagagaaggaagatgagcgagaagccgcacccgcccaggaaccaggcggcgaagaacgcagccgggggaacggccgcgtaatgggcgacgaggttgagcagcccaagcggaagggatagcagggctgccgcccagggaagcgggtcgtgctccgtccggctgaaaaggtcgcgcttcaggtacacgagcaaaagcacggccaggacgcccacaaggaacgcgagcttcaaaacgagcgacaggtcgccggcgtggcttgccggataagggctcaagagcacgaggtagaaccaggcccagaaagaggcgaatcctgccgaggcaaccggaagcatggttctcacatgcgctttcttcactttcatagtgcgctgccttcccctgaatctttgcataggccgccttacgccggcggcgcgtcgttccattataggcaaaccgctgcggtgaatggcgcagaccgtggctgcgggctgcgttgttccggcgccgttgcgcggcggtgctccgccgccctaggctttccccgggactgcctccgctgggatggaggggagcgccacgatgaagcaggctcctccctcgggcaggttgatggcctccaccgtgccgtcgtgcgcttccaccaccgatttcacaatggccagccccaggcccgtgccgcccgtgccgcggctgcgcgaggcatcggcacggtagaagcggtcgaacagcagcttggggtcggcgtcgccgaagccggggccgtcgtccttcacggccaggatggagttgccgcgcaggccgaacaactcgatgacgatatgcccgccggggtcgatgaagcggcttgcgttctccacgaggttcgtcacggcctgcttgaggcggtcggggttgcccagcacgtcgggcgcttcgcccacgatctcggtgttcgcctcgcggtcgcgcaggatgggctccagcgcgtcgagcacgctgtgggccaggctgttcaggttcacgcgcgagagctcgaacggggtatggtcgttctcgatgcgctggagggccagaaggtcgttcgtcaggcggctcaagcgctcgctctcgcccacgatgatggagcagaacttgtcgtgcagctcgggcggcaggtcggggtcggagagcatctcggcattgccgcggatggccgtgaggggcgtgcgcagctcgtgggccacgtcgctcacgaatgccgactggcggcgctccttgagcgcgaggtcgatctgctgggacttcgtcttcttcaccagcgagtcgatggtcttcgacagctcgtcggcctcgtgcaggcgcccgtccggggccagcgacacgtcggcgccggaacggacggcctcggttttcttcaccagcacgttcagcggttcggccaggaagtggccgatgatgaggctgagcacgaacgtgaccagccccgtgggtatgagaagtagaaacgccttcggcggagtgccgaaggcgatgaagcaggtgagcacgatgatggcgccggcgagcagcatgagcagcgttgccagcaaggagaagtatgtctgcagcctctttattgtctgaacctgtacccgtatccgcgaaccgtctccaccaggccgggatcgtacccggcgccctcaatcttatcacggaggcgcttgatgtgggtgtcgaccgtcttggtttccgtcaagtattcccaaccccacgcatcgcgcagcaggtcctcgcgcgacaccaccttgccggcgttcttcatcaggctggccaagagctcgaactcgcgcggcgtgaggtctatctcgccgtgctcgcccgatgccgtgtgggcgtcttcgtccagcgtgatgccgctggccgtgatggcgtggttcgcgccggggaagtcgccgccggagccgcggcgcaggagcgcgcggacgcgggcgatgagctcgcgcacgccgaacggcttggcaaggtagtcgtccccgccgatctccaagcccaccaccttgtcgagctccgtgtcgcgcgccgacaggaacagcaccggcacggtggtcttggagcgcaggcggcgacacagctcgtagccgtccatgccgggcagcatgatatcgagcacgaacaggtcgtaggggttcttcgtcgccagagccagggcctcctcgccattgtctaccacgtcggtgtagaaaccctccttcttcaaggcgtagctgacgaattccgtgatggaaggctcgtcgtccacgacgaggatgcggttcggtgtatcgttcatgtgatacctttctacgagtgcgtagtcagataaaggcggcgggcgaccgcttggtataatgatcaaccgcaactatatccgctcccgtccgtttcgcctgcgtccgagggggtttgtcaaaaacatgttacttgccatcgatgtggggaacacccagaccgtcgtgggggtgtacgagggcgaggtgctcgcccacatgtggcgcgtggccacgaacaagagccatacgtccgacgagctgcgcgtgaaggtgctgccgcttttggactcggagggcatcgccccgggcgacctgcagggggcggcgctcgcctccgtggtgccgcagctcacgcaggcgtggtgtgcggcgctgcaccgcatgctgggcatcgacgcgctcgtgtgcacggctgcctcggccggggagctgttccccaccacgtacgccaaccccggtgagatcggcgccgaccgcgtggccgacgccgtggccgcgcggtcgctctacggcgcgcccgtggtggtggtggatttcggcacggccacgaacatcgaggtggtggaccgcgaggggcgtttcatcggcggcgtcatcgcaccgggcgtggacacgagtgccgcggccctgttctcgcgcgccacgcgcctggccgccatcgacctggtggacccgcacacggccattggcggcagcaccgagcaggccatccaggccggtatcgtgtacggcgaggccgaccgcgtggacggcctcgtgcgccgcatcttcgcccagctgggctacgaggctcccgtggtggccaccggcggtttggccccccgcgtggccgagctctcccagaccatcaccgtcacgaacccggagctcacgctggaaggattgcgcctgatacacgaggcgcaggggaagggcacgggggtttagacgccgaccgcagccgcggggacgaaggcgtcctcgggcagggtgccctcgatgcgcgcgaggacgtcggccgagcttgtcggctctatcgcgagcatctggcgcacccgcgcgcccaagagccggttgagggcgtcaagccgctcctcatccacgggatagacggggtggttcgtcagctcgaaggagagcatacggcgcagcgcctcgcggtgccgctcggtcatgaccacttggagcacctggtcgaagggcaggttgctgccggcgggcgcctggctgccggccttgcggggccactcgtaatgcctccggggaaacccgcgccgccgcagcgaggttcgcggggaagcgcgactgcccggttgcgggccagaacggcacgaaggcggtgtccttgtcgtgcatgagcgggcagaccgaagcgagctttccctgccatttctccagatcgtagtccacatgggggatgccgaatgcttcggcggcctgcgcggcgaagaactccgaatagggctccatgccggagttggcgtacccttccgtgccggctttgaacaggaggagcgcatcgtcgattcttcgccaggccttcgggtactggccgtcggtggtccattcggtcgaaagccccgcgcggcgatgctgggcgaggggtatcccgtgtaggccgtcagtgcgagagcttcgtccagctcgttgtcgaacaggttgtaagcggcgaacgtgcccgcgaacccttcgggaaccactcagtacgcgtcgttgatcgaaaggcccaggcacacgtcgatgatgcccatggtgtcgccgggggtcagccctgcttgggcgaggatcttgtccgcgaatcgtcggttcttcggcacgacgcgcgtatcgagccactctttgaggggattctgtcccaggtaacgcatcaggggagggggaagaggctgcgcgcgtcatcgccactgtcgaggacggaggacgacacgtttccgaacgcgtcggccatcgcagagaagacgagcagcgcccggtcgtaaagccgcagttcgtagcgttttgcctggttgaccatgagcgctctttccccgtgtcgcatttgccctggatcgccggccgagcgtctcgattatacctgaagcctccgggaaggttaacgcgggccgccgctccgttgctgccgcgaagatcaagcggatgcgcagcagcgtttcctcggcttcggcatgaagggcgtcgctgcgatgcgaagctcatctgcatcggcgcgaagccgctgcgccgaaagggccaaggcggcgagctcgccctctaggtactcgccggtttcctcggggttcgacctcacggcggcattcgcgaagagaagagcatcttcaagctctcgcgcttcccgcttgacaaggtcgatgcggtcgatgacgtcgatggggatagagccccttcgagatgcgtgcttattcttggccatgaatcccccttttcgtccacctagtgtacacaactaaagttattcgatcaactctagttatgcaatttgctttgagaaaagcgctttcctccatccttctagtaacaggaggtgtgctcatgaatacaaatgaagctattagaacaatggtggaggaatccggctatagtcatagagctctttccgtcgagctcggccattcagctacctggctgagttcgactctgcatcgacccggagactccgagtgtgggacggtggcggcaatcgcccgcatcgcaggctattcgctcgtgctggttccgagggatcgtcctctgccggtcggctctttggtgatcgacccgccgagcgacaacgcgtgaaaatgtcccaaaaggggacaggcgccttttgggacatgctgcggtgcgctcaaattcgctctccgttcaagatgagcgggtgccgttctgcgtgcatagcgcgaacggcacccgcctcctcttccgattttgagctgggggcgagcggcccgagctccccggttgctggtatttgatgacccttgcggaaaacaaggtggtcacgggccgaaaaaccagtagaatgcaggaaagcgcaccgacgaggaaaagggagggccccacgtgttgagcgacatcgaaattgcccaggcaacgaagccgcagcctatcagcgccatcgccgagaaggcgggcgtgccggaaacgtacctggagatgtacggcaccaacaaggcgaaggtggactacaacctgctcaaggacgtggagcacgagccgggcaagctcatcctggtcaccgccatcaaccccacgccggccggtgagggcaagaccaccacgacggtgggcctggccgacgcgctggcgaagcagggcaagaacgtggtcgtggcgctgcgcgagccgtcgctcggccccgtgttcggcatcaagggcggtgcggccggcggcgggtacgcccaggtcatccccatggaggacatcaacctgcacttcacgggcgacttccacgccatcggcgcggccaacaacctgctggcggccctgctggacgcgcacatccacaacggaaacgagctgggcatcgacgtgcgcaagatcacgtggaagcgcgtggtggacatgaacgaccgccagctgcgcaacatcgtggacggcctgggcggcaaggcccacggcgtgccgcgcgaggacggcttcgacatcacggtggcctccgaggtcatggccattttctgcctggccacgtccatcatcgacctcaaggagcgcctgggccgcatcgtggtgggctacacctacgacgacaagccggtcacggcgcacgacctgcatgcggaaggcgccatgacggccctgctcaaagacgcgctcaagcccaacctcgtgcagacgctcgagggcacgcccgcgttcgtgcacggcggccccttcgccaacatcgcgcacggctgcaactcaatcatggccacgcgcatggccatggcgctgggcgactactgcgtgacggaggccggcttcggcgccgacctgggcgcggagaagttcctggacatcaagtgccgtttggcgggcctcaagcccgacgccgtggtcgtggttgccacggtgcgcgccttgaagaatcacggcggcgtggcgaaggcggacctcaacgaggagaacctcgaggccctggaggccggcctgcccaacttgctgcagcacgtggagaacatcacgcaggtgtacaaactgccgtgcgtggtggccatcaacgcgttccccaccgacacgaaggccgagctcgacctcgtggaggccaagtgccgcgagctgggcgtgaacgtggcgctttccgaggtatgggcgaagggcggcgagggcggccaggcgttggcgaccgaggtggtgcgcctgtgcgccgagggcgacgccgagggccgcagcgccgagacgttcgagttctcctacggcgacgacctgacgctggccgagaagattgaggccatcgccaagcgcatctaccacgcagacggcgtcgtgttcgagccggccgcgaagaaggagctggcccagctggaggcgctcggcttcggcgccatgcccgtgtgcatggccaagacgcagtactccttcagcgacgacgcgtccaagctgggcgcgccgcgcggcttcaccgtgaccgtgcgccaagtgaaggtgtcggccggcgccggcttcgtggtggcgctcacgggttcgatcatgacgatgccgggccttgggaaggcccccgccgccttcaagatcgacgtggacgagaacggcaagatcagcgggttgttctaaaaggcttccgtctctacaaacggggcccggtgacatgcgtcgccgggccccgttttttgtccagcggactctatgcggtgagcgacgtgatgggaaccacgtacaccccctcgggcgtcttgcggcagaaagccgctttgcctaccagaacggcgaggaaagcgggttccttgttgcgggcagccgggttggaggacaccttgttcgcaagcctcgtgaggctcctgaccgcttcgggcaccttctcgtcgctgagcttgatctccagcgcgccccatcgaccgtcggcaagctcgatgacggcatccacttcaagcccgtccgagtcggcgtagtagagcacctccgcctcgggtgcctgctgcaacgccgccgcgtacacgcgcaggtcgcgcaggcagagctcctcgaaaaggttgccgaacaactgcgtctcgaacaacaggcgctccggtgccacgccgaggagcgaagccggcagagaaggatcggcgaaggttcgcttgggcttcgtgcgcacgcgcgagcgtgatttgatcggcgcatcccagcccctttgatcttcgatgaagtattgggctttaaaaaagctcagatacggttcaaggcgctcgcgaacgcccgcatcgctcaacttgctcgacggttcgccttcggacacgtcggcgaacagcgttttgtaggtgagcgttttaccggtgtttcctgccagggataccgccacccgtcgggcaaggtagggatcaagatcggctttgcgtgcactaacttcgaacaatgcggcgagatactgtgcggggagatcacgcgcgagggaagggtcgacgtcgagcgaggcgggccagcctccttggcagatgaggcgggcgaggcttctgacgtcggttttgaccgcgcgctgttcgaaggatccctcgaaaaggccgcgcagggaaaccgactggtcggaatctccgctttcggccaggctcatggggcgcatgtgcaggcgggcgatgcggcccgccccgctatgggaaacctgccttttgtccaccgtggacgagccggtgaggatgaactgccccttctcgtttcccgtcgcatctacgtaacgcctgacggtgtcccagattttgggaacctcctgccattcgtctatgatatggggccgcgccccttcaagcgccaggctcgcatccaactcgatggcgggttgcacggcgtcgtcgtcaatgtggacgatgctctctccttgcgccatgctgctccatgttttgccgcagaacttggggcccgccacttcgactgctccgaatgctttgagcgcgcgggcaagtttctcatcgatgatccgaggtcgatacgccgatggctgtaagctcataacactccctccgaaatgggtttatcgtcagtgtatcgcaaaatagaggaaaacttgcttgcaaaatagagcgaaagtgatttgcagaatagaggaaaactggggcctgaagtgaaaccgggtctgggacccagggactgggacctgactgaactcgattccgcttgtgaactagaagatgacgctgggttggcttgattcaggtgcattttcgctccaaaaacacccctcagcgcacgaggcgtgtttttggagcgaaaatcgggggggggtagcaccgtggccgcacgtcgagggttcgtgcatgtttcgcggggcgtatggggttattgcgggcggtgggctatcatacggaatgccggacgtgcggcgtgttcgcagcggccggccatcccgatcacacttgacgctcgcgcaaagggaggcgccatgtacgacacctcattcatcgacgagctggccagcgcggcgcccacgccgggcggcggcggggcctcggcctacgcgggcgcgctcgcggcggcgctcgcctccatggtgggcaacctcacggtggggaagaagacctacgccgacgtggaggacgaggtgcgcgcctcgcttgcgcgcctcgacgcgctgcgcgcccgcctggtggagctcgtggacgaggacgcccgcgcgttcgagcccctggccgccgcctaccgcctgcccaaggccacgccggaggagcaggccgccaagaacgcggcgctccagcaggcgctcgtgggcgcgagcgacgtccccctcgccatcatgcgcgccgtggccgacgtggtggacgaagccgactacctggcccatcacggctccaagatggcgcgctccgacgcgggcgtggccgccgcgttcgcccgcgcggcctccgacggggccagcctcaacatcttcatcaacgccgcctccatggacgaccctgcccaggccgcgcgctaccgcggcgaggccgagtcgctggccgcgcgcacgcgtgagcgttgcgacgagctgttcgacttcgtgaaaacgtccgtctcgtaaaccctcgaaggagcgaatcactcccatggcaaccctcctcaccggaaagcccgtcgtcgaccgcttggcgcaggagctcgcgccgcgcatcgaggcgctcgggcgcgccggcatcgtgcccgcgctcgccatcgtacgcatgggcgagcgccccgacgacctgtcctacgagcgcaccgcccagaagcgcgccgagtcgctcggcatcgccgtgcgtccgttcgtcctgcccgaggacgccccgcaggaggtcctcgaagccgcgctcgccgaggtgaacgccgacgcctccatccacggctgcctgctattccgcccgctgcccgcgcacatcgacgaggcgcgcgcctgcgagctgctgtcccccgagaaggatgtcgacggcatcacgctcgcctcgctggcctcggtgttcaccgacggtgccacgggcttcccgccctcgacggccgccgcgtgccttgagctgctcgaccattacggagtgccgctcgaaggcaagcgcgtggcggtggcgggccgcagcctggtggtgggcaagcccgtgtccatgatgctgctgcgccgcaacgccacgatgacactctgccacagcaggaccgagaacctcgccgaggtcgtgcgcgcctccgacgtcgtgatctgcgccaccggccgcgcccgcatgttcggcgcggagttcttccgacccgggcagacggtgctcgacgtgggcatcaacttcgacgccgagggcaacctctgcggcgacgtggacttcgacgcggcagagccggtggtggacgccctcacgcccgtgccgcgcggcctgggcacggtgaccaccagcgtcacgatggcccacaccgtggccgccgccgaggccgcgctcgccgcgcgcgaaggagggcggtgagcttgcgcgcagcgacgcctgccggcaggaagttcatcatcgccgacccttcggtctgcatcggctgcaagacgtgcatggcggcctgcctcatgcgccacgacgcccccggcgacgtggcggtgcctcgcctcacgttggtcacgacgcgcaccatatcggcgcccgtgggctgccatcactgcgccgaggcgccgtgcgtggacgcgtgccccacgggctgcctgttcagcgacgacgagcacgtgggcgtgcaccccgagaagtgcatcggctgccgcaactgcgtgctggcctgcccttatggcgccgtggagatcgtgaccgagaagctgccgcccgagccggagcccacgcccgaggaggcggccgcggccgacgcggcggccaaggacgacaagtccgccaagggcgcgcgggcgcgggcccgggcgaagaagcgcaagcgcacgcgctcgacggtggtgaagtgcgacctgtgcacgggatgcgcgggcggcccggcgtgcgcgaaggcgtgcccgaccgacgcgctgcgcctgatagacgccgacttcatggagcgcgcgcggcaaagcaagcgcaaggcggcggcccgcgccacggcgtcgttcgccagcatgaagctcaacgcgagcctggacgagggggagtagcctcatggagaagcatatggcggtgtgcccgtactgcggcgcgggttgcaagatgaacctggtggtggagaacggccgggtcatcgacgcggagggactggacggcatcacgaacgagggcgagctgtgcctcaagggcctctacggctacgatttcgtcaacgacacgcgcatcctcacgccgcgcatctaccacccgatgatccgccggcggaaaggcgcgccgctcgagcgcgtgacctgggacgaggcgctcgatttcacggccagccgcctgcgtgccatcatcgaggagagcggtcccgaggccgtcatgctcacggggtcgtctcgcggggccggcgacgaggccaacttcgtcatgcagaagttcacgcgcgcgtgcctcggcaccaacaacatcgacaactgcgcacgcacctgccacgcggccagcgtcatcggcctcatggagtgcgtgggctcgggcgcgatgagcgtgagcatccccacgctcgaggagacggactgcatcctgctcatcggctacaacccggcggccagccatcccatcgtggcgcgccgcatcgtgaaggcgaaggagcgcggcgccgagctcatcgtgtgcgacccgcgcgtcatcgagagcgcccgcatcgccgacctctacctgccgctcgcgaacggctcgaacctcgccttcgtgaacgcgctcgcgtacaccatcgtcgacgaggagctggccgacttcgacttcatcgacgagcacaccgagggcttcgacgactggtgggagatcgtgcaggactacgcgccggaggacgtggagggcgtgtgcggccttcctgccgagctcatccgccaggccgcgcgccgctacgcaacgaccgagacggccatcgtgggctggggcatgggcgtgacccagcacgcgcagggcgtgcagacggtgcgcgccatcgccgcgctcgcgctcatcacgggccacatcggcaagccccgaagcggcctcgcgcccgtgcgcgggcagaacaacgtgcagggctcgtgcgacatgggcatgtggccgagcctctaccccggctaccagcgcgtggacgaccccgccgcgcgcgcgaagttcgccgccgcctggggtgttcccgaggagcgcctgtcgctcaagcccggctggaagctcaccgacctgccgcacgcggtggaggaggggaagatccgcgcgttctacaacttcggcgaggacccgctgcaaaccgagcccgacacggcgcagatgcggcgcacgctggagaacctcgacctcctcatcagccaggacatcttcatgacgcagaccacggcgctggccgacgtggtgctgcccgccacgtcgtgggccgagcacgacgccgtgtacaccgcgtcggaccgctcgttccagctgacgacggccgcgctgccgccgaagggcgagtgccgccacgactgggagatcttcgccgacctctccacccgcatgggttatccgatgcgctatgagagcacgcgcgagatctgggacgaggtgcgcagcctctgcccgcagttcgccggggccacctacgagaagatggcgggcacgggatacgcgcagtggcccatccgcgccgaggcggccgacgaccccgacaaccacggcacgccggagctctacgccggcggcgcgttcaccacgccaaacggcaaggggcgcctggtggcggcgcactggcgtcctcccaccgagaagcccgacgacgcctggccgctcgtgctgtgcacggtgcgcgaggtggggcactactcgtgccgctcgatgaccggcaactgcaaggcgctggccgcgctggccgacgagcccggctacgtgagcatgagtccggccgacgccgacgcgcgcggcatcgaggaggagcagctggtgtgggtgcgctcgcgccgcggcaaggtgctcgcgcgcgccgcggtggacgagcgcgtgaacgagggcgcggtgtacatgacctaccagtggtggatcggcaagtgcaacgagcttacgctgcacgcggtggacggcgagtcgggcacgcccgaggacaagtacagcgcctgcgaggtggaggcgatcgccgaccaacgctgggcggaggatcacctggtggagcgctacgcctccctcaaagccgagctggccgccgaggccgaccgccagaaccctccggagccggagccggaggcggccgccgagcccgccgcggctgcgtccgagccttccgacgaagctccaacccccgccgccgccttcgccccccacgaggccgaggtggcgggccgggcgctctacgcgaacggcgaggaggagacgctcgtatgaaccgcttcgtcgtgtccgaccccgcgcgctgcatcggctgcggcgcgtgccgcgtgacgtgcagcgaggcgcaccgcaagcgcgcgctgcgcccggcgtcgcgcctctcgctcgtgaagacccgcgaggtgtcggccgcggtgacgtgccaccagtgcgagggcgcgccctgcctggcggtgtgcccggaaggggccatctaccaggagcgcgaccgcctgcaagttgacgagggccgctgcacgggctgcctgctgtgcgcgctcgcgtgcccgttcggggccgtctacccctcggctccctccaccgcgcacgtgaaggccgcgccgtacagccgcgcgtcgtcggcgcgctcggcggggctgctgcgccagaaggagacgggcgcgtacacgagcgtggtggtgtgcgacctgtgcgcgaagtcgcccgacgggccgcgctgcgtggaggcctgccccacgaaggcgctcgcgctcgtagacgaggagatgctcgaggcgctggggaagaaccgccgcatcgaggccgtcgagcgggctgaagcagccctgcgcggcgggcttcccgacgatgcgttcgcgggaatgttcgatctgctcgaggaggtcgatcgctgatggcgaacgtgaagccccgcacgtcgaaccccatctcgagccgcgaccgcgcgacgggggttcggcgcgcctcgagcgtggtggagggcaagccgcgccacgacttctccgcctgcatcgcatgcgccgcctgcgcggcggcctgcgacgcgaacgccatccgcatcttcatcgacgaggacgagggcctgctggtgtggacgctcgacctgttcgactgcacgcagtgcggccgctgcgtgcctgcgtgtcccaccggggccatggacgtcatcgagggggccgacttcgccgacgagcccgagctgcccaagcgctgcctgttcacgctggcggagtgcgaatcgtgcgggcgctactacgccacgaacaaggagatagcgttcgcgaacgctctgctcgagcaggaggagcacgccgacgccgcccgcgcccgcgcgctcatggccacctgccccgactgcaagcgcacgcatgacgccaaagccgccgcccgccgcgcggggatgaagcggcgcctgtaggtcgagcttcttgatgtgtcgttcgaccggcgaggcagctgcgagccgccggtcgaacgacggggggcgaataggcgcgccgggtctcccgcgctaacacgtgggcctgttaccccagtacctccagctcgtgggggtagccgttgagcacctcgcagccgtcctcggttacgatgaccaggtcctcgatgcgcacgccgaactcgccgggcaggtatatgccgggttcgatggaaaagcacatgcccacctccaccggggcctcgtgaaccgacgaaacgtcgcccggctcatgcacgtccaggccgatctgatgtcccaggcgatgagtgaagaaggggccgtagcccgcctcctcgatgacttcgcgggcggcgcggtcgatgtcgcagaagcgcacgccgggggcgacaacgcgctgggcggcctcgttggcccgccgcaccgtctcgtacacctcgcgctgcttgtcggtgggctcgccgaagaagaacgtgcgcgtcatgtcggcgcagtactcgccctgacggcagcccacgtcgaacaacaccacatcgccggcggtcaagggcgtgccgtcgggctcgtgatgcggatcggcggcgtttgcgccgaagctgacgatgggcgcgaacgagtggccctgcgcgcccagctcgcggtagatgccctccagctgcccggccacttcggcctcggtcgcgccttcgcgcaccagcttcttgaagcgcgccatggcggcgtcgttcgtgtgcgaggcgtcgcgcatgaggtcgcgctcctcggcgctcttgtgggcgcgcgcgtcgtccaccacgtcggaggccagcacgaaggcgcttgccgccccgcgctccatgagcgggatgaggaagcgcgccgcaaggttcttgtcgcagcccagcgggcgggacgggccgagcagcccggcggccagcgcaagggggtcctccgtgtcgttgaacgtgagcgtggcgcaggagaggtcgctcggcacggcgaacatctcgttatagacgagcgtcggcgcgccgccttcggccagaaccaggcccagaaagcgctcgcccggctcaaggtatgcgccggtcaggtactggatggaccgcgggtcgcagacgagcatctgcgagagcccgcgccgggcaaggttctgcatgacggtttcgatacgcgcttcgtacatggctggttgcctccttcgtgtcgcgccgtgccgccgccgtgcgggcggggggcgggtgttttgcgttcaaggcgatgatagggcaaaagcgatgcgtcgcgatgagaattctgccgcggcgcccgttcggcggcagcccgcgcgccagcggccgcaggcgtctcgcgttccgtacgccggcgggcacatggccttcgccctcccgtgtgttggcggccgcgccgtacgtcctcttcgctcgccttcgcctgcgccgcgcgtgccaatgccgcaccatggaagattcccgattccccgccgccgtcgtggcctgggcggtcgtgttggcgtatcatacgcaccatggctaacggactgacctacatacgcaagaccacctccacggaggcgacgaagcagctggcctccacgcttgcgccctatctgcacgcgggcgacgtcatcgtgctctcgggcgacctgggtgcgggcaagacccagttcgtgcagggggtcgccgctgcacttggcgtgcgcgaccaggtgaccagccccacgttcaacatcctgctgcagtatccgggaggccggctcccgctgtaccacttcgacctgtataggctggaagatcccgacgagctggaggacatcggctatttcgagacgatcgacggcgacggcgcctcgttcgtcgaatggggcgagaagttcccctcggccctgccgtacggctacctggagatagcggtcaccgtcgacgctgacggaaaccgcgacgtgcgcgcgcagtcgttcggcgaccgtgcgcggcagctgctgttcgtatgggcgaaggactcgaaatcgcgcctgatgaaggcagcggggtgctgcgggtgagcgatcgagagttcccggctgcgcgtgcggcggaggccggcgcggcgcacggtgccccagcaggcgcacggccacgctacgcgcttgcgttcgacacggccaacgaggtcatcgccatcggcttgggcgtgctgcacgcggaaagcctcgaggtggaggtcgtcgcttccgccgaggcgtcggcgcatcgcgcctcgaacacccagctgcttccgcgcatcgacgcgctgctggccgagcagggcgtggcgcgcggagagctggcatgcatcgtcgtcggccgcgggccggggtcgttcaccggcgtgcgcattgccatggccacggccaagggcgtcgcgtcggcgctgggcgtggggctcgtgggcgtgtcgtcgctcgatgccgtggcgtggaacgcgcaggcggcgggcgtgcgcggcccgctggccgtggtggccgacgccatgcgcaaggaggtgtatcccgtccgctaccagctgacggacgaggacgcctgccgccttggggccgaccgtgtggtgaaggccgaggctgcggctgccgagctggtcgcgcatgcgactgaaacgccccacgcggccgtcaccggcgacgcgctggcgaagtacgccgacctgttcgcaccggcgggcgaggccctgccgtcggagctgtgggctcccacgggccgcggcctgctgcgggcgctgcaagccgcctggcgcgcgggcgaggccgatcccttcgacgccgcccggcacaaccctgcctttgcgctccccgtgtacacgcgcctgtccgatgcggaggagaacgagcgcatccgcttggcgaagaacgatccgaagaacctcgccgccggcgtgcaggacgtggccccgcgccgcgaccagcgggcgagcatgcacgacaccgccatcctgaacgcccgcccagccgccgacggcatcgtgtacaagccgcttgatgccgcgcatgccgccgctgtcgccgcgttggaggcgcaggtcatgggttccgacgcctggaacgagcacctggttgccgacgagctcccgcgccccgaccgcatctggtgggcggcttacgatggcgagcagctgctcggctatgcgggcgggtgggtcgtggacgggcaggtgcagatcctcaaggtgggcgtcgacccggcgcagcgccgccgcggcatcgcgcgcgagctgctggcccgcgtggcggccgacgcgcgcgacctgggcgcggcaacgtgctcgctcgaggtgcgcgcgggcaacgccggcgcgcaggcgttctacggggcgctcggcttccatgcgctgggcacgcgtccgcgctactactcggacggcgaggacgccctcatcttggagggcccgctgcccctggccccgcacgacgtggcgggcatgcagctgcaggtcgacgccgcccgcgccgaggcctctcgcaaggaggtgccccgcacggaatctgcctgccccgctgttgcgcgcccgcttatcctggctatcgagtcatcctgcgacgagacggccgccgccatcgtggacggcgacggcaacctcgtggccgacatcgtggcctcgcaggtggacttccacgcgcgcttcggcggcgtggtgcccgagatagccagccgcaagcacatcgaggccatctgcggcgtgtgcgacgagtgcctcgacgtggcggccgaccatctggggctcgcacacctgacatggaccgacctcgacgccgtggccgtcacctacgcgcccggcctcatgggcgcgctcgtggtgggcgtcgccttcgcgaagggcgcggcctggggtgccggcaagccgttcatcggcgtcaaccacctcgaaggccacttatacgcgaacaagatcggcgcgccggacttcgagccgcccgccgtggtgtcgcttgtgtcaggcggcaacaccatgctcgtgcacatgcggggctggggcgactacgaaacgctcggcgccaccatcgacgacgcggtgggagaggcgttcgacaaggtggcgaaggcactcggcttggggtatcccggcggccccgtcatctcgaggcaggcggcgctcggcaacccggatgccatcgccttccctcgtgccatgatgcattccggcgacctgcgcttctcgctctcgggcctcaaaacggcggtcgtcacctacatcaacaacgagcgcgccgccggccgcgagccccacgtgcccgacgttgccgccagcttccagcaggcggtggtggacgtgcaggtgaagaaggcggagatggcgctgcggcaaacgggcgcgcgcacgttctgcctcggcggcggcgtggcggcgaacccggtgctgcgcgacgcctaccaggagctttgcgagcgtctgcatgtgcgcctgaccctgccgcctttgagcgcctgcggcgacaacgccggcatgatagcccttgtggccctcgatcgcttccgcgctgggaagttctaccccctggacgccgacgcccaagcccatgcgaatcttgacgatccctactaattattatagaacatagattcgttttatgatatactggcgtcatcgataaatcgcatggcgttgtgctcgaccaagcaccctcctgtccaaaacgcctcggaccgaaggagggaatcatggtcgattcttccgtaaagctgtttgaaagccaggaaatccgctcggcatggaacgaggacgaggcggagtggtacttctctgtcgtcgatgtggtcggcgtgttgacggagagcgccaacccaactgactatctgaagaagatgcgcaagcgtgacgagcagcttgcgagctacctagggacaaattgtccccagatagaaatggcaacgtcgagcgggaagaagcgcaagacgcttgcggggaatgccgagcaaatcctgcgcatcgtgcagtccattccctccaagaaagccgagccgttcaagctgtggctcgcgcaggtgggctccgagcgcatcgacgagatcatcgaccccgagttgacgctcgaccgcgctctggaaacgtacctcaaaaagggctacgaccgcaactgggtcaaccagcgcctgcaaaccatccaagtgcgcaaagggctcaccgacgagtgggagaggcgcggcgtcgagaaaggcaaggagtacgctatcctcgccgacgagataacgcgcgcctggtcggggatgaccacccgccagtacaaggatctcaaagacctcaaaaaggagaaccttcgcgacaacatgaccacgctcgagctggtgctgaacacgctgtgggaggctgcgccgagaagccggtagcgcgctgtgaggagcgaatcttccatgctccgcacagcgcgccctgctaggctttcttgtgctcgcgcctggtactcgggtacgagaaccaggcgaccacccaggcggccaggatgcagcccatgacgcagcagatggtggcggggaagccggcagcgtcgttgacgaggccccagacgatggagctgacgccgatgccgacgtcgctcgccagcaggtagagggcattggcggcaccccaacgctcggcgggagtgttcttcacggccactgcctgattgaggggcatgctcacgccgagacagacgccgtacaggatgccggccgcgtagtaggcgagatcgctcgatccggccacgaacaacagcaggaagccggcgagcccgcaggcggttgaggcggtgcatatcttgataggggccacacgatccatgaacgacttcgacttgaggcgcacggctatcatgctcaacgccgagagcgtgtagaacagcccggggttcgccacgcccagagacgtgccgtacagcccgacgaagaagatgccgaatccgaacgccgggctcagcaccaccatcggcaacgcacctggcagcgcactcagctcgaagaagcgcccgaggccgcgagcggagggctcgggcgcagcgccacgtgcctgccggttatcggcgacgcgggcagcgcacgggtcggtcgcgtggcctccccgcgcgctgccgtgctccaactctcggtgctcctcgtggagacgccggtatgccgcggtggcgggcaggcgcgaggggttgcgctcgtagcggcagagcgcggcgagcatcaagccgagcgcggcgatcacggcgaggcccaggtagaggttggcggcggggtcggtgttcaccaggaacagcgccagcgcagggccaacggacatggcgagcgcctggcccagcccgtagtagccgataccctcgcccaagcgggagaggggcagcacgtcggctgcggcggttgccgaggccgtggtggcggccgagaagcccacgccctgcacgatgcggcagaccgcgaatacggcgtcgttggagcttacggcaggcaccaatgttccggccagcagcagcgccgccccgccgaccatcacgcgcaaccggccagcgcggtcgacgagcgggccgcacacgatgcgcgccgctgcggccgcagccgagaacacggcggccagcacgccggcgaaagcagcgctgccgcccatgtgcgcgatgaacacggaggttcccgagttgaggccttggcccaccatgaagcagcagagcgtgcccgccaccacgatcacgaacagcggcgaccacaggcgctcgcggctccgcgccccgcggcggtcttgcgccccggctctccagggagctgcacctgcgccaggcgatccgatgggggcgtggttgccgccagcgcccagcgcgtcggggttgccgaattcggcaatcccttcgagcgcgtcgtacgcgtcgggctcctcgagtgcggcggcaccctcggatatatgagcagtttttgagtccatgatgtcatcctacgcctttcggcgtgctccgcatcataccgaacgcttgatttcccgctctgcacgcaagccggttgcgctcgggacggtcaaaaaccgcgcaggtcggctctatcgtgccggcttcctcgccacgtggaccgcggcgatgccgccggtatagttcttccaagtcacatcttcgaatccggccttctccatcatggccgccaagccctgctggtcggggaacgccttgatcgagcgcgccaggtacacgaagccctcgcggtcgcccgtgatgagcccgccccagaacgggatgaggtgcttgaggtagaacccgtacagcgcgcgccacacgcggttcggcggcgtggagaactccaggcacacgagcgaaccgcccggcttgagcacgcggaacatctcggcgagcgcccggtcgcgctcgggcatgttgcggatgccgtacgccatcgtgatggcatcgtagctggcgtcggcataggggatgtcctgtgcgtccaccacctcgaagtcaaccggcacgccgcccgccttgccgtccgcgtagtgcatgcgcgccacgtcgagcatctcgttcacgaggtcggtgcactggatgtgggccgggcgcttcgcgcgcgctacggagaacgtcacgtcgcccgtgccgcccgcgatgtctagcacgtcggcgtccgcctctatgggagcctggcgcatcattccggcgagccatgccttgtacgcgccgaagctcgacacggcgttgaaccgctcgtacttcttcgcgatggccgagaatatctccttcacgcgcgcggacgagaggtctgcgggcgcttccttgccggtggcggtgtcgatgctcacaggtggcgctccatcaggtaaacgtggtcggtcgattggcgaagccccagtatagcgcgacgctccgagaagtcggtcgttatcttgcaggttctccttagatggtcggccagatacgccaccgcaaacccaatggctggacaaaatcgaaggctctggtaagggggaggcgggttgtaggagcgtcctgcttacgcgaaagcacgaaaccgcaggtcgcaataatccgtgacgaagcgggcgaacggggaggccccaaatccccccgttatgtccatgatgaacttggttataaaaaagtgcggtcgccggggaaggcagccgcactctcctacttctccttgcgatcccgcagctcgcccagcttgcgggcctcgcgagcgcccttcgcgccgccggccccctgcaggccaccggcgtcgcgcggcaccgtgcgcgccacctcgccgcgggccagggcctgctcgcgttcgcgctcctcggccatcatctgctccaacagcgggtcgcgctccacggtgcgcgcggcctcggcgcggatggcggcgtagcgcccggcctccacgcccgtgccggcgcgtccggcttccagctgcgcgttcgcagcgtcgaaggcctcgttcgtgttcgcctcggagaacccgggcgccaccacgctgccgaacgcggccacctgcgcgccggcctcgtcggcgagcgcgcgcccgtcgcccatgccgtccacggccagccccttgaacgtgcagttgggcgtgccgtcggcgttccaggcgggcgagagctcgccggtggtctggtccgggtagtcgaaatcgctctgcgcgggccgccatgtgccggtcagcttcgccagcgcgttcgccggctcgttcgtgagccacagctttgccaagtgcttcgcgtgcacgggcttcacgtcgaacgcccagttcaactccgatttctcggccaccgtgttctcggacagccgctcgaactcggccttcagggcccccaggcgcgcgtcgatgcggccggtgccgttgtacagcacgtcgtccagccggttcatctgctcgcgcgcctcgcggatgcgcttgtcggtggcggccgccattcccgcgtctaggatgccgtgctcgcccttgatgcggttcaggtcgagcgccgcgtcgtaggtggcgtccaccatctcgtccacgctcatataggtgctctcgtagttcatgatgtgcttccacgagggcaggatcatgcgctcgcggtgctcctcgaacgtgcgggcgcgcagcttgtagccgtacttctccgggttgtcgaacgcgatggaccccacgtccagaaacggcgccatgggcgaggtcagcaccacgagccgcgggtcgtaccccacgcgctcgtacaggtgctgcacgtaggccccggtctcgcgcacgctggcggccgtctgcttggggatgcccgtcatgaagtacaggtcgaaccgctcgcagttagggtgcgagagcgcgtcgacgatggtgtcctccagctcggccatggtgtaatggcccttgccgaacgccttgcgcacatcgtcgtcgtggctctcggccgagatctccaccgaccagttgcccaggttgtcgtcgagcagctggtagaactcgtcgccccccggcggcgggccgaagaactcgaagccgatagggttgtgcaccttgcccttgagtccggtgatgaactcgtgcgtgtacgcctcgccggcctgcaggaagtcgttcagcacgaagatggggccccacacgtggttctgcacgttctcgatgtcgcgaatgagcagtttcgggtcgcgccacgccacgcgccggcggccgaagtggttcttgaacgcgtaggcgctgccgccgcaggtggcgcagttgcgcgcgcagccgcggcacgtgaggctggccgtcacggggtaggagagccaccccttcatgggcaggtagctggtcatgtcgtggtggcgcagcacgcccttcatggggtaggcgtagtcgagcgagatggcatccatgtcgtcgggcacccagctcaaagggttgatgcggatggcgcccgaggcgtccttccaggtgaggttcgggatgtcgctcaggtcgcccaccggcgtgtgcgtcttggccgcccgcgccacacgctcgatgagcatgcgcatgggctcctcggtggagtcgccgcggaacacgtagtcgatgcagtcgtacttgatcaggtcctcgtggaagatcgacgacgacaacccgccgaacgacaccggcacgtgcgggtgcagccgcttgaggatcttcgccacctcgatggagccgtggcagtgcggcatccagtgcaggtcgatgccgaacatgtgcgagtccaggcgcgcgaggttcttctccacgtcgaagttcttcttgtgcagcatcatcgacgccaggttgtagatgcgcgagcgcagcccgtggcgctccaggtactcgcagagcgtcgtgagccccagcgggtacatctcgaagatgggcgtggagggaaccatgtcggacacgggcccgtacatgatggagcgctcgcggaagtcgtaggtggcgggcgcgtggatgtatgtcatgtctagtgtttgcatgcggccatgaagtatagcaggttccgccggccttgcggccgacggaacaactcgacgctgcgcgagacagggacagggcgagacagggggagagacagggggacggttctcttgtcgcaccgagttcgtgcgacaagagaaccgtccccctgtctcgcgccaccccgccaccccgccaccccgcgatcccgcgatcccgtgaatctcgggcacgagggggcttctcgctgacttactgcgccaacctgggggcgtatgcttcgcctcccgccacgcttcttcccccggccgattgccctgtgtgctttcgccggagagcgcaccggcaatgctatgatacgcagcacacgattattcttagagattggtgggccgtcatgctgttgtgcgcacaatatattctccccatcactttagaaccgttccagaacggcgccgtgctcgtgcgcgacggccgcatctgcgacatcggcaccaccgacatgctgaagctccgctaccccgacgaggaggtcgtcgattacggcttggccgcgctcatgccgggcctggtcgacctgcacacccacctggagaactccgtcatgcgcggcatcgtgcacgacgtgccctacaccacctggatcacgtccatgctggagaagagcgcgaagatggacgtgggcgactggtacgactcggccatcctgggcggcctcgaggcgctctccagcggcatcacctgcgtcgccgacatcaccgcgacgggtgcggcctgcacggccacgcagaaactcggcatgcgttcggtcatctaccgcgaggtgggcgccatggacaagcgccgcgtagactacgccatgcgcgcggcggagaacgacatcatgcactggcgcgaggaggtcgactcgtcccgcatcaccatcggcatcgccccggcggccatgtacgtgtgccacccctccatgttcggcaaggtgtccgacttcgcccgccgcgagaacgtgcccgtggccatgcacatggccggcaaccgcgaggagttcaacttcatcaagtacggctcgtcgccgttctccgtgcacaccatggaccagaagcgcggctacgtggaggtcccgccgtggctgccaacgggcacgacgcccgtgcgctatgcactgaactggggcgcgttcgaatccgacaacgtgctggccatccactgcgtgcatgtggacgacgaggacgtgaagaagctcaaggagtacgacgtggccgtggccgtatgcccgcgctgcaacgcgcagctgggcatgggcgtggcgccgctcaccgagttcttgcgctccggcctgcgcaccggcatcggcaccgactcgccggccgccacggactccaccgacctgctcaccgagatgcgcatcggcatgctggtgcagcgcgccgtgaacgtgggccagttcctggactcggccaccatgctggagatggccaccatcggcggcgcccgcgcgctcaagctggacgacaagataggctctctcgacatcggcaagcgagccgacatcgtggccgtggacctgtccggctcgcaccagacgcccaccaccgaccccgtgtcggccgtggtgaacacgtgcagcggcgccgacgtgctcatgaccatggtggacggcgtgcagctgtacgagaagaacaaatggcatgttgacgtggaggtggcgaagaacatcgcccgcgtcatcgagatccgcggaaaactgaggatgtagcagcatggcgaagcagcagaagctcacggcgaagcagaagagcgagcgcatcaaagccgcgcaggagcgcgaacggaaagcgcaggagcaacgcaggcgcgcggagaagacgaagcggatattcaccgtggtcatctgcgtgatcctcgtgctggcgctgggcattcccaccatggccctcatggtcatgggcgggggatcgtaggacgctggctactggggctcacctgccgtgttcgagtgattcgcccggcccgtgcgcggacgagcaccggcggcgcgcccgcaatgcacgcgcccggcccgtggcgcgtacccggctcgcgcttgcggcgcgcacgacgcgccgcctaaccccttgttttttctgtagagcgcccgcagatgcgttgcccgaacgcgtttgtgatactatgagtcgttgccgcgcggggcgcggctgatacgttgagagacaccgcgcaaaggggtttgctttgtttggtattggtggattcgagctttttctcatcctgctgttcgggttcctcatcttcgggcccgacaagctgccggccatggccaagacgctggggaaggccatcgcgaaattcagggacgcccaagaggagatgaacaaggtcatcaagacggaagtctacgacccgaactccgatgagccgttcaagaacccgctcgacgccttggcgaaggtgggagagatcggcaaggacgacaagaaggaggcgcctgctgcctccggcaagcaggagagcttctccgagcgcaaggcccgctatgacaaggagcgcgccgccaagaaggccgaggaggcgaagcaggccacggctgccgcgacggctgccgccgccggcaccgccacggctgcggcggcgaagccggtcgcgcggcccgacggctcgttcgcgaagcccgagggggcgaagcctgtctcgacggcggcggccggggcgtccccggcgaaggccgaggccgcgaaaccggtgaccgagccgaaggcgaagccctcggccgacgagctgtacggcacgaagccgtccgcgaagaagccggccgcgaagcccgcgacgaagtccgcagctgcttcgggggagaagaaaacctccgcgaccacagcgaggaaaacctcggcggcgaagcccgcgaagacggaggccgagaaggcggcggcccgctcggctgccgcgaagaaggctgcggcgacgcgcgccgcgaagaagaaggcggccgaggaggccgccaaggccgcgcccacgacgacgaacgagaagggggaataagccatgcctatcggaccggcacgtatgcccctgttcgaccatctgggcgagctgcgcatgcgcctcgtgcgcatcgtggcgtgcctcgccatcgccgtggtggtgttctacatggccacgcccacgatgggccagttcctgctccagcccatcttcgacttcctgcccaagaatgccgacggctcgctggcgctgatcgcgctcgacccgttcgagtcgttcgccacgcgcttcaagatatccatctgggcgtctatcgtggcctgctcgccggttatcctctggcagatcctcgcgttcttcctgccggcgctcaagcccaaagagcgcaagtggttcgttcccacgttcggcgcggctgtcgccctgttcgtgttcggaacggtgttctgctatctgatcatcctgaacccggcgttcgagtggctcaccgaccaggcggccggcctgggcgagatagccccgcgcatgtcgtcctacatcgacatgatcatcaagttcgagataggcttcggcttcgccttcgagctgccgttggtggtgttctatctggtgatcttcgatatcgttccgtataagaagctgcgcggcgcgtggcgcaccgtgtacgtggcgctcatggtcatctcggccatggtcacgccggatgcctcgcccgtcaccatgctgctcatgttcgcggcgctgctggtgctgtacgagggcagcctgctcatctcgcgcatcgtgctgggcaagcgcatcaagaagcagaacgaggagcttgcgcgcgaagaggccgaggaagaggagctgaagcaggagatgctggccagaaagaaggccagggcagcgaagaaataaccgtgccgacaatcaggcccgccgcttgatcggcgggccttttcgttaaggagcgcatcatgcacgaactgggcatcatgacgggcgtcctggacgccgtgcaaacgtccgcgaagcaggccggcgccgaccgggtgctcaaggtgagcctgtcggtgggcgagatgaccgaggccatcgaggatgcgctgcgcttcgccttcgaggcgctgtcggagcagcgcgagtatgcgctgtgcgccggcgccgagctcgacataaccatggtatgcccgcgcagccgctgcctggagtgcggcgccgagtacgaccacgaccgcttccacatgctgtgccccgagtgcggcagcttcgccacggagctcatcgccggccgcgagctgcagatcgactcgatagaggtggatatccccgacgacgaggaagaaggggccgccgccgcggaacccggctctgccgacgcataagtttgctatgctgggcgcgactgataaggagccatcatgcagatagatatgaagcaacccatcctcgacaagaacgaccagctggcctcggagctgcgcgcgcggttcgccgagaacaaggtgttcgtgctggatcttctggccagccccggctcgggcaagacgtccaccatcctggccaccatcgacgcgctgcgcgacgagttcaacatcgccgtcatcgagggcgacatcgccagcaacgtggacgccgagaagatcaaggcgcagggcatccccgccgtgcagatcaacacgggcggcgcgtgccacctggagagcgccatgctcaagcgcgccgtggacgtgctggacctggcgcgcctggacctcatcatcgtggagaacgtgggcaacctcgtgtgccccacggacttcgacctgggcgagaacgccaaggtcatgatcctgtccgtgcccgagggcgatgacaaacccctcaagtaccccggggtgttccaggtggccgaggccgtggtgctgaacaaggtggacaccctgcccgtgttcaacttcgatcgcgaggcgttcgagagcgccgtgcgccagctgaatccgcaggcccccatcttccccatcgccgccacgaagggcgacggcgtggaggcctgggccgagtggctggccgaccgcatccgtgaaatccagtaacgggggagcgcccgcaaccaagtagaaacaatcggcgcccatactggccgcaacggcaggcgcgagcgaaaggctggcatatggatacgagcgagcggtaccgcctctgcgtcgaggcgctgcggggctttgcggaggacgccgggttctccgacgcggtcatcgggctgtcggggggcatggactccagcatcgtggcggtgatgtgcgcggatgcgttcggtgccgaccacgtgcacggcgtgctgctgccggggccgtactcgagcgagcactcggtggaggatgcgcgggagctggcgggcaacctgggcatcgaggcgcaggtcgtgtccgtctgcgagccgtacgaggcgttcgagcgcgtgctggcgcgcgcgtgcggcggcgagctcgcggggttggcggccgagaacacgcaggcgcgctgccgcatggtgtgcctgatggcgctttcgaacgcgtacggctggatgctggtgaacacgggcaacaagagcgaggccatgatgggctactccacgctctatggcgatacggccggcgccttcgcccccctcggcggcctgtacaagaccgacgtgtatgccgtggcccgttggcggaacgcccaggccgaggctgcgggcgccgtgccgcccgtgcccgagcgcgtgttcgcgaagccgcccagcgccgagctctcgcccaaccaggaggacgagaaaagcatgggcatagactatcccacgctcgatgcgctgctgcaggcccacgtggagcgcggcctgggcgccgatgcgctggtggcggaaggcttcgacgcggcacaggtcgagcgcgtgctgtccaccgtgcgcgccaccgccttcaagcgcgcgctggagcccccgtatccccaggcgccgttctacgcgtagaggtgagggggcgcccccccatctcgcaaactccgcaggccggacggcgcccctctccccatgcgaagattgcgtgacaaccctctgtcgccctgccgtgcccgcctgcgcggtcactatactcggcgcatccggtaatcaacgtgcattcccagcaaaaggagccgccgcctcatggaacgtcgggcattcttcaaacttgtaggcgcaggcgccgtcgtcgcggcgggcgggggcttggccgcctgctcgtcgggcgcggtgccgtctccgctcgcccctgccgccccgaccgaggaggagggaccgcgcgttttcgagagccccgacgtcagcttctcgtccgatgtggacgtgctcgtggtgggcagcggcatcgccgggctgtccgcggccatggcgccgctcgaggcgggacgctcggtcatgatcgcggagaagctggagctgctaggcggcgagagctactcgtccaccggcgtcatgcacgtatccggcagcgcgctgcagaagcaggccggcatcgaaaccacggccgagcaggcgtgggacacgcgccgccaggagttcgccgacgccggcatcaccgacctcgacttcgccaagcggttgttcgtgaccgcgcccgcgtgggttgaccacctggtggacgagtacggcgcccaattcgagaaccccgccgaccacgtgaaggcgggcgcgtcggagcgcatcctgctgccgaagcgcgggctgggcgacatggagagcatcatgacgccgctgcgcgatgggctgtcgtcgaagggcgctgcgttcgccaccgggctgcgcgcctcggcgttcgtggtggatgcgtccggtaccgtgtgcggcatgcgcctgcgcgacgcgaagacgggcgccgccaccgacgtgcgggcgcgcgccgtggtcatggccaccggcgggttcgcctcgagccagccgctcgtgcacgccaacgtgcccgcccaggagcgcatcggctgctacaccaccgcctcgatgggcgagggccagctgctgtgcgcgcacctgggaggccagctggacgatatgggcaaggccgcgcccctgacgagcgacctgcccgaggctgcggcctggggcctgttcggccccgtgctcgtcgtggacgcgctcgggcgccggttcgcgcgcgaggacgacccgaacgctgcggccgacgcctgcgtggtcggcgaccgcgggtactggtggacgatcttcggcaagaagctgtccagcggcgcccaggcgcgcagcattgcgcaggttacgacgaagaacgcgaagcgcctggcgggacccttcgacgacgtggaggcgctggcgggcggcctgggcatcgcgtccgacgcgctcaaggcggtgttcgacggctacggcgaggcggttgacgccggcaaggacgatgcgttcggccgcacggcgttccttcaggagatcgagccgccgtactacgcgctcaagcagctccctgtgcgctacaagacgcgcggcggcgtgcgcaccgatgccgacggccggctgctgaacgcggcgggctcggccatcgcgaacgtgtacgcctgcggctcggtggcagccggcagcgtggaggggttggcgacgaacggggcgttcgggttgatcgtggggcgggcgttggcgaaggtgctcgacgagggggacgcgggagagtagctttcggcttgaagcacggtctgcggggagaaggagggcgaggccccggccgtttcgaccggggcctcgcccagggaggggtggagggtcgcttcggttacgccttcagcgcctcgacgacggccttgccgctgaccaggccgctgccggcgttggggctaaggtcgctgccgctgtcggcgacggtggagccgcagcagtacacgttggggatggggttgccgtccttgtccgcgagctggctttccgtggtgatcttcatgccgccgtgcgtcttgtagcggaacgggaaatgcttcatggcgtagtacggcgcggcgagcgacttcaggaacagcttcttgccgaactcggtgtcctcgccggcggccaccatggcgtcgtacttctcgaacgtctccttgagcgtgccggcgggcacgtccatggccgcggccagctcgtcgagcgagttgcacgggcccacgaggcggtcggggctgcccttcatgttcaggtcgacgttccacttctggctgccgttgatggtctggtcgtcgaagatggtccaccagaatcccagctccagctcggcggccttgtcgggagagtcgtggctctggtcctccttgatgaagcgacggccctgcggcgtcacctgcacctgcggcgagaagtagccccacaccgtaacctgggccaggtcgctcatgcggttggcctccatgtccatgtgcgtgtacacgccgcccagcgctcggcacatctggtggccttcgcccatggagtgcacggtgagcggcccgaggcgctgctggctgggcaggtaggcggacaccatctcctggttgcacgagaagccgcccgtggccacgatgatcttctgcgccttgatgtcgacgggcttgttgttcttctcgtcgttgaagcgcacgccgatgggggtgccctcgccgtccacgatgaagttcgtggcgcgcaggttcagcttgtacgtggcgcccttcttctccaggcccttctgcagcggcgtgagcacggcctgcatgtcgccgataccgttgccgggcagcagcatggacgtgggcgcgcccgtgttcatgtagtcggtgatgggctggaacaccgcgccgtagtcggtcgccacgcggtcggcccattcggtctggtagaggtagacgttgtgcttgtagtccatgtcgtcggtctcgcccttcttctccagaatgggggcgtaggcctgccacttcgtctcggggtctccttcgatgccggcgtccttctgcatctttgagcccgccacgttcatgacgccgcaggcgatgaagctctcgccgcccacgcggtcgagcttgtccacgagcatgaccttgtggcccgcctccaccgggtccatggccgccgacatgccggcgatgcccgtgcccaggatgagcacgtcggtttcctcggtgaagctcaccggcgaggttcccaccacggtgtcgccctcgctcgcgctgccgcccttgccgccgccgttgggcgcgcagccggccagcgcgccgccggccacgagcacggcacccgaagccacggctgccttgaggaagttgcgtcggttcatgctgttctccataataatcctccctgttccctcttcttgtccgcctcgcgccggccgctgccgggcgtggggcggaatccctgtcggtcgccctcgcgacgatgcccccactctaggtccgcgggccgcccccgtcaccgtccgtttcgggctatattgccttctgccgccgttatcctgcggtttcgtctcgcgtacgcgcaggcgtttccggtatcatgggcgcatgatgaatgcggggaggggaaagcgcgccgcagggcacgcgtcgagcgcagaggggccggggcgcgcagcgccggccgcgtcgccgcgcgcggtggacccgcggttgttctcgctcgtggtgatcgtgggctacgggctgttccgtggcgtgaacgccaactcctacctgtcggcgttcgcctcggtggaggcgccgttcctgttcgttcccgatctgttcttcaacgtggtggtggcctgctcggtggtcgtgtgctccgtcactgtcatcgcgctcacgctgcgcgggcggttggggccgctgtccatgccctacgtggcgcccgcggcgctgttcgtagcggcgaacctgtgcgccttgttcggcgtgttctcgtggatgccgtccgatctggcgctcatcgtgccgggcgtgctgctcggggtggcatcggtcatgctgtcgctcgtgtgggtggaggtgctgtcctgccaggagccgcgcgccatcgtcacgcagatcgcgctcagcatgctggtgaacatggtgacgtcgtcggtgctctcgggcctgtccgggggcgcgcgggcggttgcaagctgtgcggccctggtcgtcatggtgctgtgcgcgtggtacgtgcggcgcgcgctgcgtgcgggtgcggcgggcacgagggcgggcgggcgtcggaaggacgcgccgcgcggatcgtaccgcgacgcgttcctggagctgggagactcgctcgtggcgttctgcgtcatggaggccgtgatcgggctgctcaacagcttcatgctggccgagtccgtgacgttcgccgggtccggctcggtgtcgggggtgggcatgctcatcggcatcctggcgttctgcgtcgtcgtgttcgtggtgcagcgcatcccgcgggtgtccacggcgttccgcgtgctcatgcccatcatcgcctcgcttttggtgttcctgccgtttctgggcgagcagttcaacctgttcttcagcacggtgctcttaggcggctactacttcatcgcgttgctcatcacgtacgtggtggccgagacggcgcacgtgcggaacctgtcgccctacgtgctcatgggcgcggccgcgtgcctcgcgcgcgtctgcttggccgcggcgctcttgggcgggcacgccatcggctcgctgccgggcggcctgttcggcgagagcgagcacatcatgcgctatctggtggttatcatggccgtgatctacgcgctgtcgctggcggccgtgctcgtgtcgcgcgaccggcgccgccgacgccggggcgacgcggatgcaggggcctcggctgcggtcccggcgccggcgggtgcggcggaggcggcgcctttgccggcgggcgccgcggcggagggcgacgacgcgttcgatgcgcggtgcgcggccgtggccgcagcgggcggcctcaccgagcgcgaggccgagatcatgcgctatctggcacgcggccgcacgaaagcccacattgccggcgtgctgttcgtgagcgagaacaccgtgcgcagccatgtgcgcaacatctacgccaagctcgaggtccacacccgccagcagctcatcgacctcgtggaggaagagcgcggcgcggacggcggcggcgaggctcccggctgccggtaggcgcgttcggatactccaattacctcggctggtgtatggcgcggggcggccgggtcgcgtaccatggcaggcatggagaacttccttgtgaacaaccgcccgatggcgcccaaggactgggcggtcgacgtcgccgtgatgctggcggcgttcctgttcggctgcgggcagctcatgctcacggcctcgtccatcgtgatccccgacctggagctgcgccagtacctgggcatcgtgaacgtcgtgcccgatacgtcggtgctcgtggcgctggcgctgaccacgctgccgctcgcggcgcggcggcggttcccgtggcccgtgttcctgttcgtgctcatcacgttcctggggctgcagggcgcgttccggggcttctcgctcacggtggtgggccctgtggtggcgctgtacaccatcgcctgcgagcgcgggcgcacggaggcagccgtcgccgtcgccctggccgtggcgggcgtgctgttcgccgacgccccctcgcgcacggcgagcctcgccttcttcacgcgcttccagaacgtcgcgctgctggcggccgcggcgctcgcgggctacgcgtaccgcacgcaccgcgcctacgtggcggagacggagcggcgcgcgctcgaggcggagcgctcgcgcgaggaggaggcggcccggcgcgtggaggaggagcgcgtgcgcatcgcccgcgaggtgcacgacatcacggcgcactcgctctccgcggtgagcatccaggcggctgcggccgagcgcctggtcgaccgcgaccctgcagcggcaaagctcgcaatcgccgctgcgcgcacgacggcgaaggacgccctcgaggagatccgcggcatgataggcgtgctgcgagccggcgaccccgcggccgagacggaacccacggccggcaccgagcgcctggacgacctcgctgcctacttgcgccgtgccggcgtggacgtggcgctggatgcgggcgggtacgaccgcgccgccgtgccggcgttcgtggacgtggcactgtacggcatcgcccgcgaggccgcgacgaacatcgtgcggcacgccggcgcgcatgcggcgacgatacgcctggctacggggccgacaggcgcgaacctgtcggtagaggacgacggcaggggcgcggcggccgagacggacgggcgcggccacggcattgcgggaatggccgagcgcgtggggcttctgggcggcacgttcgcagccggcccgcgcccgcgcggcgggttccgcgtggaggcgcgcattcccctgggagcggagaaggaggcgtcatgatcgagaggcatctgcgagaggcgcgctcggcggcgggggaggtgccggtccgctcggcgggcgagcgtcctctgcgcttagtggtggccgacgaccaggatctcgtgcgcagcgggttccgcctgatcctgtcctcgtacgacggcttctccatcgtgggggaggcgcgcgacggcgaggaggccgtggagctcgctcgccgcctcgtgcccgacgtggtcctcatggacatccgcatgccgcacctgaacggcatcgaggccacccgcgccatcacgggcgatccggcgctcgccgacgtgcgcgtgctcatcctcaccacgttcgacatcgacgagtacgtctacgacgcgctcgcggccggggcgggcggctttctgttgaaggacgccgagcccgacgacatcgccgccgccgtgcgcgtggtggcggccggcgacgcgctcatccagccctcggtgatgcggcgcctggtggagacgttcgtgcgcatgcgccctgcggccggtgccggcgtggccgcaggggaaggcggcagcgcgttctccgcgctcaccgagcgcgagcgcgagatactggtacaggtggcccgcggcatgacgaacgacgagataggcgccgagctgttcatctcgcccgccacggtgaagacgcacctcgcccgcatcatggcgaagctgggcgcccacgaccgcgcacagctggtggtgagggcgtacgagggcggcctcgtgaggccgggcgagcgctagcatcggtcacggcgcggcggcatgtgcggccgcgcccgtcggtcggcgattgcaccgcagcgccgcgaagcgatcgtgctgccgcctcgcgtccgcttcgcaaccccgcccgcgccgcctcgttcgcgctgcagaatcgtcctgctcccgctcccgccgccctgcaagcgccgcccgcgtctgtgctgcagcgctacgccgcgccccttcgcaaccccgcccgcgccgtcccgcgcccgcctcgccggccactccccagaccgtttttgtgcaaaagcacaaaaactttcaggagtccatcgaacgaattgtggcgattatgcaaaacctcagtcaagggcactgagatttcctcaattttgcttgcattcgctaacgaggctgctatgataacgcaatgtttagcactcgttacccatgagtgctagcagtcaccgcaacggagtggttaaatagcaaacgtgctacaaccagtttcggacaagagacggacgaaaggaaggctacgttatgaacttgaaaccattgggtgatcgcgtcatcatcaagcaggacgaggctgaggagacgacggcatccggtctgtatctcgctaccgaagcgaaggagaagccccagacgggcaccgtcctggccgtgggcgagggcaagctcgacaaggacggcaagctcattcccgtgccggtcaaggaaggcgacaaggtcctgtacggcaagtacggcggaaccgagatcaccgtcgacggcgaggacgtcatgatcctgcgcgccgacgacctgtacgcggtgttcgcgtaaaccgaagcaacccaagctaacgctgaaaggataggcacactatggctaaagagatcaagttcgaggccgacgcgcgcagcgcgctcgcggccggcgtcaacaagctgtccaacgccgtcaaggtgacgctcggccccaagggccgctacgtggcgctcgagaagtcctacggcgcccccaccatcacgaacgacggcgtgaccgtggccaaggaagtggagctggaggacccgatcgagaacatgggcgcccagctggtccgcgaggttgccgtgaagacgaacgacgtggccggcgacggcaccaccaccgcaacgctgctggccgacgtcatcgtgtccgagggcctgcgcaacgtgacggccggcgccgacgcgctgggcatccgccgcggcatccagaaggccaccgacgccatcgtcgacgccatcaaggccgacgcgacgcccgtgtccaccaaggagcagatcgcgaacgtcggcaccatctccgccggcgacgccgagatcggcgagaagatcgccgaggccatggacgcagtgggcaacgacggcgccatctccgtggaggagaacgccgcctcgttcgacttggagctcgacatcgtcgagggcatgcagtacgaccgcggctacatctcgccgtacatggccaccgacatggagaagatggaagccgtcctctccgacccctacatcctgctcaccgaccagaagatcaccagcatccaggacatggtcccgctgctggaggaggtcatgcgctccggtcgcccgctgttcatcgttgccgaggatgtggagggcgaggctctggccaccatcctgctgaacaagctgcgcggcacgttcaactgcgtcgccatcaaggcccccggcttcggcgaccgccgcaagcgcatcctggaggacatcgcagccgtcacgggcgcgcaggtcatcgacaaggacttcggcatgaccatggccgacgccaccatcgacatgatgggccacgccaagacggtcaaggtcacgaaggacaccgccctcatcgtggacggcgccggcgacaagaagaacatcgaggaccgcatccaccagatccgcgccgagctcgagcgcgtcgactccgacttcgaccgcgagaagctgcaggagcgcctggcgaagctgtccggcggcgtggccgtgctcaaggtgggcgccgcgaccgagtccgagctcaaggagaagaagtcccgcatcgaggacgccctgcaggcgacccgcgcggccgtggaagagggcatcgtcgccggcggcggcgtggcgctcgtggacgcgctgcccgcgctcgacaacatcgcgtcggtcgacaaggacgaggaagtcggcgtggccatcatccgcaaggcgctggaggccccgatgcgcgccatcgcccagaacgcgggcttcgagggcagcgtcgtggtggagcgcgtgaagggcatgggcaagggcgaaggcctgaactgcgccaacggcgagtacggcaacatgatcgagatgggcgtgaacgaccccgtcaaggtcacgcgcaccgcgctgcagtccgctgcctccgtggcggccctcatcctcatcaccgaggccaccatcaacgacatcccgaaggacccggatccggcggccctggctgccatggccggtgccggcggcggtatgggcggcatgatgtaagaccccccggttccggcagccgcccggccgccggaaccacctgagacgctgcgggcgcttacgcgcccggccagcgtatccctaactcggagaacggggcggccgatgggccgccccgcttcgttttctggccggcgcgttgcttttcacgccagccgccgggtcgcccacagcttcgggtgcgatgagggcgatgcggaggcggggctaaatgtcgcccgcccggctagcgctccttcttcgacacgagcagcaggatgccgcctaccacggtcacgaagatgagcgtgcacacgccgaacgccaccgtgttcggctttgtcccctggtaaacgccccagcaatggacgctcatcgggatcatccaagcgagcgggatgatggcccatcccaccgagatagtggagatgaggcagaagataaatgcgatcagcctgagcgtccggtcgctctcggtcgttgccgacggatagtaaacgggagcgacgacgggttgcccgtaggcgggggcgcggtagcctccctcggggcaagccgtcggctgggcgtccgcgaaatcgttggtccactgcatgccgtcccaatagcgaagcctcgtcgcgttccctgacgggtctggataccatccagcctgctgcgttcccatgctgcctcccccggcgtctatgaaagtgcggtaatgccttccagtatagcccatcggctcgcatagccgccccgtagcacgtgctgttcgacgcggataggcctgcttatcgatacgctccgccctgcgctcgaggtcaggcgttgtccccccccctatcgggcggaatcctcgccctgcttattgccggttgcaatcggcggcggaaagaccgcacgcatcggttccatgtgactgttcggctacgtcgcggcttgaacgcccctgttggactacaatacgaacctatggaagaattcatgcacatagccgggcatgtcctggagcattccgtcgccgacacgctgtacctcgttccgttcctcttcgtcacctacctggtgatggagtggctcgagcataagaccggcggcaaggcgcaggcggccgtgcagcgcgcaggagccgcgggccccatcgtgggagcggtggtgggcgtggtgccgcagtgcgggttctcggccgtggcggccacgctctgggccgggcgcgtcatcacgctgggcacgctgttcgccgtgttcctgtccacgtccgacgagatgctgcccatcttcatcgccgagcaggtgccgctggacgtcatcctcaagattctcggcgcgaagatcgtcgtcggcatggtcatgggcttcatcgtggacgccggcatgcgcctcgcgcggcgcatcgatgcgccgctgcacatccacgacctgtgcgagcgcgaccactgccactgccatgacggcgagggcggcatcctcaagagcgcgctcaagcacacgctgcaggtcacggtgttcatcttcgtcatcaccatcgtgctgaacggcgtgctggaggtggtaggcgaggacgcgctgggcgagttcctcagtgcgaacccggtgctctcggtgttcggatcggcgctcgtgggcctcgtgcccaactgcgcggccagcgtggtcatcgcgcagctgtacgtgagcggcgtgctgggctcgggcgcgatgctcgccggcttgctggtgagcgcgggcgtgggcctgctcgtgctcgtgcgcacgaaccgccactggaagcagaacgtcgccatcatcggaggcctgtacgcgatgggcgtgttctggggcctcattgcgaatgcgctcggcatcgtgttctagggccgcaagcgcggtggcaaatgcagtattccggtcatttctgtgcaagcttctgatctggaacgatagtgcataataccagttcaaagcgcagaaaatgaaatgcacaaaaatgcacggtatattacatccaggccagatcttcttcggaatccgaaaaagattgccgatgggcctctggcatccgaagcgccctcaccgctatagtatgaccagaccgcaaaacgagaggagcatcgcccatgaccgcacttgaagccggcatgacgcgcgacgaggcgttcgcgctgttgcaggagcacaacaaggacccgttccatatcgagcacgccgagacggtggagcagaccatgcgctacttcgcgcgcgagtacgaccccgagaacgaggagttttggggcatcgtgggcctgctgcacgacctggactgggaggagcacgacgacgagcccgagctgcacaccatctacgcggccaaggacatcgaggccgccggcggctcgcccgagctcatccgcgccatccagagccacacgtcggatttcaaccccgagcttcccaagcccgagctgcagatggagaaggtcctgttcgccaccgaggagctgacgggcctcatcggcgcggccatcgtcatgcgccccagcaagagcgtcatggatttcgaggtgaagtcgctcaagaagaagttcaaggacaagcgcttcgccgccggcgtgagccgcgacgtcatccgcagtggagccgagatgctaggctgggagctggacgagctgttcgcccgcaccatcgaggccatgcagtccttcgcgccggacaaggacacgttcgttcccgccgaggggtaagggagacctcccgagatcgctcgcgccctcttgccgcagatgcagcaggagggcgcacgttttgcgcttgggcgcacgctcgggcagaggcgaggccggcaagcgcgcggccggaggtcttccgagcccttcccaggccctaagattcgtccacttccctcagccggcgccgcatggtgccgtgcttgcggctgacgaacaggtacgccgccaacgcgacgatggccaccagcgacatagcctcgaacaggccgcggaagcccagcactggctgcaccaggcccagcagcagcgggcccaggcccacgcccacgtccagcaggatgtagaacgtggagttcgccaggcccagccggtcgtcgggggcgatgcgcacagccagcgccagcccgcttgcctgcacggtgcccacgccgaagcccagcagcgccgccgccgcgagcatggccgcgggccggtacacggttgccagcaggcccatcccgacgatgaacgcgatgaacgccggcaccatgaccacgcggtcgcccttgcggtcgaacagctttcccgtgaagggccgcgtgacgaacgtggccacggcgtacaccacgaagaagaagctggcaggctgttccagaccgctctcggcggcaaacggcgtgaggaacgcgagcaggctggagtagcagaagaacagcagcgcgcacacggcgccgatgggcagcacgctggactccaggtagttccccaggtcgaagcgcggcacgcggaagtcgccggcacgctcgtcgcgctcgtcgcgcgctatctcctcggcagcctcctcgatatccgcgtcgctctcctgcgccgcctcgggcaccttcagctgagcggcggccagaaggctcaagccggctacggcggctgtagtcacgaacaaggggaagaagccggcgttttgcgagaggaacatgcccaggaagggtccgatggccgctcccaaggtcacggacagcatgtagtagcccaccccctcgcccttgcggctgtccggcacgagcgccgttacgatggtgccgatggtggtggagcacaccccgtaagcgaagccgtgcagcaggcgggtggcgaacaggggggcgaacccgagcccggccaagtagagcaccgagaacaccacctcgccgatcgcgcccatgaccagcagccgcttgcgccccaccttgtccatgatgcggccgctgacgaggcgcgccgcgagggcaccgatgatgaagatgctcgcggccaggccggccgtggctgcgggtgcgtcgtaggttttcatggcgtagtcggccaccacgaccatgaggccgtagtagttcaccatgagcaggaagttcaccgccgtgcccagcgtgaagtccttcgtccagagcctcgcctgcgttgcagccgacatgctagcgcgccgccttgtcgttcggtgcgccggtcaggttcgcgccctgggagcccgtgcccggggtctccgctgcgggtgtcgtggctgccgattccccggcgccaggcgcgtccgccgcggctgccatagccccgccggccgctcctgcgccgggtgcgtccttcgcgatgagcacggctacgggcgacccctgcaccacggcatagctcacgctgcccaggtaccccttcacgccgcccttgccgcggctgcccatgacgataaggtcgcaaccctcgtcctcggcgcatttcagcagcaggtcggccggcgacgtgcccttcagcaagtgcgcgtgggccctgttcggcacgcgctcggccagctgctgcagcgcggcgtgaacgcggttcgcctcctcgataagcggcccctcggcaccggtgcccagagcgaacagcttcagcacgtgcacgaacaccagctcgatgcgctcatcctgcgcgccgatggactgggcgagatcgagggctttcgcagaaggggtcgatccgtcgtaggcgacgagaactttagagcaccacatggctatcacggcctttcgggagggcgggctggcggaagacggcggggatgccgcgcggaagcgccgcaggttacgcatacccctcgattgtagtaccgccgaggcggcgcgtatgttacggcttcgtttcaaccgggaggcggaatgtgcctggccggccccccgttcagcatttcgccggggcacccttttgcggtgccgcagactgcgctcttctcgtgcgcaggcgggtgttgcgaacattttcattgaccgtctcacccgccccggctagaatagatactcgcgcattgcagacgtgggccgttagctcagctggtagagcaggggacttttaatcccaaggtcgcgggttcgactccctcacggcccaccatttcaacgtctgcgcagacggcgcctggcaagacgcgccgcgttgcaagcgctccgcaccaaactgggccatcgtccaacggcaggactctggtttttggtaccagctatccaggttcgaatcctggtggcccagccagttggtcggttgcagccgtcgtaggttgcgcgaccccaagccgacaaggcggctgcgcttggcgcgaatacctggcggtcccgtttctccggcgaggaccgcgcggcatcgaaccgcacgcctggcaagcaggtgacttcgaaccagcgggtttgttggtgttgtgcgctcgtttattttcttctccctttccccgaaacttttggtatcatctatggttgctgtttagtgacgatttgcttgaaggagcacttttgaccaaagaagatgttatcgagctcgaggggaccgtcctggaggcgttgccgaacgctatgtttagggtggagctcgaaaatggccacaagatattggcccatatctccggcaagatgcgtatgcactacatcaagatcctcccgggggacaaggtgacggtggaactgtccgtctacgacttgaaccgcgggcgcatcacgtaccgcttcaagtaagcgcgcgaatctgcacggcctgtgaaccaggtgtgcgcattttgtgtgccatgcggcacacggcaagcacgaaaacaaccgcctgcggctgggcgtatgtatagattaaggtacacataaaccgaaaggaattgattatgaaggtacgtccttcggtcaagaaaatgtgcgacaaatgcaagatcatccgacgccatggcaaggtgctcgtcatctgcgagaacccgcgccacaagcagcgtcagggctaggaaagaggagaatcatctatggctcgtcttgttggtgtcgaccttcctcgcgacaagcgcgttgaaatcggcttgacctacatctacggcatcggtctgaccacctccaaaaagatcctcgccgaaaccggcgtggatcccgacgtccgcatcaaggacctcacggaggacgatctgaccaagctgcgcgactacatccaggagaacatcaaggtggagggcgacctgcaccgcgaggtttcccagaacgtcaagcgcctcatggagatcggttgctatcgtggcctgcgccatcgtcgcggcctgcccgttcgcggacagcgcacgcacacgaacgcgcgtacccgcaagggtcctcgtaagcaaatcggcggaaagaagaagtgaggtagcttaagtggcagcaaagaaaaacgtgcgcacgcgcatcaagcgttccgagcgtaagaacatcgccgtgggcgccgcgcacatcaagtctacgttcaacaacaccattgtgagcatcaccgatccccagggcaatgtgatctcctggcagtccgccggcacggttggcttcaagggctcccgcaagtccacgccgttcgctgcgcagatggccgccgaggccgccgcgaagacggccatggagcatggcctgcgcaaggtggcggtgttcgtcaagggcccgggttcgggtcgcgagacggccatccgctcgctgcaggccgccggcctggaagtctccagcattcaggattgcacacccattccgcacaacggttgccgtccgcgcaagcgtcgtcgcgtgtaactgaaaggatcgaagtattatggctcgttatactggagcggactgccgtttgtgccgtcgtgaaggtgcgaagctcttcctgaagggcgaccgctgctacacggacaagtgcgcgatcgagcgccgcaactacgcgcccggcgaggccggcaagaagcgtatcaaggaaagcgaataccgtctgcagctgcgtgagaagcagaagaccaagcgtatctacggcgttctggagaagcagttccatcactactacgagatcgccggccgccagcagggcgtcacgggcgagaacctgctgcgcatcctcgagagccgcctggacaacgtggtgtaccgccttggcttcgcgaagtcgcgcgccgaggcccgtcagcaggtgcgtcacggccacatcaccgtgaacggccgccgcgtggacatcccgtcgttccgcgtgaaggcgggcgacctggtggccgtggcccccaaggccaaggacctgctggtcatcaagagcgcgctcatctccaacgagcgcgtgcaggtgccggcctggctcgaggttgacatcgagaaactgcaaggcaacgtgcttgctctcccgcaacgcgatcaaatcgatctggacattcgcgaacagctcatcgtcgaactttactcgaaataatcgcggcatagtaaggaggcttacacaacatgacagagttcatgaggcctacggtaacaacggaagaagtcaacgaaactgtcgcgcgtttcgtcgtggaaccgctcgagcgtggctacggctacaccttgggcaactgcatgcgccgcgtgctgctctcgtcgctggacggggcgaaagccaccgccatccagatcgagggcgtgcagcatgagttcacgacggccgagggcgtcatcgaggacatcacggacatcgtcttgaacgtgaagggcctcgtgttctcggcactcaacgaggatatcgaggaggccacggcccatgtgtccgccgagggcccctgcacggtgacgggtgccgacctggacatccccaccgagttcacgctggtgaaccccgagcacgtcattgccacggttgccgacggcggccagctggacatgacgatccgcatcggggtgggtcgcggctacgtgtccgcggagcgcaacaagcgcaccgaggaccccatcggcgtcatccacgttgactcgttgttctcgccggtccgccggtgcacgctgaacgtcaccgacacccgtgtgggtcagcgcaccgactacgacaagctcgtgctggaggttgagaccgacggctccatcgcgccctccgaggccgtgtgccgtgccgccaacatcatcaatcagtacatgggggcgtttttgggcctgtccgacatcgtggacgaggaggaaggcgaggttccttccatcttcgcgcccgaggggcaggagtccaatgccgagctggacaagcagatcgaggacctggacctttccgtccgctcctacaactgcctgaagcgcgccggcatccattccgtccgccagctcgtcgagttctccgaaaacgacttgctgaacattaggaactttggtgcgaagtccatcgaggaagtgaaggacaagctcatttccatggacctcaatttgaagctttaggagatacgagatcatgagacactacaagaaggggcgcaagctgggcaccgacaccagccataccaaggccatgaagaagagcctggtgtgcgcgctgctggcgaacgaccgcatcaagacgatcgactcgcgcgccaaggagatccgccccgacgttgacaagatcatcacgtgggcgaagaagggcgacctgcattcccgccgcctcgccattgcggcgctgggcgacaaggagctcgtgcgcgagatcttcgagaaggtcgcgcagggcatgttccaggaccgccagggcggctacacccgcatcatgaagctgggtccccgcaagggcgacgacgcccccatggttatcatggagctggtgaccgagccggtgaaggcgaagaaggacgaggccaagcccgctgccaagaaggctgcgaagaaggccgccccgaagaaggtcgagaaggccgacaacgaggccaaggccgaggagaccaaggtggaggccgaggaggccaaggccgaggaggccgccgaccaggccgaggaagccgccgccgagaatgcggaggccgccgaggccgaggccgtggagaaggagaaggccgagtagcctttccccgacctgcgcataagcactgcatccgaacgggagcccacgggctcccgtttttgcatatgccaaagcagctcggccagtgccgccaccaatgcgtcaagaacgcgttttcccgcggttgcgcggcggttccgcacgctggactaccataaaggggagcgggcgcacggcgcggcccgccggcaatccgcagctaggaaagaggctcctatggaagaccgtggacccgcagacgggaagcctgcaaccgacggcaagatgaacgtggcatggcacatgaaggacatggcgggcgagctgcagcagcacgcgcaggacgctttcggcgacgtgggcgaccatgcgcagggactcgccggcgaggtggcgcatcactcccagcaggccgcggtcgaagtgcgtcgcgagatacccgtgctcatcgagcacgtgcgggataccgtaatcgacctgttcggcaacgtgcgccacaacgcgtcgcggaagtgacgggctcgccgccctgctggttcgtcgcggtagcgtcgcgccgccgccctgccgatgcgtcggacgccgtctccggtcccgaatccaagcgttgcacgttcgtcagcgtgcggaaaccggtcctgtcggggcggtggctacaataggctggacagcttaccttcccctggcgggattcccgacgaaaggagccgaaccatggccgagaccacgacgaaagaggatatccgcatcgacgcggacgaagcggacgagctgaaccgcgaggcggccgacgacctcgagcgcatcgagcgtgccgtcaagcaggaggccgaggagtacgtcgaggccgtcgacggcgacggcaacgagaaggagtccgtggaggccgccgccaccgcgttcgacttcgacgaggcggaaggcgagacggagcgtctggccaacgacgcgtccgagcgcgactagccgttcccggcagcgcaacgggcgcgccggtgcgacgcgggcgtcgcgaagggcgcccgttccggttcgcctggtgcatcctgcgctccctgtgcgcgaaccgttgcggcgccgttttcccccggaagccgacgccgggcaccccatccctagaatggggatgacacagaaccttcccgaaaggagcagaaatggtcgatcaggcttacaagacgggcgacgcgtccgtcgatatgaagaacggcgcaaaggacatggctcacgacgtgaagaacaacgtgaaggacgcgttccacgaggcgaaggcgggcgtgaacgagcgccgcgccgaggacgccgccgccgaccgcgagcatcaggtggcccagcagacgggaagcaccgacgccgccatgcgcgcgcagcagcacgagaaccgcaaggaccagaagtccgagggcttcatggactccgtcaaggattcgctcggcaaggccggcgaggccatcaaggaggccgcgtccgacgcgaaggacaacatcaagcagggtgccgagaacatgaaggaacgcatgtagcgcccacgcgccctcctgcccctccgaagcccgtagcatgagctgcgggcttctcttttccatccgctcggccgcgccgtctgaaaggcaattccatgggttcttccgctgcatctccctccccaagccggaccgtccgggccggtcatggcaagggattcgtcctcatcgccgccgtgtacctgctgggcctgttcattggcgcgctcgacaccggcatcgtcacgcccgcgcgtaccgtcatccaaggcgacctcggcatcaccgaccagatgagcgtgtggatcatcaccatctacacgctggcgtacgcggcggccatcccggtcatgggcaagctggccgaccgctcggggcgcaagcgcatctacctggtcagcatcgcgctgttcggcgcagggtcgcttttgtgcggtctcgcgcaggacgtgggaatcttctggatgctcttgggcgcgcgagccgtgcaggcgatcggcggaggcggcatcgtgccggtggccaccgccgagttcggcaccacgttccctcccgagaagcgcgggttggcgctgggcctggtgggcggcgtctacggcatcgccaacatcttcggcgcatcggccggcagcctgatactctcgctgttcggccagacgaactggcagttcatcttctacgtgaacgtgcccatctgcgcggttatcgtcgcagcaggggtgttcgtgctgccgaacacgcgcgccgaggaggtgaagcccatcgacggcttgggtatcgcggtgctcgtgacgatggtgctgtcgctcctgtacggcctgaagaacctcgatttcttcaacgtgggcgcttccctcgtgtcgacggacgtgtggccgttcctgctggccttcgtggtgctgctgccgctgttcgtgctcatcgagcggcgggcggccgacccggtgctgaacctctcgtacttccggaaccgcgatatcctcgtcacgctcgtgctgtcggtgatcacgggcgtcatcctgatggggatcatcttcatcccgcagttcgcggagaacgtgctgaagctgccctcgggcagcggcggctacgtggtgatcgtcctcgcggcgttcgcgggcgtgggggccccggtatcgggcaagctcatcgatcggttcggcgtgaaggccgtgctggccttcgggcttgccgcctcggccgccggcgcgctgttcctggcgctcgtggcgacgcggttcgcgaacctggcgacgctgatcgtcagcctggtggctatcggcatcgggatgggcttcaccatcggcacgccgctcaactacatgatgctggcgaagacgaaggagagcgagtcgaactcggcgctggcaacgttgtcgctcgtgcgctcggtggggacggcggtggccccggccgttctggtggcgttcatcgcgcatgcgggcatggccgtgcccgatcgcatcatgggcgtgctgcccgacgtgccgaacgggccttcgatggcgcagctggcaagcggggagggcgggggcgcgggactgcctcccgacctgcagcagctgatggagaattcggacgtgacgacgatcgtcggcagcgtgaagacgttggcgaagaccgagatagcgcaagcggcgacggccgccgggatgccgtccgaggcggtcgatgccgccgaggaccagtaccttgccgccatcgacgagcgggcggggactatcgaggacacgttccagagcacgctcgacgaagggttccgcggagcgttcctcctggtgggggcgtgctcgctgattggcttggcgctgctcgcgctctatcgggaggatagcgggtcccacgggcgcgggagcggcgagtccgcggaggcgcggcgcggtcgctgacggcgccttccgctgaacgcgcggaattgtcaccccatgcgcggcgggcggccggcacttgtggcatactgccagcatgcgcatcaacgtcagctcctacatccccggaacctcgccgatccacgcgtgcgacgcgcgcgtgaagatcgtgctgctcgcgatgtactcggtcatgttgtttctcgtggacacgtgggcggggctggtgctgtgcggcgcgctgttcgcggcggcggcggtttcgtcgcgcattcccctgcggcggttcttcgcgctgctcgtgcccgtgtacgtgctcgcggcgttcgcggtcgtgttcaacgggttcgccttcgatgtgggccaggccgctccgggggcggcgccgcccttgatggggcaggagccggggctcttcggcagcctgccgccggtggcgctcgtcgggtcgttcggtctcgtgcccgcaggcctcgcgcgcggatgcttcttcgcggtgcgcatcgtgctgctggtcacagccagcctcgtggtcacgtacaccaccacgtccaccgcgctcacggacgcgctcgccgacttcctgcgcccgctgcggcggctgcgcgtgccggtggacgacatcgccatggtgttctcgctggcgctgcgcttcatccccgtcacggccgaggagctcggtcgcgtgcacgacgcgcagcaggcgcgcggcgcgtcgttttccgagggcggcctgtgggagcgcctgcgtgcttggcagaccgtgctcatcccccttttcgtgggcctgttccgccgtgccgacgcgttggccgtggccatggacgcccgctgctacggggcccagccacatcgtacctccctgcatgaccgtcgccttgcgggccgcagcctggccgtgctcgccgccggcctcgcgctgtgcatcgccgtcgccgtgctgctgtagggctcttgcggacgggccttgcccggaaggggcgccgccggccagcctgtcgccctttgcccgcccggcaaaaagcggcggccgcacagcggtcgccgctttttttgaaagttgcggcccggccgccgggagggagatggcgtccgggccgttgccgggccggcctactcggcgccggccagcttgcggccggtcacgtagccgaacgtgaggcacgtgccgcccaggttatggccggggaagtgcgtggagtagcagttcgtgtacatgtcgcccaccgtggagcccaggcagtacagcccgtcgatgacctcgtcgtcggcgttcatggcctgcaggtcctcgttgcagcggatgccgccggtggtggacaggaaccacggcgtgcactctatgccgtagaacgggcccttcttgatgggcagcagcagctctttgcgcttgccgaactcctcgtcgacgcctgcgtcgcagtagccgttgtacgcctcgatggtcttgagcgtctcgtccttcggcaggcccagcttctccaccagctcctccacggtgtcggccttgatcatcttcaccgggatgtcgcccgagccgttcatgctgatggtgccggggccgtccaccacggtctgccagtaggcgcgcacgtcgtcgggcgtgtcgaacaccttcgggccgtccacgtagcggtggttctgccagcccggctcgttcgcgtagtcgtcgtcccagatggcgaacgcgtggttgcccttctggtgcatgagcgccaggccgccgtgcgagatgacgttgtcctcgttgtcgtagcggcggccgtcctcgttcaccatgaggccctggaacgcgcgcacctggcgcgtgatggagcgccactggaagcagaagatcatgggcgcgggcgtctcgctcttgtcgacggcggcgccggcccagtacgccatcttgtggcccgaaccgttccagatgccgccgaactcggtctggtgcgccgcccagggaatgaacttctccagcatgtccttgtcctggccgaagtcgcccgtggcgatgaccacgcccttctttccgttgaaccgcacgtagccgtccttgcccttcgccacgacgcccactaccttgtcgccgtccttcacgagctgctgtgcgtccgtctcgtagcggatgtccacaccggccttctcgcaatacagcgccatgttcgcgcacacgtcctgctgcgggttgtcgtcggggcccttgccgttgggcccgtcgaggaactcgtgcgtgccggggaactcgccgttgatgttctccgggtcctcgtaccagtgctccatgacgggggtcaggtcgtcgccgcccacggagctggccgtggtcatgcggtcgatgagccagtccatggcctcgcccgagcggttgaagtgcagcatccacttgcggccgtccacgcggtaggagtgatagcccatcatgcgcttgtagcgctgggccacttcctcgacggagcactcgtagcccttctccttcgtcagcttcgagttcatggcgtagatggagccgccgcgcccgatgacgtggtccatgcgctcgagcatgaccacgttcgcaccgttctcggcggctgcgagcgcgcagcacaggccggagaacccggcgccgatgaccacgacgtcggcgtccaccgtctccttgatgtcgccctcggcgatgggatcgggcgccgtctcgaaatcgtaggtgccgcccgcggccttgccgtcggaggccgacgtgcccgccttgccctccttcggctgcgcagcgcagccggcgagcgtccccacgcccgtgacggcggcggtagccacggcgcccgtggcgaatgcgcccttgaggaagctgcggcggtccatgctcgtcttctcgttctccatgtgaaaccccttccctccggcggaacgcgtccagcgcgcccgctccctgcccggcgccctccgcaccgtgcgttgcccgcaccctagcacgcgtggcgtgcgctccgcttcgcccatcgcagggaaaaagccgaatcgtgcgttttcaccctgcggggtgaggcgcgacgcggtatgcttgtgcgagggacaaaggggagggcccatgaagggaagccacgttcgccacctgttcaacgagccgggcgaccgcgagcgcgtgcgcgcggagctcggccacgccgcggcgggaaacgcccgtatcgcgctggccatggcaagctacatggtttggctgatagcctgctgtaccgggccggccgtcgtgctcggggcacaggggtcgggaggcggcgagatgctcctgccggcatggctggggccgctcgcgtgcatggcggcggcgagcgcggtcatagccgtgtggttcaagcggacccgcaaggtgccgagtgcgacctcgtggactgtggcattggcgtcgcttatgacgctcgcggcggcccttcatctggtgtgggcgctcgacaccgggctgccgacggctgcgcggggcgcgctgtacctgctggcgagcctggtcatgggtgtgggatgcgcgctgttccgcgtggaggtcgatcgcgtgttcggctggataggaacgcagcagacgttgtaccagggcatgctggccaccgtggcgacggcagccgtgctcgcgatgctggcggtggcgggccgggtatccgggtcgggcgacctgcccctgctggcagcgcccctcgtgctgccgttcgcgggcgccgcgctgctgcgctccgtggtgggcggcttcccccgggcgcgttactacgggcatgggcgcgacgtgccgctgccgtttcccgcgaagttcgctgccacgtcgtgcgtgcagggtctggctgccggcgtgctgttcgcgggaatgttcgcgttaggcggcgacggcgccggggtggccgccgtctttgccggggcgggcggcgcggaggccgtggcatggacctcctcgttcgggagcacggcgctgtgctctgtggggcagcttgcggcggtggctctgctgttcggcacgctcgtgttcctgcgtctcgacttcaaccggctggtgtacaaggtggctttcccgttcgtggccctcggcttcgttctgcttgcgctgctgcccgatgcgacggcggtgggcagcgcggtgctggctgccgggttctgctacctcgacctggtgctgtggagcctgggcgcctgcctcatgaaaaacatggggctgcccgccacctggatcgccagctgtccgggtgccgcgctgttctgcggcgtggtggttggcgcagggctggccttgggctttttgggcgccgagatgtcgcccgatgccgcgctgctcgccagctgcgtggcgtgcctcgtgctggcggcggccctgttcctgtccagcggcagcaacctcaagtacggctggggcaccgtgcgtcccggcgagagcagcctggcggcgggcgacatggcgggagtggtgaagttcgtggccaccgagcgtgcggtcacgcagcgcgagagcgaggtcatgctgctgctggccgagggcaagtcgcgccgcgccgtgtgcgaggcgctgtccgtgtcgcccgacacggtgaagacgcatgtgcgcagcatctaccgcaagctcgccgtgcactcccagcaggagctcatcgactacctggcgcgcgagcgggaggacctggccgccgacggctccgagcatccgctgggggcgtgaggccgccgcgcgccctttcatgctatgctgcgtctgccgattggtcccaaggaggtttccccgtgctgcagataggcgagttctcccggctctcgcgcatatcggtgcgcatgctgcgccactacgaccaggtgggtctgctcaagcccgccgagcaggacgcccagacggggtaccgtcgctatgccgtgtcccagctggcggaggcgaaccgcattaccgtcctgcgtgacctggggttccccatccgggaaatcgggcggctggtgcatgcggacgacagggagctggcccgcgccctggacgatcgcgcgcgtgagctcgaggaaggcatcgggcgtgagcagcgccgacttgccgacctgctccgtttccggcaggacgtggaggccggcgggtccgccataagctgcgaggtggcgctcgtgtcggttccctcctaccaggtggtggcgctgcgcatggagctggagggctacggcgaggaacggcgggcttgggagcggctgggcgcattcatgagagagcggaagattgcgccatccgaaccttacacggagtactgcgagttctgcgacgagggggcggcggccgatgcgggcggcgatgctgcaggcggtgcaggggacgcgatcgccgcaggcggcgcgccctgcggtgccccatcgcccgtcacggtggaggtggccgtggccaccgatgcgcacggcgaagacgacgggccgctgcgcttctaccgcagcgccgcgctgccgcttgccgcgagcatcaaggtgtacggcccctacgagaacatcgcgcccgtgtacgcgtcgttcgcgcggtggctggaagatcatcccgcgctgcgcatggccggccccacgcgcgaggtggcccatcgcggcccgtggaacgcggaagacccgcaggactaccttacggagtttttggttcccgtccagaagaccgcttgaccctcccacggtgtcagcccctatgctcctcatcatgtgccgccgcaggggcggccatcgcgagaggagcaatccatgcaaacgttttccgttcatcccgtcggcgtcgtgagcgggggaggggaggggcctgcgcagctgcgcatcgacccggcgtaccgcgacggcctgcgcggcctcgagggcttcggccacgccgtcgtcatctggtgggcgcacgaggttgacgaccccgagctgcgcgcgctcaccgatgcggggcgcccctacacgcgtctcgcccacgacctgggcattttcgccacgcggagcccgctgcggcccaacccgctggccctcacggccatcgagctggccgccgtggacgcggacgccggtattgtggagacgccctacctcgacgccgccgacggcacccccgtgctcgacctcaagccctacacccccagcatcgaccgcatcgagcaccccatcgtccccgcctggtgcgctcactggcccgcaagcacggaagcctccgccgatttcgactgggcgtccgagttccgcttctaacgcgacgcggagcgcagaagtaataagttcgtaatttgacaaatcgtaacttcataaagcaccgtagccatctgattcccgcggaaaagcgcctcttgttcctgttctcgaagtccgggttcaccgaagcgtgccgcaaccgtgcgaatgagatcggcgcgacgttggcgagcttggccgagttggggttgcagaaaacgcttcgccgccaatgcttgcccgggtaccctcgatcgcgccggtccggctttaccgttcgccttcatggttgtgggaaacgctcgcagaatgggggattgcgcttccgacgtgctatgattgccgggaaggtcacgcttcggcggaacggtccggcgaagcggattggacagactacgaggaggcattcatgagcgtcatcatcgatgtgttcggtcgcgagatcctggactcgcgcggcaacccgaccgtggaggtggaggtcgtgctggaggacggggcgttcggccgcgccgccgtgccgtcgggcgcttcgaccggcgcgttcgaggccgtggagctgcgcgactgcgacaagggccgctacctcggcaagggcacgctcgacgcggtggcccacgtgaacgaggagatcgccgaggcgctcatcggcctggaggccgacgaccagcgcaccatcgacgacatcatgctcgaggtggacggcaccgacaacaagggcgccctgggcgcgaacgccatcctgggcgcgtcgctggcctgcgcgaaggccgcggccgagtccgctgagctgccgctgtacaagtacgtgggcggcgcgaacgcgcaccttctgcccacgcccatgatgaacatcctcaacggcggcgtgcacgccgacaacaacgtggacttccaggagttcatgatcatgccggtgggcgcggacagcttcgccgaggccctgcgctggtgcgccgagatctaccacacgctgaagaaggtgctgcacgacgcgggcctgggcggcggcgtgggcgacgagggcggtttcgcccccaacttcaagacgaacgaggagccgctcgagtacgtcacgaaggcgtgcgaggccgccggctacaagcccggcgtggacatcatgttcgccatggatccggcctcgaccgagttctacgacgccgacaagcagaagtacgtgctggccggcgagggccgcgagctcacgagcgccgagatggtggactactgggaggccctggtgaacaagtaccccatcatctccatcgaggacggcatggccgaggaggactgggacggctggaaggcgctcaccgagcgcatcggcgaccgcgtgcagctggtgggcgacgacctgttcgtcacgaactccaagcgactggccaagggcatcgagatgggctgcgcgaacgccatcctcatcaaggtgaaccagatcggcagcctcaccgagacgctggaggccatcgagatggcgaagcaggccggctacgcctgcgtcatgagccaccgctccggcgagaccgaggacaccaccatcgccgatttgtccgtggcgtgcaacaccggccagatcaagacgggcgcgccctgccgctccgaccgcgtggcgaagtacaaccagctgctccgcatcgaggaggagctggactccgccgccgtctacgccggcatgagcgcgttctacaacatcaagcgctaagccggttgcgcactgtgcgggcggctcgccgtggggaacggcgggccgcccgctttgtaggtgacagaataaaaaggggattctaccagggggttcgtccaatgttggaagcacgtgccgtcacggctggaaccgaggatgcgcaagaggtggagcggttgctggaagccgcgttcccaccgtatgagcgcccgccgttctcgtttcttaccacgcaggccgagcgcgaggaagtgtcgctgctcgcctatcgcgacgaagggctgttctgcggattcgccttcatgatagaggacgcgaggctggcgtacgtgctcttcctcgccgttggcgagggggttcgctcgaagggctacggcgcgcgcatgctcgccgacatcgagcggcgctgccccggcaagaccatcgcgctcgacatcgagccagtgatcgagggcgccccgaacgttgtccagcggcaaaggcgccgcgacttctacctgcgcaacggcttcgcgcccacgggcatcgcgaactgcttcgaaggcgacgtgtacgaggtgctcgcgaagggtccgggtttcgagtcggaccgcttcctcgcgctgatcaacgaactgccggaaggcgaggacaagacgctcgccccgctcgaacaggcggtgccggcctatgccgagcggctgctcgctgctcgatgagcgcccagagaagcgctgattgatgcaacggtgacggatgcctccaaggcaagggtttctgcccttgccggcagcgggattgttccgcaggaggcggcaagcgcagggtgcttgccctgcgaaacggcctatgacggagcttcggcgtttcctagaagcccaggtgtgcgtccgcgtccggctcggggttgtgcagcaggccttcctcgagcatgcgggcgcccacggccaggtactcgtcgcccgccgcggtgcacaagcgcgcgatttcctcatccgacagcgtgcggttcacgcgcgcgggcatgcccataaccaggctgccgtcgggaagctctttgccctcggataccagcgcgccggcggccaccacgcaattcgcgcccaccttcgccccgttcatgacgatggcgcccatgcccacgagcgcgttcggccctatctcgcagccgtgtatgacggcgccgtgccctatggtgcagtggtcgtggaggatggcgggatgatcgcggtccacgtggacgacggcgttctcctggatgttcacctcgtcgccgatgatgacgggcgcgtcgtcggcgcggatctgggcaccggccagcacgcaggagtcgcgcccgatggtcacgtcgcccacgatgccggcggcgggggagaggcgcgcgctcgggtggatgcgaacgttgcggtagagggagggcttggcttcggcgtgggtcatagggattcctttcggtcgattcccttcctattataacggcgcttgcgaggtgccgactggtttcggtgggcgcaggagaggaagcgggggaaatgcggcaaggggaggtgggctcggcgaagtcgaaggtcggtgcgggcggagggcgcggcgaaatcgaagagcggcgcgcacgggggcggcaaagtcgccgtccgtaactatactttcagcgctataatagtcggcatggtatatcgaaggtgcgcaacggcccgcgtcggcgaaggcggcggggcggggcgcgctttttcaggaaggggacgaaccgatgaaggaaatgatctcgctcgaagaggcccgcgaactcgtgctcgcgaacgtggagccgttgccgcaggagacggtgccggtgctggaggcggtgggccgcgtggcagccgaggacctgcgcagcgacatcgacatcgccccgttcgcgcattcggccatggacggtttcgcggtgcgcgcggccgagctggctgccgcgagcgccgaggcgccggtggagatggacgtcatcgcggaggttgcggccggcgacgtgtacgagggctccatcggggagggccagtgcgtgcgcatcatgacgggcgcgccggttcccgacgacgccgacgccgtggtgaagtacgagatcgtggacgtggtgaccggtgacggcaagccaggaagccgcgtggcgttcaccgcccccgtgaaggagcgcaacaacgtgcgcgaggcgggcgaggaggccaaggccggcgaggttgtggtggaggccggcgaggtcatcggctcggccggcgtagggttcctggcgggctgcggcgtggtggaggtgcccacgcaccgacgcccgcgcgtggccatcatctccatcggcagcgagctggtggaccccaccgaggttcccacgcccggcaagatccgcaactcgaacagctacgcgctggccgcgtgcgcccaggccgcaggctccgcacccacgatcctgcccatcgtggaggacacgctggaggccctcgcggccgccgtgtccgccgcggcctgcgagtacgacttcgtggtgacgagcggcggcgcctccaacggcgacttcgacttcatcaagcccgtggtggaagagctgggcgagctgctcatgaccaccgtgaacatgcgtcccggcaaggcccagacgttcggcgtggtgcagggcacgcccgtgttcggcctgcccggcaacccggcggccgcctacgtgggcttcgagatgatcattcgccccgcgctgcgcaagatgcagggttaccgccatttcacgcgtcccgtggtgaaggcgaagctctcgcgcgacgtgaagaagaacgatccgcgccgcatcttcctgcgctccacgttgtacaaggacgatgcgggcgagtacgtggtggcgccggcgaagaaccagagctcgggactgttcggcgtcatccagcgcagcaactgcatggccatcatgcccgagggcttggagtcgcgcacggccggctcgctcatcgactgcatgctgttggacgtttccgaggaggtcagcctgtaggttccgccggcctgtcggccgccggaacagccgacgctgcgaagggccgtggcacgccgccttcgcgcgatcccggaagctcgcgtacccaaagtacgcttcgcctccgcgatctcacgaatgcgacgcaccacggcccttctcgctgacttactaacgccaacctgcgagaaaggaacgaccatgtccgaacaagctctgacattcgctcttatcacctgctccgacacgcgcagcatgaaggaggacaccgcgggcgccgcgcttgaggcgctcatcgccgagaaggggtggacgtgcgcgagccacgtggtagtgcgcgacgagcgtgccgacatcgccgcggccatcgtggccgcctgcgacgagcttgatgccgatatcgtgctgacctgcggcggcagcggtctttctttgcgcgacgtgacgccggaggccacgatggacgtgtgcgagcgcaacgtgcccggcatcgccgaggccatgcgcgcccactcgctggccatcaccccctacgccatgctctcgcgtgcgctgtgcatgcagcgcggccggcacctggtgatcaacctgcccggcagcgagaaggcggcccgcgagaactgggacggcatcgtggccgccctgccgcacgccgccaagatgatggcgggcggcgggcactaggaaggttccggcggtctgccgaccgccggaacgagccgacgctgcggccggctgtggtacccgatcttcgcgcgatcctggagactcgcgtacaaaagtacgcttcgcctccgcgatcccacgaatctcgggtaccacagccggcctcgctgacttactgtgccaacctgtgcgtcccctaaaaccccaccgtcaaatgcagctggtagaactccacgcgggtgacgagcacggcggtcagcagcagcaatgttcctgccccgctcaaggccagggccgcctgcgggctgcggcgggatcgcagcgacaaggcggcgcagatgcagccggccgcgcccgcgagggcatggaacacgatggccgtgccgtagcccggcacgagggcgctggctgccagctcgttgttcgccacgccggcgaggctctgctggtgcagcgccagcacgatcgtgcccgccgccagcgcagcgatgctcaccgccacgagcacggcgccgtaccgccgccgcccggcgcgcgccaggtgcaggaacagcagcccgatcacaggccccgccagcaacgccgagaaccacaggttcgccggcgtgtaccaggtgttccaagtgggcaccgtgtccactgcgtaggccagcgacgtgcaggccaccaatgccgcgccggccgcgcaggccagcacgagccacggcttcgccacggagtcggggaagtgctgcttgaaggctgccatccagtacgagcccgccaggaagaggaaggccacggccgccagcacctcgttcgacagaggcgagcgccccacacccgagaacacgtgcagcgcgttggccggcgtgcccaggtgcgtggccgaggcgatgaagcccacgagcaccaccgagaacggcagcgcggccaggcggtcgatgcgcacggcggcctcgtggtcgcgctcgagcaggcgcgccagggcgagcgcgatgaacgcgatggtgccggccggcgccagcgtggtgaacaacgcgagcgagaactcgtcgaaaccgctggtcatacctgtatctcctggtggttcgcaatatgcccgcccacttgggcggccagcgcggccgcgggcgaggggaggatgaagaggttcggccacgtggcgtcctccggcggcagcggcaggatggagcgcacggcgcccggatggcgtgccgccagctctgccgggtctccccattcgagcgcccgcacggggcaggcctcgacgcacacgggccccagcccctcgtcaagccgcgcgcggcagccgtcgcacttcgagctcttcttcaggtgctggtcgatgaagggggcgtgataggggcaggccatggtgcagtacccgcagccgatgcacttgcgctcgtcgggccacacgagcccgcggtcgtccttgtgcatggcgccggtagggcacacgcgcgtgcaggcggggtcgccgcaatggttgcacgcgagcgacaggtggtaggcgaacacgcctgtggcaacggccatgcccgcctcggtgcccgcgcccgccgcgccgggccgctcccacgtgccgccctcgtagtcgatgacgcgccggaacatggcctcggccccgaggtcgcggtagtccttgcacgccatctcgcaggtcttgcacccggtgcagcgcgtgttgtcgaagaagaatccgaacgtcatgagcggccctctgccatgctcccctgcccgcacgctcctggagcgggcatcccgccccagtataccggaagcggccgcgccggggagggaggggcggggccgcttcttcagagaggtgcggggcccggcggccgcaagcgctgccgggccccgcggaaacggtgctgttacgcggggacgttcgtgacttccttctcgttcgctatcgcccccgtggtgtcgccgggctccttggcggccgggcaggggttgatggcgatggacggcgtggtctcgtccggcgagggcatgggggcgatgcccgccacggtgccggtgtgggccgcgcgcagctcctcgatgtcgccccattcgagcgcgcgcaccgggcaggcgtccacgcagatggggttcaggccctcggccacgcggtcggcgcagccgtcgcacttctgggccttcttggcatcgtcgagaacgggcacgttgtaggggcagctggtcacgcaggtgcccacgcccgtgcacttctcctggtcgatgtgcacgaggcccgtcttgccgtccttctcgatggcgcccgatgggcacttggccatgcacgccggcatggcgcagtggttgcaggccagcgacacatggtaggcgaacgtgtcggtggtgtagatgccgtcgccggcatcgatccacgagccgccctcgtagtcgtataccttgcggaacgcgatggtggcgggcaggtccttgtagtccttgcacgccatctcgcaggtcttgcagcccgtgcagcgcgtgctgtcgaaatagaaaccgtactgggtcatggttgcgttcctcctttacgctttcgctacttggacgatgagcgagtgcacgccgttgcccttcgcgagcggcgagggatggtagggggtgatggtgttgatgcaaccgcccttgtcgatgcggtcgcccgccatgtcggcgtcgtgccaagcgccctgcgggatgcctacggtgccggggatgatacgcggcgtgaccttggcctcgataagcatctcacccacggggctcttcacagagcacttatcaccgttggcgatgccgcgctcctgagcgtccagatcgttgatccagatctgctggcggcaggcctgattgagctcttccactccgccgtaggaggagtgcgtgcgggacttgtagtggaagccagaggcgtacagcgggaattcgtcggtggtgctgccgtagcctaggtagcccgggtcgaacacggggatgggggtaacgacgtcgccctcggccaactcgagcttcgcggcatcctcggcaaggcgctcggcgtagatctcgatcttgcccgacggcgtctcaagcgggttcttggagggatcggccacgaagtcgaccaggccgatgaccggctcgagctcgcgcttgtagtgcccctgggccttgatttcgtcccagctgggcatgttgccgtccttctcggcggacttcttgtagatctcctcgatccactgctcctgcgtcttgccctcggtgaagtcatccttcaggcccagcttgtcggcgataccggaaacgatgtcatactctttctgggcatcgcccggggcatcctgcgccgggccgcccaccacgacgccgttgtagtactcggcatcgccgttggccgccatgtgcatctgctcggcgcgcatggcgtcgggcagcaagtagtcggcgtacttggcggagtcagtcatgacggtgtcgatgaccacgatgcactcgagcttgctctcgtcctgcaggatgtcgtgcacgaggttgatatcggagtgctggttcgagatgcagttgccgccgtagttccagaggaacttgatgccggtcgaaagcttgtcggcgccgcgcacgccgtcctttgcggcggtcatctgctcgccgtggtcggcggcgttgagccactggtagcagttgatagccgtcttcaccgggttctcgcccttgggcatgctgcccaggatgccgcccggctcggcctcgcgcatgcccgtgttcgtgccgggcttgccgatcatgcccgtgaggatgggcagcatgcagatggcacgcgaggtgttctcgccgttgttgtggcgctgcgggccccagccctgcacgacgaacagcgcctttgcggacgcgatgtcggcggccagctggcggatgcgatcggcggtgatctgcgtgatgggggcagcccactctggcgtcttctccaccatgtcgtagccggtgcccatgatgtagtccttgtaggacttgttctgccccttggcggactcgggcatggtgtcctcgtcgtaacccacgcagtacttgtccaagaactccttgtctacctggtcgttcgcgatcagctcgtgggcgatggcgttcacgagggccgcgtcggttcccgtgcggatgggcaaccactcgtcagggtgtccggagctcgtctcgttcaggcggtagtcgatgttgacgatcttcgcaccggcctcgcgcaccttcgcgaagtcgtagacgatgttggcgccgcccatgcgcgtgtcggccgggctgttgccgaacatgatgaccaggtcggacttctcggcctccgacatggacgaggcgtacacgctgtcataggggttgcagccgtcgccgtaggtgtagggcatgccggactgcatcatgttcgtggaatagtcggcgtagctcttcaggtagccgcccatcaggttcgcaaggcgcgggaacaggcggcttgtggcggaggaaacgccgctgccgtagttcatgtacacggcctcgttgccgtacttgtcgatggtgttcttgagcgcgtcggcgatgccctggtatgcctcgtcccagctgatctccttgaacttgccctcgccgcgcttgccctcgcgcttcatgggcttcatgaggcggtcgggcgagttgatccagcggcggatggtgcggccgcgcaggcaggcacgggcctgcaacccggcggcatcgcccacgttgtccgtttcggcgtagacgatcttgccgtcctgcacgtgccagcgcagcaggcacgagccgccgcagttgacgacgcactggctgtagacgatctcgtcagccgtcgcggcgcccccgtccttggcgccttcctcgctcttgggggcgcagccgtacagcgcgcttccggcggccccggccagcgcgagcccggcgagcgagcccttcacgaacgtgcggcgcgacagcgtcgctgcttcgttcattgccatggtttccctccttctccttggtaactcctccaagggccacgctaccgaaataacagggcagcagaatcacactttgcatgtgatttaagcgtttgtccagttcagggaggtgtggtatcaccccattcgccgggcggcctgcacagtgcgcaggttgcccggtgctgctttatactataatggacgcacagggcaaggagatcgaggcaggggagggccgacttcacgtggcagaaggcgccgcgcatacgcatgtgtccagttgggggtacgcgtgcttcctcacggtgaacgccacgtccatctggggcggcgtgttcccgtttctgccgatggagttccaaacggcggaggtcacgctcacgttcttcctcgctcagtcgctcgcgttctggggcgcgttcgtggcaagcgccgtggggtcgtaccgtttcccgcacggggcgcggcgcatgctggtgtcgttgagcgccatcctcgtgttcgccgggtcggcgtgcctcatcggcgccatgtacgttttcgaggccgtgctcgtgctcgtggccgcgggcggcgtgctcttgggcatcgggtgcgcgggcctgttcatgctctggcagcgttacttcgcctcgctgccgcccgcccagggcaacgtgcggctcgtggtgggcacggcgcttgctcccttcatctacttcgcgctgtaccttgtgcccatcgccctcacagcgttcctcgtgccgctcgtgttcgtgcccttgtgcggtctctgcatcgcgctctccgtgcgcgagatgcgcatggaccagcccatgttcgaagatgtgccgcgccagcatccgcaggtctaccgccaggtggtttccgactactggcgcagcgcgctgtgcgtgggatcgctcgcgttcgccagcggggtcatccgcggcatcgcccttctgcaccaggagatcagcttcgtggtgaacagcgcttccatgctgggctcgttcgtgtcggctgccgtgctcttgctgctgtggcggcgcatgagcttccgcttggggctcacgtcggtgttccgtgtggtgtacccgctggtcataacgggctttttgctgctgccgttcttgggcgcgggctacctgaacctgttcgccgccttcacctacatggtgttctcgctcgtgctcatgctcatgatgatgcagtgtgcgcaggtctcgcgcgaccgcggcatcaaccccgtgttcatctacgcgttcttcggcgccgtggtgtacctcatgcaggccgtgggctttctgctggggtgggtgagcgacttcgtgtcggtggacgggttcgactggttgttcttcgtggccatggtgtccagctacgcgctgggcatcacgctgctggtgtccacgggcacgctgttcaaggccgtggcatcgaagggcaacgtgacggcggatcccatcgagtttttgcgccgcggctccgccgacgccgacggacggagccccgcttccggccctgcaaaggacggcaagcccgtcaagcccgccaaggctgcgccaaagcgccgcaaccgccccagcgcctcggacgacgccggcgccatccgcgaccgcacgtccaagcagtgccgcgccatgcaggaggccttcggcctgtccacgcgcgagacggaggtcatggaactcatcgcccgcggcaacagcatggcgagcattgccgagcgcctggtcatcagcgagaacacggtgcgcacccatgcgaagcacatctacacgaagctcgacatccacaagcgccaggaactgttggacatgctccacgagcgggaggggtagggagctgcgtgcgggaaatcgctgattgcgatcagtgcacagggtgcctacttcgcgaattctacaggttctgttacagagcagtgaacgtgctccgaaaaggcacggcaaagacgagaaaggctacttaaatgaaggaaattacgattgatgtatgggcgatagtgtctgaactgatcgagcgggttcccggtttgcttataaatcgcgaggcatttttgagggatgtatttcgcgataaacttagtcctgatcagttgaatagagtggttgaacttggcgattacggagatgtttcgctggatatgctcgactcggcggcgaattcttgcatcaacaaaacgcgcttaaccacttcaggagcttcgttcgtcgcgggcttaccgagttcgcttccgacgcttcccgccactgtaaccgccgacataacgcagtcattcgctttttatgttcgcattgcgcagcaactttcttacatatatggagaagcgaacgactttacaaagatgcaagatgacgacaggatgacgaagcttctgctgtacatcggggctatgttcggcatcgaggcagcgtcgcaagtgcttgccttgatgagctataacgcaggaagaatacttgccaagaaattcggtcaggttgctgtaactaaagttcttaatggggtcccatggaaagtggcgagaacgattgccaaaatgctcggggtcaagctgacgaaaggcgttgttcagaagggtatctccaaggtcgtaccggttcttggcggggtcgtttcgggtgctttaacttacgcaacattcggtccgatggcgaagaaacttcagtgtgctcttcgcgatacccttaaagcatccgaagcggaaatcgaggagctgtacgaagttatatcttcggaagacgatatggatattgcgatctctgtctgcagcgatgttattgaaagcgaggtgttggaccccgcagagttcaaggaggatggctccaaggagaaaagctaagcaggaggtcactgatatatcgggctccgcccaccttgaaacgcgagcggctggttctcccagtgctattctactaggtagttttgcttataattctcttgcggaagccatgcatggcttccgcagctggtcgtcgctggaaccggacaccggcgcagtgctaatgctacctatagctcccagtatcatgccaccggatccagcggcgcccgtccatcgccgataagattgatgccgacaggctccgtagaatactgctcgaggacaggcgccccgcgacaaggccagcttccattcatcgaggaaggggaactatggagcgggcggagatggattacgacgtgtacgtcggtgtagacgtaggaaagaccaagcaccatgcggtggcgctcgacggggcgacgggcgaacggttgctgtcccggcccttcgatcaagatgaggcgagtatccgcgagttgttggaagaggcgagcgggcatggcaaggtgctcgtaaccgtcgaccagttcggcaacatcggacggctcgtggtggccgtcgccaaggatatggggatcgacgtcgcccatatcacccctaaggacttcaagaacatcgccgagacctacaaggaaggcaagtcggacgccaaggacgccttcatcatcgccgacgtgtccctcagcaccccgaggctgatccgaactgtcggcacgcgcgacgacgcggtcgcagaaatcaaagtcctcaactcgcggcgggtggacatcgtcaaagagcgcacgcgctactacaaccgactgcacgacctcctgctgcaggtgtccccgcccctcgagcagcttttcgagggcgatagcctccattccgatctggccataaaaatattcgagcgctacggcggcccccgagggctcaaacgcgctggcaaggcccgcgtctccaagtgggcgggaagcctcaagtatcagaaaacccgtgggcctaagaaggttgaggaggtgttcgaggcgctcggcaccatgacggttgaactcccggcaaccgaggtcatcgagattcagatcaagaagctagccaagcgcatcctcgagctcgaccaggaggaatcggagctggacgccgccatcgaggagcgcgccgatgcggtgcccgagacggcgatcctaaagagcgtcccaggcatcgggcgcgtctacggggcgacgatcgccgccgagatcggcgacatcaaccgcttcccagacgcgaaccacctggcttcctacgggggcatcgcgcccgtgaaggaagagtcgggcacgagcgtcaagaagaacaagaaaaggaagaacggcaaccggaagctcaagaatgcgttcatcgagtcggcgcagaaagcgaaacggtacgacccgcgctgcaaggcctattacgacaggaaacgcgccgagggcttgcagcacaagcaggcgctccgagccctggcgcgaaggcgcgtagacctcatctacgccctcttggctaacggcaccttctacgagccgtcgcatcgcgcaacagcctagcccttttccggaagcaggtcctttgcgctccccacattatagagcatgggggggttaattttgcacaccctaatcctggatgaaaaagcctgaaaccttttcgctcctcggcaaattggcacgattgttgcctataataatgaaccggacgtgctatgcatggctcgtccgctggtcgtcgctggagccggacactggcgtatatatattgctcttcgagagcctaactaatcatgccaccggttccagcggcgcccgtccatcgccgataagattgatgccgacaggctccgtagaatactgctcgaggacaggcgccccgcgacaaggccagctactttagtacagaatggtgggaacggaactaaaaaattaatcgaaaacgaaagcaaaaaaaagaccccatcgttaacggggcctagatgattatactgaaaaatcgacgggtcatagctttttcctttggtgggttcgcatatatcctgtttttcgatttgcttttatttccttatagattgatactggtgcgcgaaaacgaacggcgatcgagcgaggacaacagcagcatgacggcacaagagctaccgaacggattcaccgggttcgcgaaccgcaagccgggcttcgaaccggccagcgccagcgtggggcacacgccggtgggaggctacaccacaggcggcggcgcgtcgctcgcgggcgtcccggctggctacgagcggggcgcgcagggggcgttccagtatgcgcgcgaccatgcgcggcccgacacgggcgcggcgagcttcgaccccgacaagctgcgcctcatccccgacaccgaccgtcgctgggcctggacggagatcgatttgaacgccttgcgccacaatgtggcgtccctcaagcgccacgtgggacccggcgtgcgcgtcatggccgtggtaaaggccgacggctacgggcacggtgcggtgcgctgcgcgaagacggcgctgaactccggcgccgagtatctgggcgtggccacggtcaacgaggccatcgagctgcgcgaggcactggtgaatgcgcccatccttgtgctctcgcagccccctgacgaggccattcccctgctgctggcctacaaggtcatgccgagcgtctacacgcccgacttcgccatccgctacgccgaggcggccgacgccttcggcatccgcgcgccgtaccacctggccgtgaacacgggcatgaaccgcatcggcgtgcgccacgaccaggtagtggagttcctgtcgcaggtgagcttccaccgcgcgctcgacctggtgggcacgttcacccacttcgccacggccgatgcgcccgagacgctggactttcacatacagacgaagcgcttcctcgaggctatccagggcatgcgcgtggccggcgtcgaccccggcatcatccatgccgccaactcggctgcggccatccgctatcccgacgtgcacttcgatatggtgcgccccggcatagcgttgtacggcctgcacccgtgcccggaaacgcgcacgatgatcgaccttaagcccgtcatgagcgtgcacgcgcgcgtgaccgatgcgcggctcgttcccatgagcgagggcgtgagctacggcatgaactaccgcagccccggcagcgtgaagatatgcaccgtgcccgtgggctacgccgacggcctgcgccgggggctctcgggccgcacggacttcatcgtgtccggccagcggttccgccaggtgggcaacatctgcatggaccagtgcatgttcgaggtggacatgcgcatctacggcacgcgccgccgcgtggacccgcagatcggcgacgaggtggtgctggtaggacgccagggagactcggtggtcacgctcgacgacatggcgaacacgctgggcacgatccactacgagctgtccatcgggttcgcgcagcgcatgcccagagtgtacgtgtaggctctcgcaaagagcagggagaagggggattcgcatgcccaagccgcacattccgctggaggatatccgcgcgcaggtggaggcctgccgcaaatgcccgctggccgacggccgcacgcagacggtgttcggggtggggaacccctcggcgcgcgtgctgatcgtgggcgaggcgccgggcaagaacgaggacttgcagggcgagcccttcgtgggcaaggctggccaatatctgaacgagctcttggctatcgccggcctggcgcgcgaggacgtgttcatcgcgaacgtgctgaagtgccggccacccgggaaccgcgacccgcgcccggaggagatcgagctctgcaccccgtacctgcgcgagcagacgcgcaccatcgaccccgagttcatcgtcacgctgggcaacttctccacgaagttcatcctgaagacggagatcggcatcacgcgcctgcacggcacgctgcagcgcgcgggcaagttcaaggtgttccccatcttccaccccgccgccgccatctacgacggctcgaagcgcgaggccctggagaacgacttcgccacgctcggcgagctgctgcgcgcgagcgacgcggagaaggcggcggcgcctgccgagcaggtcgacagctccgcgactcctgcgcagcccgcctctgttgccgccgagccgccggcggacgagacctccgccgtctcgcagcccgcggtggagcagccgcatctgctctagggaacaccgatatctgcgtcacctgccctgcgcttccgtgccccgctaacgaaagttttctttcgttagcgggcattgtggcagcgtggcgtgacaagggggtgtgacaaagggactgtgacaaagggacggggcggcgtcaggcggtcattgcacggttggcgtttgccagctccgattgtagcgcctcggccggcgtcttccaaccgagcgtctccctcggccgcccgttgagctgatcctgcatcgcccgcacgtcctcgtcgctcacctccgagaacctcgtgcccttcgggaagtactgcctcacgaggccgttggtgttctcgttggtccccttctgccagggggagtgggggtcgcagaagtagaccttcacccccgtctcgagcgtgaacctcgccgcgtcggccagctcgcagccctggtcccaggtgagcgtcgagagcagcccgtcgcgcacggcgcccggcacctcggcgcacatctccacgagcaggtcgaccaccgtcttcgtgtcgtgggccatgaggcgccgggcgacgaggaagcgggtcctcctctcgacgagcgtcacgaggcagctcgccaggtcgccaccgacgacgaggtccccctcccagtgcccgggcaccgcgcggtcggcggcctcgggcgggcgctccgatatcccgcacccctccacccagctcctgccgcgcgggcgggcgggcagccgggatcgcggggccctcctcttcctcccggagcggagcgcctgctcgacggccacctcctggcgcagggaccccttgccctgcacgtagagcgcctggtagatggcctcgtggctcacgcgcatctcctcctcgtccgggaactcctcgcggagcctcatcgatatctgcctgggcgaccacaggagcgcgagcttcgaggcgacgtggccccgcagccgcccctcctccagcttgcgcgccttcggcctgcgggcgcgcctcctcgcgtcgaggtgcgcctccctcgggtcgtaggccccctcggcgcaccgggcgagctcgcgggccacggtggtcctgtgcacgcccaccttgagggcgatctcggaggggccgcatccctgggagctcatggccgcgatgtaggcgcggtcctcgaaggagagcctctgcctggcgctgcgcccctgcgctatctgccggtccaggtcgaccccgtagtccatcggcgccaccatcctgtcaggaggctcgtccatgcggctccaggagaagacggcgccgcggccaaccccgcacgcctcggcggctccccgaacggtgtcgccgaggcggagcctctccttgacggcgctccaatcgtcaagcgtgtacttccctcccattgcaccacatcctaaggtcgtgtgcaatgatcggttgaaaccgcccggggataatgtcacgctctgcgactggcaacgacgccgaaactcttgcaggagcgtgacattatccccgtccctttgtcacgccgaaactcgtgcgggagcgcgacatcaaccccgtccccctgccacgccctacagccatttcttcctcttgaagatcacgagctccaccacgatgatgacgatgcatatcacgatgatggcctgatagccccattgccagtccaggccgggcatgttcgcgaagttcatgccgaaccagctggtgatgagcgtgagcggagcgaacagcgtggtgatgacggtgaaccactgcatggtgtcgttctgctggatgtcgatctgcgtctggtagagctcgcgcagctgcaggctgtactccttgagcgtctgagaacgcttgagcaggcgctccaccgttttctcgagcgagtggaacaggcgggcctccccgttggtgagcagcttgttctcgttgtcgccgatggtgcccgtcatgtccacgagctgctggtagaacgtgtcgatgcgcagaagccgccgccggaagcccagcatcttgcggttagccacgttgccgcagcggtcgatgatctgctcctccacgtcctccatgcggtcctccacgtctgcgaggtacgccaggtcgtccttcacgagcagcttcatgaactcgaacaggcagtgcgccggcgtgggctctttcagcacgccgatgcgctcgatgtcgtcgagcaggcgcgtgcacacctgcccctcgtcgatgaagatgaggttcgtcttgttcaggtagaaggcgaacttgagcgtctcgcccatgaggttcttcttgtcgggcacggcgaacgacccgatgaggctgtcggggaacacgtcgaggtaggtgctctcggcctcggtgagcgtgcgcagtgccgagagcgtgtctgcgccggccacgccgagcttggcgaactcctgggtggtgatgacctccaccaccgacgcccccggctcgatgggctggtcgagcggcacggctttcagctgcttggtcaacacgtatttctgcgccatggctctttcctcctcgatgggcgccgatgcggacggctgcgccgcgctgctcggcggaaggccgcggccgatttcgccgccactcgcctcgtcgagggatgggcggggctgcgcataccggctgcgccctccatcgattataggttccctgccacctcggcgattttctctccgctgaccgctcggtaacctgttagaaacatggggacggcgggcatgttgctataatggcggccatacttctatggggagcggcaccgcgcatcgtccggtgctgcttctctctatgagacgagagagggcgaagccgtgtatcccatcgaacgagtagaaccgctcaatgcggaagtcacccgcatggtcgtgcgcgcgcccgagatagcgcgcaagatcaggccgggccagttcatcatgctgcgcatcgacgagcgcggcgagcgcatcccgctcaccatgaacgaatgcgacccggtcgcgggcaccgtcaccatcgtgttccaagcggtgggcgccaccacgatgcgcctcgcgcagctgaaggcgggcgacgcgctcttggacttcgccggcccgctgggcaaccccaccgagctggagggcgcgcgccgcgcgtgcgtcatcggcggcggcctgggcacggccatcgcgtacccgcaggccaagtggctgcacgagcacgggtgcgaggtggacgtgatcaccggcttccgcaacaaagacctcatcctgctggaggacgagataaacgcgtgctccgcgcggcagatcatcatgaccgatgacggctccaacggcaacaagggcctggtgactcaggcgctgcagcagcgcatcgacgagggagcggactacgacctggtgctggccgtgggacccgtcatcatgatgaagttcgtggccgccaccacgaggccctacggcatcaagacgctcgtgagcatgaacccgctcatgatcgacggcaccggcatgtgcggcggctgccgcgtgaaggtgggcgacgagtacctgcacgcctgcgtggacgggccggacttcgacggccacctggtggactacgacgacgccatgcgccgtggcgtgatgtaccgcagcttcgagggcgcggcgcgcgaggcggccgagggccgcgactgcaacggcggaaccgacggcgagcggaagggggcgtagcatggcgaccagctacgaggtgaaccggcagaaggagaaaacgcccgtttccgagctcgatccggccgagcgcgcgaagacgttcgacgaggtggcgctgggctataccgaggaagaggcggtggccgaggcgcgccgctgcatccagtgcccgaacaccccctgcgtgggcggctgcccggtgggcgtgcccatcccgcggttcgtcgagcaggtggccgagggcaacttcgcccgggcgtacgccatcgtgaagagcgcgaactcgctgccggccatctgcgggcgcgtgtgcccgcaggagacgcagtgcgagggcgtgtgcacgcgcggcaggaacggcgagccggtggccatcggccgcctggagcgcttcacatccgactgggcgttcgcgcatcccgaggaggcggccgcggccatggacgggctgcgcgaggagtgcgctgcgggcgacgagctcgcctgcagcatctggcgcggcgcggaaggcgcggtgtcgcaggacctggccggcaagcgcgtggcggtcatcggctcgggtccggcgtcgctgacctgcgcgggcgagctggtgaagcgcggatgcgacatcacggtgttcgaggcgctgcacaaggtgggcggcgtgctcacctacggcatacccgagttccgcctgccgaaggacctcgtgcagcgcgaggtgtcgaagctgggcgacaaaggcgtttcgttcgaggtgaacgccctggtgggcaagctctacgacatcgacgagctcatggaggaccgcggcttcgacgccgtgttcgtgggcacgggcgcggggcttcccagctacctgggcatcgagggcgagggcctcaacggcgtgtcggtggcgagcgagcttctgacccgcgtgaaccttatgaaggcgtaccagttccccgaatacgagacgccggtgtacgcgggcaagaagtgcgtggtggtgggcggcggcaacgtggccatggacgcggcgcgcacggcgaggcgcctgggcgccgacgtgaccgtggtataccgccgcggacgcgaggagatgccggcgcgcgccgaggaagtgcaccatgccgagcaggagggcatcaagttccagctgctgacgaacccggtgcgcattctgggcgacgagagcggctgggtgtcgggcgtcgagtgcgtgcgcatggagctgggcgagcccgacgcgagcggacgccgccgccccgcgccgatcgagggcagcgagttcgtcatcgacatcgacatgctggtggtggcggcagggtcgaagaccaacccgctgatcgcgaagaccaccccggggctcgaggtgacgccgcgcagcctgatcgtggccgacgagcgcacgggcgccacgtcgaagccgggcgtgttcgccggcggcgacgcggtgatcggcgcggcgaccgtcatcctggccatgggtgccggcaagcgcgccgcggcgggcatcggggagtatctgacgcaagagtaacgcgtttatccatcgttttctggaacgagtgtttcacgtgaaacactcgttcgttttattgaggaggccttccatgtcgttcgacccgatcgcctacatcaacgagccgcgctggctagagtcgcggctcgggctcgatcgcattcgcgagctgctcgatcggctgggccggccgcaggaccgcctcaagttcgtgcacgtggccggcacgaacggcaaggggtcgacctgcgcctacctcgcctccatcctgcaggccgcgggcttgcgcacggggctgttcaccagcccgtacctcatcgcgttcgaggagcgcatccgcgtggacggggcgaacatctcggccgacgacctcgccgaggcgacgctgctcgtgaaggagcaggccgaggccatggcggaccatcccaccgagttcgagctcatgtgcgctgtggcgctcgtgcatttcgcgcggagcggctgcgacatcgtggtgctcgaggtgggcctcggcggccgcctcgactccacgaacgtcatcgacgcgcccgaggttgccgtcatcgcgcgcatcgggctcgatcatacgaagctgctcggcaccacgcttgccgccatagcaggagagaaggcgggcatcgtgaagccgggttcggccgtggtgtcgtggccccaggagcccgaggcgatggtggcggtcgaggcagcggctgcggcggcgggtgatgtgctgaccgtgcccgacttcgcatgcttggaagcaggctcggtggactggggggctcccggggcgcctctgcgtccgttctcctatgggcgcttcaccgacctgcgcacgcggctgctcggcagctaccagcccgcgaacgcggcgctcgccatcgaggcggtggaggcgctgcgcgtccggggttgggccgtcaacgacgatgcggttcgccggggcatcgccgaaaccgcgtggcccgggcgtttcgagatcgtgcgcgcggcgtcgggggagcccacggtcgtggtggacggcggccacaacccgcagggggcccgcgcgctcgccgattccctggccgacgtgtttcccggccgcaagcccgtgttcgttgtcggcgtgctggaggacaaggactatccggccatgttggagacggtgctgccgctcggtgcggcgttcgtgtgcgtggcgcccgacaacccccgcgcgctttccgccgacaagctggcgcgcgccatccgctggacgggccaggacctcctgggatgctcggcctgcacgcgtccctacgttgcgcgcgatatggccgatgcgctcgcccgcgcccgcgagctggccggcccggacggcctcgtgtgcgccttcggcagcctctactccgtgggggcggtgaaggcggtgctcggggcgacggcgtaagcgggcggaaggcggctgccggacgcccgggccgtcttcgcgcgaaccggccgccaaggcaaagccccgcccgttgcaggcgcgcaacgggcggggcggcggggcgcagccggcagcgccggcgtgctaggatggtgctctacagggaatcgatgtacgccacgaggtcgcccacggtgttcaggccctcgggctcgccgaagtccacctcgcaggcctcctcgaggtcgcagatgagctccaccatgtcgagcgagtcgataccgagcgagtcgaacgtggactctgcggtcacggtggacgggtcgatgtcgaggttctcctgcaggatgttcgtgatggtgtcgatggtggccatgggccttcctttctatggaaaatcgtcggcatccatggtagcagacgcgcggggcgcgcgcagcccccgcgcacggaaagggcggcgcccggagcgcgggcgccgcggcgaggaggcggcgatgtgcggacggttcgtcatgatcccgcgcgacgtggtggagcgcatcgtgcgcgaggtggagcagggcctgccgcccaccgtgcccgactacgagctggccggcctggacgcgttccccggcgcgcgcgtgcccgtggcggtgtcggcgcaaggtgcgggagggccggggcgcctggcggtggccgagctcgattgggggtatccggtgagctgggcgaagcgacccgtgttcaacacgcgcgtggacacggccaccggcccgcgcggccagatgtggcgcgagtcgctggagcagcgccgctgcgccgtgcccacgctgggcttctacgagccccaccgaaccgagcgcgccgtgagccccaagacgggccgcgaggtgaaggtgcagtgcgcgttcggcctgccggagaacccggtcacgttcttgggcggcatctacgaggacggccatttctcgatcatgacctgcgagcccaaccgctgggtgcgcgacgtgcacgaccgcatgcccctcgtgctgcgcccgtccgagctgggcgattggctgggcccgcgctacgccgacctgttcgaccgccgcgacgtggagctggcctgccgcgtggcgtgaccggacgaggcgcgtcccctacgccaggtcgccgcgcgcggcgaacacggcggcgatcacgtcctcgaacaggtcgacgttcgaggtggtgtacggtatgttcgacatgacgctcaccaggtagcggcgtccgtccttcgccacgatgcccgcgtcgcacaaggcgttgtactcgccgttctcgaacgattccatggaccagcccggcttgctctgtacctgaacgccctcgtccttcagagcttcgcgcaggtaggatgtctcgtccctctcgagcagccccgcgagccactgggccgtctcggtgccggaggccaggtactcgctcgcgttcggccacagccgcacgccgtcgcgcaccgtatagtgcgggaaccacgtgtcgtaggccaatgccgggtcgacgcccaggccctccaggtacgctgccagcgcgtcgtcgctgtagtcgtagcgcagggcgccgtaggtgtcgttgctggagaacaggatggcgctctctatcatgctgcctatgagttcggagccctgcgaggagaacacgcccgactcgctcatgaagccgctcgtgacgaagtcgtcgcgggtggcgaggcccgtctctaactggctttggcagaagtagacgcagtacggccccttgaacgagctggccccgtagaacacggcgtccacgttgctcgcgatgccgcggccggtgcccaggtccacaagcgcgaacccgaaggagcggtcgttttccgcgaagggggcgaaagcctggtcgatcgccgctttcgacgcgtcggacagcacgggctgcacggccacggcgctgccctccgccggggcgggggcgaacgcttgcggctccgtacccgtcggaagatccagctcggccaaccccgtctcgacggcgggcagcgccgcaaggcgctcctcgggtgtgggagggctctcggcctcggcctcggcggcgggctcctcttccgtcggggtagcagagcaggtgctgaacaggtttgatatcccgaaaaagagcaatgcgcacgcggctacgacgcctgcgacgagcacgatcctccgcagcgggttctggtcgggcccgccgccggcgtagagcgtgggggcggggcgcgcggaggagcgggtcgccgggcgcttggacgggcgggcggcgacctgtccggcgggatgggcgtcgggccgcggtgcggtgcggttcgcggggcgctttgaagccggggaggtacgctcggccggtcgggacgctgggcgttcggtcacgtgcgcggaaggccgggccgaggggcgctgcgggcggttcgaccgggtctgcggccgatccgcatccccgttctcgggcgccaatgcctcgccgcacgtgcgcgtctgcgcgtcctccggggtcgacgacctccggtttcccgcattttccgcggccgggccgatctgctcggccgtctggccgggggtgctcttcaggtagtcccgggcggagagcacgacccgccccgcccgggcagggcggggagaacgggaggaccgagcgtcatcgtgcttgttgggaccggtcaccgttctccccttcggatgctaggcttcttcgcgctgcttgagcaggccgtagccgccgtcgtcgcggcggtagagcacgtttaccatgttggtgtcgcggtcggtgtaggcgaagaagtcgtggcccagtaggtcgatcttcacgagcgcctcctcctcggtcagcggctcgaactcgatctccttcacgcgcacaacctcttcgtcggctgcgagctcctccatgagctggtcgaggtccttggtcggcacgggctcggtgcggatggtctcgtccacggcgcgcagtttgcggtcgatgaccttcgtcttgtacttgcgcagctggcggaccaccttggcggcggccacgtcgatggctgcgtacatgtcctcttcgcattcctccacgcggatgatatggcccttcgtgcgcagggtgacctcgcagcaggcaggacggggattcgcgggattcttctccacgtacagaacaacctcggcaacgagagggtcgatgtccatgaccttcatcgagttgccgatcttctcctcggcgtattgacgcagtgcatcggttacgggcattttgcgtccggctacggtaatgctcatagcactcacctcttacctcgtggcgaataaaaaaagcttggccggaagccctggccgaggtcgtgcggggcggataccgatatgccgctcatgcaagacccaagtcgactcctcacgccaaactgataggtacagcatagcgcaaaacgcccgactgcggcagggtattttagagtcgttggcaaaacggcgcacgcggcgggggcatgcggggtgccgtcttggagagaatgcgctacgttgtgaaatcgggttggaaacgagtggcgaatacgtggcccacgagggtgtataagggataatacgaccttcaggcattgtcgacagatagggcggacatggcatccacaccggccaaagaacagaagctgttcatcaacgaggtgcaacgccatcaggcgcgctaccgcaagctcatccaattcacgcactcttcgacgaaggccgcgggcgccatgctcctggcggccgtcgtggcgctgatcgtggcgaacaccggggcgtacgaggcgttcctggacttctggcacacggaggtgggcgttttcttcggcgacgggttcgccggcatgtcgctcggacacgtcatcaacgacatcttcatggccatcttcttcctgctggtgggcctggaggtgaagtacgagctcacggtgggcgagctcacgaacatccgccaagcgctgctgcccatcgtggcggccgtgggaggcgtgctggctcccatcggcatctacctggccttcaacgcgacgaacccggagacggcgcacggctggggcgtgcccacggccaccgacatcgcgttcgcgctgggcatcctggcgctcttgggcaaccgcgtgccgaacggcgtgcgcgtgttcctgagcacgctggccgtggccgacgacatcatcgccatcttggtcatcgccatcttctacgggcacagcccgtcgctgccgtggctggccgtggccgccgtcgtgctgttcgtgctcgtgctcatgaaccgcaaccacatctactcgctcattccgtacctgctggtgggagccgtgctgtggtactgcgtgtacatgtccggcgtgcacgccaccatcgccggcgtgctgctggcgttcaccattccctcggggtcgcgcgtgaacatcaagagcttcctcacctggtcgggcgacaaggtgcgcgaggcgcgctcggcctaccagcccgagacgcccgtcatcgcgcagggcggctacatcgagacggtgcaggacctgagccgcgtggcgcgccaggtggtgccgccggccacgcgcctggagcaccggctgtacccctgggtgtacttcggcatcctgccgctgttcgccctcacgaacgccgatgtgagcttcctgggtgtggacgtgggcgccatgctctcgagcccggtgctctacggcgtgctgctgggcctgctcgtgggcaagccgcttggcatcatgctgttcagcatggcggtggtgaagtcgaagctggcgtcgctgccggagaacgtgaactggttccacatgctgggcgcgtccatcctgggcggcgtgggcttcaccatggccatcttcgtggcgaacctggcgttccccgacgagggcctggtggccacggcgaagctgggcatcctggcggcgtcgctcctggccggggtgctgggcttcgtgctgctgctgctgcaggcgaaggcggcgcagaagcgcggcgtggcgtacctgtcgtcgagcgccgacgacatcacgcgccagacggcgggcgacgaggccgcgcgcgaggccgaggaactgctgcgcgatttggaggatccggcgatcaaggacgaggtcgaggcggcgaagaagcgcggcggcgtgttcgagatagccgtggacttgggaccgaccggccttttgggcggcggctccatcggggacgtgcgcgaggccgtgcgcaacgaggtggtgcgcgtgctgcgcgaggagggcaaggacgacctcctggagaaggtgcaggaggagttcaaggagcacgccggcgagcccccgctggccagcgtggaggagacgcttctgcgcgagaggggcgaggacgcccttttgagggcgattcgccgcgagagcgacgacgtcgtcggcatgagcggtggcaagggcggggacgaggacgagccgcgggattagcggcctccggtatccgcgcagggggggcgtgccggtgcccggtatgcgcccgtccaggctgccgtgctcccgttctccgcgcgagccgtgctgcacctgcgccatgccgcgatcgccggtgccgcgcttccgcacggccgcaggctgcgctgcgcgcgagccccgaggaacggttggccggagcctcgctgtccgcgtggcttctgcatggggatcgcgcccgccgtgcgaaccctgcgctatactgtacggtcgaaaacgccatgcgaacgaagggaaaccatggaagctgccgccatcgtgctcgccgcgggtgccggaacccgcatgaagtcgaagaagcccaaggtcgtccacgaggtgctgggcaagccgctcgtgcgctgggtggtggacgccgcccacgaggccggcatcagccgcgttgcgaccgtcgtgggccacgagcgccagcaggtggagccgcttgtggaggccgacaccgacgtggtggtgcagcccgagcgccgcggcacggccgacgccgtggccgtgtgcgccgaagcgctcgccggcttcgacggctcgctcgtggttctctcgggcgactgcccgctcatcaccgccgacaccatccgccggctcgtggacatgcgcgagcaggccgacgcggccgtggtggtgctcaccatggagctggagaacccctacggctacgggcgcatcgtgcgcgaccgcgtgggcgccgtggagcgcatcgtggagcagaaggacgcgaacagcgccgaggccgccatctgcgagtgcaactccggcttctactgcttcgacgcccgcgcgctgttcgacgcgctcggccaggtggacgacgacaacgcccagggcgagttctacctcaccgacgtgctggccatctgccgcgccgccggccgccccgtgctggcgctccccaccgacgatccgtccgagtgcctgggcgtgaactcgcgggcccagctggccgaggccacgaagttcgcccagcgccgcatcaacgccgcgcacctggcggccggcgtgaccatgaccgaccccgaccaggtgtggattgggcccgacgtggtcatcgagcaggacgtggagctgctgccgcagacgttcctcatgggcagcacgtccgtgggcgaggacagcgtgatcggcccgaactcgcggctgaccgacacggtggtggggcgcggctgcaccgtggacgagacggtggccgtggaggcgctcatcgacgacggcgcctcgtgcggcccgcgcgcctacctgcgcccggccgcgcacctgtgcgagggcgccaaggccggcacccatgtggagatcaagaagtccacggtgggcaagggctcgaaggtgccgcacctgtcctacatcggcgacaccaccatcggcgaggacgtgaacatcggcgccggatccatcacctgcaactacgacggcaagaagaagtggcccaccgtcattggcgacggcgcgttcgtggggagcgacaccatgatggtggccccggtgagcatcggcgcgggcgccatcatcggcgcgggctcctgcatcacgaaggacgtggcggccgacgcgctggccctgacgcgccccgagcagcgcgagattctcggttgggccgccaagaagcgcgagcagcaagcccaagggtaggtctgccgcttcctgcccaagggttcttcgcgaaaacggggtcggaaagtcaccgttttgaccgctgtgaagtgttttgacgcgcccggaggccttccgggcgcgtttttcgtggagcacaagcgcatttcccctggtcggcgaaagcacgtgtccccctttaggcgtccgagagcttcacggcgtccaaaactgtgcatcgagttccccggaaggtcgagatgccccgaaggggggcaattcccgatcaggatatttcgttgcggtcaatctgcgaagataccgaagttgtcactgtgcgggcaccctgcctgcggatacaatagtgcccatgtgagagggggcgactgctgcggcgggcgcggcggccccgcggcaacatgaaggagcgcgcacatgacggaagtgcagaagagcatggccttgttctcggggtcggtcaaccccgagctcgccgacgagatagcgaagcacctgaacgcctcgctcggcaacgtgaagctggagaagttcgcgaacggcgagatctacgcgcgctaccaggagagcgtccgcggcgccgacgtgttcctcatccagtcggtgtgcggcgccgagggctacgacgtgaacgacgcgctcatggagctgctcatcatgaccgacgccgccaagcgcgcctccgcgcgctccgtgtcggccgtcatctcgcactacggctacgcgcgccaggaccgcaaagccgcgccgcgcgagcccatcacggcgaagctggtggccgacctcttggccgcggcgggcgtggacaacgtgatcaccgtcgacctgcaccaggacgccatccagggctttttcgacctgccggtgaaccacatgacggccatgcccattttcgtggactactaccggtccatgggcttcgaccccgagcagctgtgcgtggtgtcgcctgacgtgggtcgtgcgaaggcggcgaagaagttctccaccatgctggactgcgacatcgccatcatgcacaaggatcgtccgaagcacaaccaggccgagatcacggcgctcatcggcgacgtgaaggacaaggtatgcatcctcaacgacgacatgatcgatacggccggctcgctggtggcggccgcgtccaccctcaaggccaagggtgccgcgcaggtgtacgcgtgcgccacccacggcctgttcagcggcccggcgtacgaccgcatcgccaactcaatcatcgaggaggtcgtggtgacgaacgcggtgcccgtgccgctggagcgccagaccggcaagatcaaggtgctgtcgctggcctccctgttcgcgaagaccatcagcaacgtgtacgacaacggctccgtggcctcgctgttcgagtagggcgcaatgtacctgatcgtaggcctggggaatccgggcgaggaatatgcgcacacgcgccacaacgccgggttcgacgcggtggatgccatcgcgggcgaggtgggagcgcgctactggaagacggagtgcgggtcgctcacggccaagggcgcctaccgcgacgtcgacctcgtgctcgccaagccgcagagctacatgaacacgtcgggcggcccggtgaagcagctcatgaacgcctacggcgtggacgcggagcgccttatcgtcatccacgacgagctggacatcgatcccggcaccgtgcgcgtgaagttcggcggcgggcatgcggggcacaacggcctgcgctccatctgcgacaagctgggcacgcgcgattggagccgcgtgcgcgtgggcatcggccgcccgccgggacgcatgcccgtggtggactgggtgctgtcgctgccaaagaaggaggctgccgacgacttcgcctacgccgtggaccgcggcgcccaggccgcgctctcgctggttacggcgggcttggagaagacccagcaggcgttcaactagggaagcgccgattctcgccgcattggcgctggtgtcgtaaagcaagggctgggccctcgttggaaacctacggctttttcctgttgagcgacaagggcagtgcccctgctctgcgggacggctgcggcgcgcctagcgctcgccccgatgcggatgcgcgggttgcgcttcagcagctccttgtctgcaataaagccgtttctcgctcatctcatcgtcactatccactccgcgagcaagaacgccgtgatgaacagcagcagcccgccgatggcgcgcgcctgctgcttgtcggctcccagcttccgctccagctcgctcgatcccgggtgggagttcacgaactgcagccccttgcccgtgatcagcatgtacagcgagaacgcgagcaggccgaacacgattgcgcccatccccaggtcgacgagcagctgcgccacgtcgacgggcgcagcgaacccggcttccgcgaagcacatcgccacgcttgccgcctggaagaggtcgagcacggcgaacacgccggcgacgacgggaaacgacatccggccgccgaagctgtccgacacgagccagtcctcgcgcccggtcgctcgctgacgctcgaagacagcgaacaggagagcggccgcgatttcgatgacgaagagaatgccagcgccgacgaagagctctgcttttgatccccaacggtcgggcccatccacgtcgaagtgcacgggaaccgtctccggcaggaacggctgggcggcggcggtgaggacgaggggaagcgcggcgagcgcgatgagggccgcgatgcgccagcggctccgccgtgcagtgacttgaccatcggcaacgcagttgtgctcggagttggaagacatggccgccgtcctttcgaacgctcgcataagcatatttagcaatactaagtatagacgaaggggaatcaacgaggcaagcgggtcccgggcgctgcgtcctgccgggcgcttaacggcagggcacctgcccagggagcgcacctcggccgctccgcccggagcgtttccccgatttaggagcgtttgggccgcggcgcttgggctatacttgaagggacggcgaaggtacggaggcaaaggaggctgcggtgcgggagttggtcaagggcgagcgggggcgcgtgtacgcgctgttcgccatcgtgatgctggcctccgccttcggcaacctctcgcagacggccgtgaacgccatgatgcccgagattatgggcgagttcgcgctcgacgtgagcttgggccagtggcttaccaccagctacatgctggtgctgggcatcgcggttcccgcggccacgtttttggggaagcggttcaccacgcgccagcacgtgttcatcgccttggcgttcttcctggtgggggcccttgccgactgcctggcctcgaatttcgccgtgctgctggccgggcgcatctgccaggccgtgtccacggggcttctgcttccgctcatgcagactatcgccatgacgcgctttcccgagggtcgccgcgccacggccatgggcatcgcgggcatcgccatgggctttgcgccgaacatcggaccgactgtcggcggggccttcagcttctcgttcggatggcgcagcttcttcgtgctgctgctggtgggcgtggcagtgctgggggttgccacggcgctgctcgtgcgcggcggggagggcaaccgcagcgagcggttcgatacgctgtcgttcatgctgtcggcgctgggcttcggcggcttgctgctggggttctccgaggcgagcagtttcgcgctcaccagcccgttcgtctggggcccgctcgtggcgggcgcggtgttcctcgtgctgttcgtgcagcggcagaagcgcgtggaagatccgctcatcaacatggacatcttcaagtcgggccagtacacggtcggtttcgcggtgttgtgcctgctgcatgcctcgttcatgggcgtgacgctggtcatcccgctgtacgtggagggtccatgcggcggcacggcgctcgacgcggggatcgtgcttttgcccggcacgttggcggcgctgttcctgaacccgctggccggcgtgctcaccgatcggttcggcatccgtcccgtgacgctggcatcgggcgcgctcttggcggtcggatcggtgctcatggtgttcctggacgaggagacgccactcgccgtcaccacgttctgccaggccgtgcgcgcgttcggcgtgtcggggctcatgggcccgctcatctcgtggagtctcgccggcctgccggggcgtatcgttaccgacggcagctcgttctccatcgcggggcgccaggcgtgcgcctcgctcggcacgtcggccatggtgctgctcattgccctggcgggcacctcggctgccgcggcctccaaccccgcgctgccctaccagctggcgttcgccttctcggctgtgttcgccgtggccacgttcgtcggcatcgtggcgaaggtgcgctagggccgcttcgagcacgctctgggacggatagcgctgctgcagcccacctgctcgggtatcgccgaaccaggctgtggctggcgcgggcaggttgatatcagcgcgacgaccggatgacggcttttcgggacgcatggcggcatgggcaaagatatatgttgacaacatagatgtttcgggagtatatatgttcatgtcatatagctgtagacgacagagcaggcgagcggcgaatgccggcaggtcgcggaggaacgacgaccgccgcagaaggggcggccagacggcgtaatgcttgcggcccgctggggcggcgcgacggaagcgccgcgttggccggtgcaagccgctaacccgccgtagagatggccgacgggccgggaaaaaggaggcgaagcgcatgccgcgaggcgactgcggaggagagggtgcccggcaaccgtgctgtcgacggcgcggcgggggcggcggcgcgttggtggagccggcggcgttggcggccctgctgtatgccggcggctacggctacgacatgcgccgcaccatcctcgacatgacggacggcgaggtggacgtcgacgtgggcgggctgtaccgttcgctgcggaggctggaggacgagggcgctgtggcgtcgcgctggtgcgaggacgcctccggcccgcgccggcgcgagtacgagctcacggaacaaggcctggagctggccgagcagtggctcgacgcgcttcgggcgcgccagcggctcgacgagctgctggtggggttgctggaaggcggcttgaacgccgccggccgaagccgcgagagcgcgcaagcgccgagcgaaggctgaagaacgccgtatggcgtcgcgctaagctgcggtcgatgagtgcgaaggcttttgccagctcagcgaaacggcggatggcggcgcgggcgcgaaggcgcgcagatggctgccggccgtccgccctgctgactcggcaaggcggtgtctgcgcgggcgttcgggaaacgagaagggcacgacccgaggcgacgaggcctcggaagacgataagcggaacggcgacgttccgggaaagaagggtcatcatgggagaaacgctgaaactcgcggtgccgacgatgggcgcagccgaccttgcatccgagcgctcgggccatttcggccactgcgactgcttcaccatcgtggacatcgaggacggcgagatcaaaggcacgtcagagctggcgaacccgccgcacgaagagggcggctgcctgcgcccggtgggcctgctggccgacgccggcgtggacgccatcgtggcggctggcatgggcatgcgcccgatgatgggcttcaacgacgcgggcatcacggtgtacttcgagaaccagacgccgaacgtgggcgaggtcgcgaagctcgtggcggccggcagcgtgccgatcatgggcgccgagaacgcctgcaaccaccatcactgagttcgcaaaacgatcgattgcgaggggcgcccgccgaacggcaggcgcccctcgtgcgttctagtgagaggctgattaacgcaacgacacccttcttgattgcgctaggtttgcagcatttgaacgcggccctttaaatatgactgatagagtcatggacgaaatcagaggctagggcatgcttgaacgaatttctgccgacacgaatccgagaaacccctggtggcgaaaagccgtccccgaggttcgccgtcgaaaacatgccatagcctccgacttcgtcccgccccttctgcggtgcttttctgctgtgcccttttggcgctctagggaagcaccgttaaccagcgtcttcctaggggatggcgtgcacgtatgccatgcagacgcgctgggttttgggcgcagggctgcctggtcgtgctatcctgctcggtgagagaaaggagcgggcttgggccgcggagaggaacagggacgaagcgcagggcaaggcgggacgtacaccgtgtcggcggctaggtcgctgctcggcgccacgcgccgcgtgttgcccgatgccgtgccgccgccgtccgcgcctgcagcggcagaagcgcaggcgccggtatacggctggattgccggcgcctgcgcggcgccatccaagggcgaccgctacgtggtggagttcctgggcaggcgggagttccgcatcctagcctacgtggaccgcttcgggcgcgcgttctccacggaccggccgctcactgcgccgcctgcccgcaggcccgacctcgacttcgcgcgctttgtcgacgaggctcccgcggacatgggccgtggccctgcagagacgtgcgcggacgggcatacggccgtccggggagcgcgcgccgacgcggagcgcggcccgggggctcgcccggacggggagcacggctgcgtggaggtgcgcacgggcggcgaggacgagcggcaggtggcgcggtacttgtgcaagggcggccgctacacgttcacggacacgtggttcgacttcgggccgcacgccgcaggcctctcctacgacgacgccctcgcccgcgcctacctggcgttcgtgcaccggccccggctgggcggggcggaggtgcccgagaggggcacggccttcgtccacgagcgtctgcgggaaaccccgctcctaccggtcctgcgccccatcgtcgaccaggtgggcagcgcagagagcgacccggtggtgcagccgcccgccctggtgagaagccttgtgcggtggctcgaggaagccggcctgaacggcctgcgcccgccggccgtgccggacgaggcgctgcggctcgtgcgcaccgcgcgctacgccaacctgtactacatagcgcaagaggacgaggacgcggccgtcgaccgccgcaccgtctgggccctggaggccgcgctcaaccggttcaccctgatggaggaggcgttcggcgaccgcgcgacgctggccggctacgcggactgcgcacgctgggatgcctacctgatagagacggcgggggcgcaggcgttgggcgccgagcgcctggccggcacgccccgagggtccgacgacggcgaatgggaggcgcgttgccgcctggccggcgtgctggagcggctgaagctgccggtgcgcatcgaggcgcagatgcaggcgaacgtggcggagggccttgcagctttccggctgacggtgccggacgccgcgctcatgcccgcgcgccgatgggtcgaaggcccggcaggtgccggctgggaggacgtgccgaccgccgagcgcgacgcccaggcgcgccgctacgccatgcacttcggcctggcgctcgccgccgcggcgttcgaggcctctccggccatccgccgcgtcgatgtggcggcctgcccgctcggggacggcgctccgcccgccgcgcccgatggccgcgagaaccctgccgcgccggacgccgagttccctgccgatcggcaggaggcggcctactaccaggttgcgctcactcgccgggcctacgaggagtcgggctgcttccgcagcgccctcgagggcgaccccgcgccgctgctcgcgtactgcggggccgtgtgcgacctgcccggggccgacccgttcgcgctcatgcaggcgctgccctccaccgcgcggcgccaggagctgcccgagctggacgacgcgcccctgccgcaggccgtgcggcccgtgctcggcaccgacgatgcgcgcgacctgcgcatcgcggccgaggctcgccgccgtcgcgtgggagaggggttggccgaccgcatcgcgcgcgccggcagcgccaccgaggccattcgcatcgtgcgtaaggagcagcacgccgcccgcaccctcggcgacgaccaaggggtctcggcctgcacgcgcctcatggcggcgctcgcggagggaacgctggacaccgaggaccagaatgccgcggtgacgtgcttcctcggcgaggaccgctgcctggccgccctcgcccgcgcccgtgcgctcgccccgcgcgaccccgccgaggcggtggccgtgctggcggacgcggtgtccgaagccgccgcgctcgacggctacacggacggcgccgtgaccgcataccgtgcgttcgactcgtacgcggcgcgcgtgcggtactcccgcgccctgcgggccgtgcgccagaagggcgccggcggttcgcaaccatcagccccgtccgacgcgcccgctgtgccgaccctcgccgctcgggcggccgctgacgcgggcaggcgcatccagctggcgcccgactcgttcttcctctgccatttggagatcgtcacgctgctggaacgctcgttcgaccgcgtggacgacgccctgcgctacggcaggcgcgccatcgagctggcgcccgcctcggccggcggttaccgccagctcggccgcgcctacatgctggtgggcgatatggacagcgctgcggccgtgctggaggcgggcctggatgtggccgcgcagccgaacgacgtggccattgcctactaccagctggcctatgcgctgtggaaggcgggcaggccgcgcgcgggtgcggcctgctacctcaagtcggtcatgacgtcgcccgtgatggcgctgcaggccgtggccgagctcaaggagctggccgcagagcacggcatggagccgatcgagcgcgatgccgtggatgacgaactgcgcagcgcagggatagtgctggcgccgacggaggagatgttcgagaccctggacgcgggtgccgcggccgctgtggacgccggcctgttcccggtcgcccgaaacctgttgtcgctgcgcctgcactaccgcccggacgacgctctggtgaacgtgctgaagtcgctggagtgaagaacgcgtttacgggatgatgggcttgggcaggatctcgcttagcttcttgcggttgcgcagcagcaagaggaaggactcctcgtcggctgtgaggttgcccttggtgtgcgtgaggatgctgagcgcccgcgcgaacgagcagtccttcacgcgcagcgccgtcatctgcttcaggcggcactcctcctgaacggtcagcgcggagatgacggccacgcccatgtggcacctcaccgcctgcttgttggcctgcgtgcttcccagctcaagccgtatgttcagatcctggtggttgaagccgctgcgcgccagggccagctccatgaccttgcgcgtgccggagccctgctcgcgggtgatgagggtctcggacgccagctcgctgaagctgatggactggctcgtgctccatggatggtcgctgggcaccacgaccaccagctcgtcgtgccagaacgtctccacggtgaagttcggctcgtcgggcacgggtccttcgatgagcgcgacgtgcagccgcttgtccatgatctcgcgcgcgagaatctcggtgttggctatctgcacgtcgatgtcggcatcctgttcgttcgtgtagtactcgcgcaggaagaagggcaggaggtactcgccgatggtgaacgtggccccgatgcggatgccgtgatggcaggtggccgccttgagcacggcttcgcgcgcctcgcagatgagctgcacgatctccttcgcgtagccgtagaacacctcgccgctctcggtgagggtgacgccccggttggtgcggtcgaggaactgcgtgccgtattccttctccaggttctggatgtggatgctcacgcttggctggctcatgtgcagtcgttcggaagtgcgggtgatgttgccggtgtaggcaacgtccttgaatacgagaaactcctctaaagaactcatgccgccccctcatgctttgcaaaaggccgacaaggccccttgttagacaacgaacggtaccctccccggaaaaaagtataagtacagcggtgtcaatttggccatagagagaacaggggatgccatacgtaattccgattccagggaaacgctgcctcccacgcggccgaatccttgttctccccttgctgcgttcatggtttctcagcagagtattgccagatgaatcgatggttttcattttcattgcacagagggagcccagcgtttgcgcaaccattttaccgcaagtcatagctgctttttatgacgctatcgcaaaacagaattttacacttcggcaaccgtgccgtagctttaaggccatgccggtgcatcacgccgagacggtttttccaccgatgcgcgctccggaaaagggcgtaggggggcggtttcaatgacggttgatatgctcgtgtccgtgttcattctgcttgcgatgttcggtttcttcgcgctgtccttgaggaaagcctacaagttcgcgcacatgcagatccatgcgcgcctcgacctctatcccgttcccaaggaaggcggcgggcgggcggcctacggcggctcgtacatggaggagcccgagtggtggacgaagccgcgcaagatcgaccgggtcaacgaggccgtcgacatcatgaaggaaatgctgttcatcaagaagcttttcgtgcaccagcgcgtgctgtggtgggcgtcgtactccatgcacctgggtatctacgtcatgctgggatggtcggtgctgctgctggtcagcgtggcgtggcatcccgactggtacgtgctcgtggtgaccgtcgtcggggtcgtcggcttcgcgctgtcgacggtcggctgcgtgctgctgctggtgcgccgcgtgtcggaccgcgtgctggctaagtacaccaccccgctcgagtacttcaacatcgtgctgctgctgacggtgctgctcaccggcgcgtactcgtggctgttcgtcgcgtcgcccttcgcggtggccgcgcaggtgttcacgctgagcgccacggacctgccgcccatcgtgctcgtgcacctcgcgctgctgggcatcatgttcctgtacatcccgctttccaagatgagccactacgtgggcaagttcttctgcttccacaaggtgctgtgggacaacgatcccaacctgccgggcagctccgtggagcgccggttcgaggacgccgcggcgcatcctgcccataccggctggtcggctgcgaagcagcaggcgcccacgtccgagtcgtcgaaaggataagcggtcatggccatggaatacaagaacgtgcggaccacggacatctcgaagcgggaaggcctgctgagcgccctcgacgacttgtcgcccctgcccgcgccgtacgacaagaacggcctggagcccgccttcaaggacccgaagcccgaatgggccgagacgaactgctgctcgctcgacggcttctgcgccatcgacacgatgaagcgccccgagacgcaggaagaggaggacgagctcaaggtcaagttcctcaagggactggagaagctgttcctcgacgccaacaacaagtacctgcaaccgctcagcttgacgatggagtactgcgcgaagtgcaacacgtgctcggaggcgtgccatgtgtacaaggcggcgaacggcgacgagatataccgtcccatcttccgcgtggacgtgctgcgcaagctgtacaagaagtacttcacccgctcgggcaagcttctcggctccctcaccggggcggacatcgacctggattgggagaccatcgcgcggctgggcgagtcagcctatcgctgcaacctgtgccgacgctgtgcgcaggtgtgcccgatggggctggacaacggcatggcagcccgcgagatacgcaagatattcagcatggagatgggcctggcccccacgcccgtgcacgcgaagggcacgcagctgcagctgaagacgggttcctccacgggccttacgaggccggccctgatggacacgctcgagttcatcgaagaggacacctacgagcgcacgggccgcaagataaagttcccgctcgacaagaagggcgccgacgtgctgctcttccacaacgcgggcgagttcatggcctggcccgagaacccggcggccttcgccatcctgcttgacgaggcgggcgtcgactggacgctcagcaccgacgtggtgggctacgacagcgtgaactacggcatctggtacgacgacgtgcaagccaagaacgtggccatggcgcagttcgaggcggccaggaagctgggcgtgaagcgcatcgtcatcggcgagtgcggccatgcccacaaggcggccgtcgtgggcgccgaccgcatggccgacagccaggagcgcggcgtgcccgtggagagcttcctgcccatgatggccgagttcgtgcgcaacgggcgcctgaagttcgacccttcgaagaacgacttccccgtcacgttgcacgatccgtgcaacatcgtgcgccagatgggcatcgtggagccccagcgcgagatactgcgtgcgatagcgccgcagttccgcgagatgacgccccacggggtggacaactactgctgcggcggcggcagcgggttcgccatcatgaactcctacaacttcggcgacttccgcacgaaggtgagcgggcgcatgaagttcgcccagatactcaacgcgtttgcggacgagatggaagaccccgacatagtgaagtacgtctgcgctccgtgctccaactgcaagggcacgatacgcgacctccttcaggcgtacaaggccactgcgcgctacaacgtgcagtacggcggcatcgtcgagctcatggtcaacggcttggcgagcatggatcggccctacttcgagttcttggaggagtaggcgctgcccggggtcgcgcaaaaggcgcgcggccccggggttgaccgggtttcgcgcgcgcctgctggggagcgggcggcagggggatgagacgggagcgggactatgtataccatcgtcgtggggctgagcatcaagcgcgccccccttgagattctggagcagttgagcgtgcaccactcgcagaacgcgctgtgcgtgcaggatgtgaaggcggcagcggggctgtccggtgccgtggtgctgagcacgtgcaaccgcctggagttctacggcgtgtgcgaggacgccgacgagggcgtcgcgcgggtgtgcgacttcatcttgggccagaacggtgcggctgacgccgcccaagcgcggcagtttcgcgagcttctgtacgccttcacggacgggcgcgccgtgcgccacctgttcgaggtcgtgtgcggcctggactcgctcatcgtgggcgagacggagatagccggccaggtgtcgcgcgcctaccgggcctcctgcaaggcgggagccaacgacaagatggtcaacgtgtggttccagcgcgcgctgtcgctgggcaagaaggtgcgctccgagacgcgtatcagccgctactccacctccatcgggcgcatcgccgtggagctggccgtgcgcgagctgggcggcatcgcggacaagcgcgtgctcatcctgggcgcgggcgagatgagcgagctgaccatgaagtacctcgtggcgcagggcgtttcggtggccatggtgtcgaaccgctcgctcgacaaggcgcaacggctggccggccagtacggcttcggcgcctgctccctcgacgagctggatacctgcctggagcaggccgacgtggtcttcgcggccacggcggcgaagagctgcctggtggggcgggagcgcctggccgcgatcatggagcgccgcgccgagcggccgctgctgtgcatcgacatggcccttccgcgcgacatcgacccggatgtgcgcgacattcgcaacgtgagctgctacgacatcaacgagctgcgcgacgtggccaaccgccaccagagcgagcgcctgcgcgcggcaaagacggccgcccagctcatcgacgaggcggcggccgacttcgagcgctggcagcgctcgctggagtacatccccactatcgacgcgctctaccgccaggccgaccgcatcaaggccgacaagctggagcgcgctatgggcaagctctcaggcctcacgcccagccagaagcaggccgtgcagtgcctggccacgtccatcgcccaccagctggtgcacgagcccgtggcgtcgctcaacgccatggcgggttccgagaagagccgtgcgtacgccgccatgctgcaggagctgttccacctcgatcccgaggaggagcctgcgagtgcggaggcaccggtgcctgcggaagcgggagcgggccccggggatgcgttgacgggaggttcgcgatgaagcgcctggtcataggcacaagaaagagcgaattggcattatggcaggcgaagtgggtgcgcgagcgcctgatcgaggcgcatcccggcctggaggttgagctggtcgagacggacacggcgggcgaccgcgacctggcgacccccctgccgctcgtggacggaaaaggcgtgttcacggccgagatcgaggagggcctgcgcgacgggaccatcgacctggccgtgcacagcctgaaggacctgcccaccgagctgccggagggtttcgagatcggtgcatactgtatgcgccacgacccgcgcgacgcgttcctgggcaaggacggcatgacgctggccgacctgcccgagggagcgcgcatcggcacctcgagcctgcgccgggccgcccaggtgcatcgcgtgcgccccgacgtggagtgcgtgagcatccgcgggaacctggccacccgctggcgcaagctgcaggaggacgagggcatggccggcatcatcctggccgtggccggggtggcgcgcctgggatggcgcgaccgcatcaccgagtacctggcgcccgacgtggtcatgccggccgcgggccagggcgtcatcgcggtggaggtggccgcgggccgcgacgacgccgccgcgctcgtgcgggccgtgaaccatgcggagtccgagcgcgcagcgcgtgccgagcgcagcttcctggcggcgctcgagggcggctgccagacgcccatcggcgcgctggccgtgtgcaccggcgacgtggtcaggctctcgggcatggtgtgcagcctggacggcagtcacatggtgcgcgtggagcgcacgggcacgcagcccgagcgcgtgggccgcgaggccgccgaggacgcgctcgcgcggggcgcggcggatatcctgcccgcgggcgccgatcgggcgggggtgtgacatgccgcattcgacgggagagacccgggtatacctcgtgggcgccggacccggcgatcccggcctgctcacgctcaagggccgggcggccatcgagcgtgccgacgtgctcgtgtacgaccggttggtgtcgccgcgcctgctgggctacgcccggccggactgcgagctcgtctacgtgggcaagacccccgaccaccacacgctgccccagcacaagatcaatgcccttctggtaaagaaggcgctggccggcaacgtggtcgtgcgcctgaagggcggcgacccgttcgtgttcgggcgcggcggcgaggaggcggaggagctgcgcgaccacggcctgccctacgaggtggtgcccggcgtgacgtcggccatcgccgcccccgcgtatgcgggcatcccggtgacgcaccgcgacgcggcctcgtcgttcacggtgatcacgggccacgagcgcgacggcaagggcacctcggctatcccgtgggggcaggtggcgcgcctcaagggcacgctcgtgttcctcatgggcatggagaacctgccgcgcatcgtggacaacctcgtggggcacggcatggatcccgccacccctgcggccgtcgtgcgctacggcacctggccgatgcagcgcacggtgtgcgccccgctggcctccctcgaggagcgcgtgggcgaggagggcatcgagaacccggccgtgatcgtggtggggcaggtggccgcgctgcgcgggcgcctgtcctgggcggagcgcaagccgctgttcggcaagaccgtcgtggtcacgcgggcccgccaccaggcgtcagccctcgcgtcctccctcgaggagcgcggcgcgcaggtcctcgagttcccggccatcgagatagcccccccgaccgacccgcgcccgctcgccgaggcgatggccggtatcgaggcgtaccactgggtcgtgttcacgagcgcgaacggggtggacgccttcttcgccgaggccgcggcccagcacctcgacgcccgctgcctggcaggagccgaggtggcggccatcggcacgggaacccaggcggcgctcgcggcccacggcatcacgcaggtccaggttgcgcgggagttctgcgccgagggtctcgcagggctgctggcggataaggtgcgcgcgggagagcgcgtgctcatcgcccgtgccgaggaggcccgcgacgtgctgccccgggcgctcgaggaacagggtgccctggtgagcgacgtggccgcgtaccgcacgcaagcggtggcggagggcgcggaggcgctcgcggccgccctgagcgcgggcgacgtggatgccgtcacgttcaccagctcgtccacggtgacgaacctgctggcatgcctggggggcccgacgctgctcgaggggacggacctgtactccatcggccccgtgaccacggagacgctgcgcgcagcgggcctcgaaccccgcgcccaggcggccgagtacaccatcgcgggcctcgtggccgcgctcgtcgattcgcaagaaggagagctcccatgaagatgcgcaagcgcccccgccgcctgcgggaaacggccggcctgcgggccatggtccgcgagcaccacgtgcgcgtggacgatctggtctacccgctgttcgtgtgcagcggcacggacaagcaggagcccgtgccctccatgcccggcgtgttccactactccctcgaccggctcgggccggtgctcgacgaggtggcgggcaagggcattcccgccatcctcctgttcgggctgccgcccttcaaagacgcccgcggcacgcaggcctatgccgaagacggcatcgtgcagcaggccgtggcccttgccaaggaacggcagcccgggctcaccgtcatcaccgacgtgtgcctgtgcgagtacaccgaccacggccactgcggcctggtggacggcgagcgcgtgctgaacgacgagtcggtggagctgctggccgccacggccgtgtcccatgcccgggcgggggccgacatcgtggcgccgtccgacatgatggacggccgcgtgggggccatccgcgacgcgctcgacgagaacggcttcgctcacgtggccgtcatgtcctacgcggcgaagttcgcctcggccttctacgggccgttccgcgaggcggccgactcggcgccgcagttcggcgaccgcaagagctaccagatggacccggcgaacggcgacgaggccctgcgcgaggtcatgctcgacgtggaggagggcgcggacctcgtcatcgtgaagccggccatggcctacggcgacgtgctgtaccgcacgaagcaggcctgcggcctgcccgtggccgcctactgcgtgagcggcgagtacgccatggtgaaggccgcggccgcgcaggggtggatcgacgagcgccgcgtggtcatggaggcgctgctgggctgcaagcgtgcgggcgccgacctgcttatcacgtaccacgccctcgacgttgccgggtggctgcatgaatcgatgtgaccgaccgcgccggcaagacggccggcgcggggaagaaggaggtgtgccgggcatgctcgacacgacgagaagcgaggaagcgttccgcattgcctgccgggtgataccgggaggggtagactcgcccgtgcgcgccgcgcgcgcggtggggcgcaacccggtgttcctggcgcgcggcgagggcgcgcacgtctgggacgtcgacgggaacggctacgtggactacgtgggctcgtggggcccgctcatctgcgggcacgcccatcctgccgtggtggaggccctgtgccgcgcagcgcagcaggggtcttccttcggcgcgcccaccgaggccgagacggcgctggccgaggagatacgccgcgcgtacgacgcggtggagatggtgcggttcgtgaactccggaaccgaggcaaccatgagcgcccttcgcctggcgcgcggcgccaccgggcgcgactacatcgtgaagttcgagggctgctaccacggccactccgacagcctgctggtgaaggccggcagcggtgcgctcaccaacgggaatcccagctcggccggcgtgccgaaggaagtggccgagaagacgctcgtggcccgctacaacgacagcgagagcgtggccgcgctgttcgaccagtaccgcgagcgcatcgccgcggtcatcgtggagccggtcgcgggcaacatgggcgtggtcccgcccgatcccggcttcctgctcgacctgcgcgcgctcacgctggagcagggaaccgtgctcattttcgacgaggtgatgacgggcttccgcgtggactacggcggcgcctcgcgctattacggcgtgctgcccgacctcgtatgcctggggaaggtcattggcggcgggctgccgctcgcggccttcggcgggcgcgccgacctcatgcagggcttggcccccctcggcccggtgtaccaggcgggcaccctctcgggcaacccgctggccgtggcgggcggcttggctacgctcaagctgctgcaggagcccggcacctacgagaaccttttcaaaaccaccgccgacctggctgacggcctggagggcatcgcgcgcgattgcggcgtgccgctgcaggtcaaccgcgtgggggccatgttctcggccttcttcgcggacgagccggtggtcgactacgaaagcgcctgcaacgccgatgccgacaggttcgcgcgctactaccgggccatgctggaggcgggcgtgtaccttgccccgagccagttcgaggcggcgttcgtctcgacggcccacagcgggcaggacatcgcgttcacgctggagcaagccgagcgcgcgatgcgcgccctttaacgcatcgcgcggtacgtgcgtgcagctcgaagacgagttcgcaacgggaaggaggtgattggtatgtatatggtttctcttgacgaggaggtgtgcaccgggtgcaactcatgcgcagacggttgtcccgcgggcattttggatttcgacggggagaaggcctccatcaaaggcgacccgtgcgactgcatgggctgcgaggcctgcacgacggtatgcccgtccggcgctatcaccgtgatggaactgtagcgccaacgaaccccccggaaaacaggaggatattatggcagagaagagagaaaccccccagctcgacgagctggagaagggtccgtggccaagcttcgtgacccagatcaagcgcgccggcgagaagaacgccatggccgacgatctgctggggctgctcgagacgtcctacgaggacaaggtcggccactggaagcacggcggcatcgtgggcgtgaagggctatggcggcggcgtcatcggccgctacaccgacatgcccgaggagttcccgaacatcagcgagttccacacggtgcgcgtggcccagccgagcggctggttctacacgaccgacatgctgcgcgagatctgcgacgtgtgggaggagcgcggcagcggcctcacgaacatgcacggttccaccggcgacatcatcttgctgggaacgaccaccgaccagctgcagcccatcttcgacgacatcagcgaccgcggcttcgacctgggcggctccggttctgacctgcgctcgccgagctgctgcgtgggccccggccgctgcgagcatgcctgctacgacacgcttgacatgtgctacgacctgaccaacgagtaccaggacgagatccaccgtcccatgtggccgtacaagttcaagttcaagatgtccggctgcgcgaacgactgcgtggcggcccaggcgcgtgccgactgctcgatcatcggcacctggcgcgactccatcatcatcgaccaggacgaggtgaaaaagtacgccgccgacggcctggacatccagatggacgtgtgccaccgctgcccctcgcactgcctgacctacgacaaggatacgcaggagctctcggtgaacgccgaggagtgcacgcgctgcatgcactgcatcaacgtcatgggcaaggccatcaagcagggcaaggagaagggcgccaccatcatgatcggcgcgaagtcgaccatcgtgaagtccgccttcatgtcgtgggtcatcgtgcccttcatgaagatggagccgccctacaccgagttcaaggagatgatggaccgcatctgggactggtgggacgagaacggcaagacgcgcgagcgcatcggcgagctcatctaccgcctgggcatgggcgagttcctgcgcgccacgggcattccggccgttccccagatggtgtaccgtccgcgcgccaacccctacgtgttctggcagaaggacgagatcgaagtctagcgcgctcgcgcttgaaccgtattgttcccgttgaaagatgaggtgagttacatgcccaagatcgacaatggacctccggactaccgtaagaacctgccgcctatcgtggagcagaactacggcaagtgggagtaccacgagtcgccgcgtcccggcgtgctgaagcacgtgggcccggccggggcgctgtacagcgtccgctgcgcctcgccccgcctcgtgtgcgtcgacttcatccgcgacgtgtgcgcgctggccgacaagtactgcggcggctacctgcgcttcaccagccgcaacaacatcgagttcctcgtgtcggacgagcagaacgtcgagccgctcatcgaagagtgcgaagctcaagggctgcccgtgggcggcaccggcgcgtccatcagcaacgtcgtgcacacgcagggctgggtgcactgccatacgccggccaccgacgcctccggcatcacgaaggcggtcatggacgacctgttcgagtacttcaagcgcgacgacctgcccaacaagctgcgcatagccatggcgtgctgcctgaacatgtgcggcgccgcccacgtgagcgacatcgcgctcgtcggcatccaccgcaccgtgccgcgcatggaccacgatgccatccgcaagggcaccgagatcccgagcctggtggcctgctgccccacggcggccatccgccccgacccgaagaacaagagcgtgaccatcgtggaggagcgctgcatgtactgcggcaactgctacaccatgtcgcccggcatgcacatcatggacgccaagaacgacggcgtggccatcttgatcggcggcaaggtgtccaacgcccgcaccgcgcccagcttctcgcgcatggtcatcccgtttctgccgaacaacccgccgcgctggcccgaggtcaccgaggcggtgcgccacatcgtggacctctggatcgccaacgcccggaggggcgagcgcctgggcgagtgggtcgagcgcatcggctgggagcgcttcttcagcctgtcgggcatcccgttcaccgacaagcacatcgacgactacatcttctcgcgcgagacgttcaggacgtcggcggcgttcaagtactagcgtttcgagctctcaatccgcgtcggcggggccggcggaaccggtcggcgcggattggtcaacgatagccgatgacatcgcttatcgctgatcgagtgtttgagggacgagcggcgatgcagctgctcgaacaaagaaaaggggatattatgtcaacaaacaataccaagaccaacggcgggggcctcaagagcctctatttgaaggaggactggtgggccgtatggatcggcctcggcatcgtcatcgtcgccctgatcctctgggcaaccgggcagtccggcatcctgggcgcccttaacgtcaagttcgcaggatacagcgacttctcgggcctgctgccgtgcgtgaccgggatcttcccgaacgccatcatcctctacgtcgtattggcaatcatcttctcggtcgtcatgggaatcatgggaaagaacgttcccaagttcctcgggggcttcacgctcctgtacgtgatggccatcttggtccagatcctttccgcttggagcctggcgaagcagttcagcctcgaagcgccggtcatggccctgatcgtgggcatcatcatcggcaacttcgtgaagatcccggactggttcgaagccggcatgcgcaccgagttctacgtgaagaccggcatcgtgctcatgggcgccacgcttcccttcacgctgatcctgcagtccggcccggttgccctcatgcaggccacggtcatcgccgtgtccaccttcctggtgatctacttctgcgcctcgcgcctgttcaagcttgagaagccgttcgcggcgacgctggccaccggcggctccatctgcggcgtgtcggcctccatcgccatcgggtctgccgtgaacgccaagaaggagcatgtgtccgtctccatctccatggtggtcatctgggccaccatcatggtgttcctgcttcccatcatctgccgtgccctggggctttccgacggcgcttccggcgcctggatcggcacgtccgagttcgcggacgccgccggcatggctgctgccgcccagttcggcgatggtgccatcaccacgttcaccctcatgaaggtcgtcggccgcgacatcttcgtgggcgtgtgggccttcatcctggccatcatctccgtcaccatgtgggagaagggcgaaagcgccgacggcacccgccagaagccgtccgccggcgttatctgggagcgtttcccgaagttcgtcgtgggcttcttcatcgcctccatcatcatcaccgtcgtgacgctggccagcacccccgacgttgcggccaccatcgacaagcaggtgctcggtcccatcaagggcctgcgcggctgggcgttcatcctgtgcttcctctgcatcggcctgaccacgcgcttcaaggcgctggctgccaccggctggaagcccttcgcggccttcacctgcggcgtcgtggtcaacgtggcgctcggcttcctcttctccacgattatcctgaacagctactggacgaccgtgggacttgggtaagcaatggacgagccaaccgtagtcaagcatacctgcattcaaagcgcctgcttcttcctcccgttcttcgaggcgggggagtggcgccggagggggaaatcgccttggaagtccgtcaagaagatcgaggcgactccggatgcgattcgcgagctcgcggcctacacgaaccggtgcatgtcgcacagcgcggccgtcatggagttcctgcttagcatccatgacgactgggagatcaccgtcaagaaggacggggtgtggatggaaacggagacgatgatctacgaggacatcctcccccagctcgaagaggcggggatcagcgagaacgactacgcgctctacagcgagtacacgcgcaaatggggcatgatctagccccggaggttcatgcttgaagccgcaggcggtctcgcgaaaacggggctgcctgcggttttttcaccacaggggcgatgcgaggggaaagggagcaagatgagagcttacgagcgtatcgtggaggtgctcggcgacgaggccgacgcggagtctcgcgaatgggtgcgccgcaaatacaccgtcagagtgcgcgtcgcgggggttgccgccttcgcgttcttcgtgatgatcatggggatgtcgggtactccctggttcgccatcagcacgttcgtccttttgccgctcatgatcgtcgcggtgttcttcggggtgttcatgagaggctcggtgaacaagggcctcacgcgcctcatcgacgacgactgcgacccgctcctgtgcgctcgccggacgctcgccctgctcgagaaggacaagaagaacgccgacccgcgcagcggcctgttcagctatgcctacgccctgcgatggcaggggaagtggaacgaggcggccaagctcatgcgggatttggaggacgatcccgacccccagagcgggtttctctaccacagccttatggcgtactgcgcgttcgacaagcgcgacctcaagggccttacggccgaggtcaaggccttaaaggagcttcccagcgaagggctgccgaaagatgcgcccgcccacattgccgagcacgtcgccctgcgcgatatgctggccaaggagctcaacgggaagccgtccaaagcggcggccggctacatccaggttgccgacggccccaaggcccttcctgcgcatcgcgtgttgttctcgctgaaggcggctgattgtctggccgatcccgccgagcggcacgcgcgccttacctacgtgggggagcagggcggcagcacgtggtgcgctgcggaagcgaagaagcggctcgagaaggaatcacggaagaagctcaccgacgccccggcggatacggcggcgtccctttgattcccggcacggcggcccggctgcaagcggctcgggtggctcttttcggcggggagggagcgatctaacttggataagatcacgaaaagcggcattcgcgttctggtggaggccggcgacgagcgggcggtgctggcgcttttcgacgaggacccgcatcgggtgcagcgcttcctcaagcgcctggcctgcgcgcccgacgcagcgtgccatgcgcgcaccatcgcgtgcttccgcatgctctcgcgcgagcggtcggcgcgcatgcccgagttcttccgggagaccgtccggcgcagcctgtgggagatgaacgaggagggcggcaacgtggcgtggtcggcgccggaaatcgccgccgccgtggtggccggcgcgcccgaacgctacggccagttcgcctcgtacctgatcatggccgctctcgacgagcccacgttccaaccgagcctgctcgccgccgccgacctcctggccgaggccgaccccacgctggtagaggagttcctgccggagctggaatccctgcgccgctgagccggtgggtctgctttcctaagcagcggaactcattgcatgcatgctcgcatcacgatctcaaagccgtgaggggaaccaccgccacgccatcttcgcgtcggtagccgaaccttgtcaagccgcatacgaccgctaggaaagacgggggcctgcatccttccgaaaccagtttatcccgcagtttaaccaggccgttcgctgcttcgtcgatttgagacgcacccagcttcacttcgatagcggcccatcggtcatcatccgcttcgacgatcagatcggcttcacggccagctgaatctcgatagtatgagattttgcatccaaggctttccgcatacaccttcacatcgcgagtgaccaacgtctcgaacaaaaacccgaaggtgttgaggtcgcggataagtgcggcgggcgtggcacgcaatgcggcaaccgcaagtgacggatcaacgaaatgcctcttgacctttgtgcgaaccgcttttgccgatcgaatattgggatcccatgcaggtatatcctcgataacgaataatcgcttaagagcatcgaggtacgccataagcgtgggcttggatacgcttaccccgccttcatcgcggatgtccttgagcaacgtatcatagctgacagacgtttggttgttccgcgcaagagagcgaagcaggcgctccaccttgcgagagtcccgctcaacaccgtcgacgcgggacatgtcccgatcggccagctcttgcaggtactgcctcggcaatagcatagcctcgtcatggccaaggaatatactgccaggccaccctccccgcgcggtgaaccaaacaagctcgtcaagtgtagtctccaccgcgcaatgcggcgcttcgccgtcgagcaaccgggcaagagatacttcgccactcgattctcctgattcgaacaaggtcatcggccgcatgcgtagacgtgcgattctacctgttccgctgtgcactgttttcttctccggaggaaccgacgagccagtgagtaggtatgcgcccctctcgtgcccgcgatccaccgcgaaccgaaccgcatcccaaatgccaggaacctcctgccactcgtcaatagcatgaggcttctcgccctccagaacccgatatgcatcgagctcggcaagctggcgattttgaaaaccgccttgaggatccgcaacgtaaaacacgctttcggcatgattgagcacagtccaagtcttcccgcaccatttcgggccctctacgcacacggcaccgaaagccttcagataacgcgcaacgacatcatctacgactcgatgcttgtaacccttctcggtaagcacggcaaacatcctcttccgttttgctctttactatttatctcgttttgagtttaccattttacgcctttgtagtttaccatttttcgcattaaacaccggagagttggcggggaagctatgagcaggaagcccgagcggcttgtcggaaagcgcatgcgcgctggacggaacgcacagcgcgtcgcccacgcgctccacatccttcggcgcacgacgtggggctgtcccatacgcttgcctagcttcacgaaagcaaggaaactggaactgaccgaaggtccgtctctacaggagggttgcgcaggcggtccgctcgccttccagcagctcttcaagcaggtgctcggcggcctcttcgtcggcggcctgcacgaggcgctggacccggccgtcggtggcctgctgccagaagcggtagcgtgccgcctcgtcgggcagggcggcgatggcgcgcgggcgccaggcggccagcaggtcgaggtaggcctcgaagcccccggggatgcgctcctccagctccttgcgcagccggcgcgccgtgagcgggctcgcgccctcggtggacacggcgatggacagcttgccccggcgcagcaccgaggggaggaagaacgtgcagagctccggccggtcggccacgttcaccatgagatgggcctccgacgcgtcgcggtaggcacgcgcgttcacgtcctcgtcatcggtggccacgaacacgatgtcggcgccgcgcaggtcgtcggcatcgtaggccttggcgcgccaggcgcaccggcccgcgtcgacgagcgcgcggagggcgtccgtgacctcgggcgctacgacggtgacggctgcctcggcggccagcagcccctcgaccttccgggtggcgacggcgcccccgcccacgacgagcgcggcgcggtcctgcaggacgagcgagacgggatacgttggcatggcgcccctttccccaaggcgtgatcgggcttggcgcccgcgcctgccattgtagcgcacacggtggcggacggctgccgaagcgcggggcaaaaagcattaaaaatgatggttgaacaggtattaaaggtggtcatcgcgtttcgtaatgccttgatgaaaaccttttattttacaggtggcgagcaggatgatttactggtagctgcgtggggaagggcaacgggttcggcccggtacgccttccttggcacgcgccctatcgaggaggaggctcgtatgcaaaaaggtgctgcagatcctgccatcaagcaaaaagttctcgattaccttgacacggtggagaaggcgaagagcaaggagatagccaaggcgatctccgaggagaagtccgccgtcgacctggccgtcaaagagcttgcgttcgaggacaaggtcgaatacctctacatcaccaccacgttcgtcgccctgaagggcaaagtcgcccctcccgaataagacgtgctcatgggcacggtctacggggagatcgacgcgaggagaagttctctcttcaaggcttggagggcgtgtttcgacggcgggtccgaatccgccttccctgttgcggcggggaaggcgggccggttttccaatcccgccgcctatcttgccgacgagtgcgcaagcgacgtgctcgcctggttggcagacgcgggggaagaggcggatattcccgcctcggtggccgactggtgccgcctgcgagccgtccaggagacggatcaggcgcatgcgttgcgccctcttctcgatctgaagcaggttgtacgcgacgctgtgggcgtcgcagccggcgacgaagagctcgcctcggtggacgagcgcatcgacgccttggggcgctacgcgtccgaccggtacgtcgaatctcgggagaagctgaaccagatcaggttggacgagatgcagagaggtgagggtctcatgaacagaaggctggcccgtgaacgggcccggcgcgagggggacgcggtatgaggatcgtcggccccctgatcttgacgttggccctcgccgccgtggcctgggtgggcacgcagtacgcgggcctctacgccgtgttcggcatcgtcattccctatctcgccctggcgagcttcgtgggcgggtttgtgttccgcctcgtgaagtggggtaagtcggccgtgccgttccgtatccccaccacctgcggccagcagaagtcgctgccgtgggtcaagcagaacaagatagagaacccctcgtccttcgcgggcgtcgtgggccgcatgctgctcgaggtgctggtgttccggtcgctgttccgcaacacgaagaccgagaagcagggcgaggccctcggcgtgggctcggcgaagtggctgtggctcggcgcgctcgtgttccactggtccatgctgatcatcgtgctgcgccacctgcgcttcttcctggagccggtgccgggggccatcgtggccctcgaaggcgccgacgcgttcttccagatcgggctgccggcactctacctcaccgaccttttgatcgtgagcgcgctcacgttcctgttcatccggcgcgtcgtgatcccgcgcgtgcgctacctgtcgctgccgaacgacttcttccctctgttcctgctgctgggcgtggtcatagccggcatcgcgatgcgctacttcttccgcgttgacatcgagggcgtcaaggaagtggccatggggctggtgacgctgcatccggtggtgatagccggcatcggctccatattctacgtgcaccttttcctggcgagcgtgctcatcgggtacttcccgtggagcaagctcatgcacgccggcggcatcgtgctgtcgcccacgcgcaaccaggccaacgacagccgcgcggtgcgccacgtgaacccgtggaaccccgacctgcccgtgcacacgtacgccgaatacgaagacgagttcaaggacaagctggtcaaggccgggttgccgctggatgcggagtgagggcgatggcgaaactaccgaaacaagacgagcttctggacttctccttcgacgtgcccaagacgggctggatgcacacgcccaccgagttcaaggagggcatgtactgctacggcacgaagccgaagaacctcgaggtcgtgggcatgccgaacggccacgactggtcgccggccgacgaggactggcatttgccggagggctggaaggacatcgtcctcaacggcatggaagacctcatgaagaagtaccgctcgttcaagctgtacatggacgtgtgcgtgcgctgcggtgcctgcgccgacaagtgccacttctaccagggcacgggcgaccccaagaacatgccggtggtgcgcgcggagctgctgcgctcggtgtaccgccgctacttcaccacgtccggcaagctgctcggcgagctggtgggcgcgcgcgacctcaccgaggacgtcatcaaggaatggcactactacttctaccagtgcacggagtgccgccgctgctcggtgttctgcccctacggcatagaccaggccgagatcaccctcatgggccgcgagctgctgaacctgctgggcctgaacacggaatggatagccgggccggttgccaactgctacatgaagggcaaccacgtgggcctcgagccccagaccatcatgagcaacatcgagttcctcatggaggacctgcaggacatcaccggcaagaccatcaacccgtcgttcaaccgcaagggcgccgagatcctgttcgtggtgccgtcgggcgacttgtacgccgagcccggcacgtacacgttcatgggctacatgctgctgttcgagcagctggggctggactacacgctgtccacgtacgcatcggagggcggcaacttcggcttcttcacggccaacgacatggccaagcgcctgaacgcgaagatgtacgccgaggcgaagcgcctgggcgtgaagtggatactgggcggcgagtgcggccacatgtggcgcctggtgaaccagtacatggacacgtggaacggcccggcggacttcctgaaggttcccgtgtcgcccatcaccggcacgcggttcgagaacgcggcctccacgaagatggtgcacatcaccgagttcacggccgacctgctgtaccacgacaagatcaaggtggacccgagccgcaacgaccatctggtggtcacgtaccacgactcgtgcaacacctcgcgcgccatgggccttttggaggagccgcgctacatcatcaacaaggtgtgcaaccacttccacgagatgcccgaggagaccatccgcgagaagacgctgtgctgcggcagcgggtcgggcctgaacgcgggcgagaacatggagctgcgcatgcgcggcggcttcccccgcgcgaacgccgtgcgccacgtgcgcgacaagtacggcgtgaacacgctggcgaacatctgcgcgctcgaccgtgcgtcgttcccggccctcatggactactgggtgcccgggacgaaggtcatgggcgtgcacgagctggtgggcaacgcgctcgtgctggacggcgagggcgagcgcacgctcgacctgcgcctggaggagctgccgaagaagcccgcgccggcgcccgcggagggcgcgggggcggcgcgcgacggggaaggcggggcggaccatgtataagggaggaaggatcatcgccttcgcggcgctgttctgcctggcggtgctgtcgccgttcatcgtgaacctggccaacgccgcgccggcccccgagacgagcctcgacacgcccgccatcaacgcgcagcaggcgaaggagtgcgtggcgtcgacggagtacatgaaggacaaccacatgcagctgctcgaccagtggcgcaacgacgtggtgcgcgacggctcgcgcgagtacgagagcgcgtcggggcaggtgtacgagaagagcttggacggcacgtgcctggaatgccactcgaaccgcgaggagttctgcgattcctgccacgactacgcgtcggtcgatccgtactgctgggactgccacgacggcgaagcgtcataaggcgcgggcggccaaggcgtttcacgggggcgatgagaggagccgggtaccggtcatgaagagacgtgattttctgatagcgggagctgcgctcggcgttgccggcctggggtgcctgggcggctgcagctcgtacaccgggacggcccgagcgtccgcaggcggcgtcgagggccggcattgggggttcgtggtcgacgtggagcggttcaaccgcgaggccgacatgggcaagatccaggcggcgtgccatcatgcccacaacgttcccgacatcggcgatccgaaggaggaggtcaagtggatatggggcgagcctttcgaggccagcttcgccgacatccactccgagcacccctcgcgcgaactggaagaagccaccgtgccggtgctctgcaaccactgcgaggagccgccgtgcgtgcgcgtgtgccccacgaaggccacgttcaagcgagacgacggcatcgtcgagatggactaccaccgctgcatcggctgccggttctgcatggcggcctgcccctacggcgcgcgcagcctgaacttccgcgatccggggccgtacctcgacgaggtcgatccctcctatcccacgcgcacgaagggcgtggtggagaagtgcatgatgtgcgctgaccgcatcgacgcgggcgagctgccgctgtgcgtggaggcgtcgaacggcaccatcctgttcggcgacctgaacgatccggactccgacgtgcgccgtgcgctcgacgagtcgttcgccgtgagaaggcgcacgtcgctcggcaccggcccgagcgtctactacatgatcaagggaggcgaggcgcatgcttgagaaggctttgcgcggctctaagggctactatgcctgggtcggcatcctgctgctgggcatcgtcgcgggcgtggccgcctatgcgaaccagctggcgaacggcctcacgctcaccggcatgagccgcgacgtatcgtggggcctgtacatctcccagttcgtgttcctggtgggcgtggcggcctcgggcgtcatggtggccatcccgtactacctgcaccatttcaagacctacgcgaagatcgtcgtcatcggcgagttcatggcggtggcggccgtgctcacggccgtgctgttcattgtggtggacttgggccagcccatgcgcgtgctgaacgtgatcctgttccccacgccgaactccatcctgttctgggacatgtgcgtgctctcttcgtacctggtggtgaacctggtcatcgggtggacggtgctcggcgccgagaagaagggcttcccgccgccccggtggacgcatgtgctgagcatcatcgccatcccgctggccatcggcatccacacggtcacggcgttcttgatctcgggtttggcggggcgcgagtactggctcacggccatcatggccgcgcgtttcctggcttccgcgttcgccgcagggccggcgctgctcatcgtgctgtgcctggtgctgcgcaagaccgcgcggttcaacgtgagcgacaaggccatcgactcgctcgcgaagacggtgtgctacgccatgatcgccaacgtgttcttcttcatactcgaggtgttcacggccttctacagcaacatgcccgggcacaaggctcccatcgagtacctgttcttcggcttggacggccatgcgcagctcgttcccgtcatgtggctggcggccgtgctggccatcgggggcatcctgcttctgctcgtgcccaagctgcggcgctcccacaaggtgctcgtgccggcgcttgcggcggtgttcttcgcctgcctgatcgacaaggggctgggcctcgtgctgggcggcttcgtgccgaactcgttcgagcaggtggtggagtatatccccaatccgaacgagctcctggtcatcgtgggcgtgtacagcatcggggcgctcgcgctcaccgtgctgtgcaaggtggccgtgggcgtgcgcgccgagaacggcgacctcgccccggtgccggtggcgccgaaaggcgcgggcgcggaggcgggcgacggccgcgcggaaggcggcgtcgcggtgggcggcgccctggaggagccggccgcctcgtagagacgagcatcggccggcggagcagtccgtcggctggtcatagatgatgcacgacgatcaaaggaggatagctatggctgagttggtggttggagatcgcacgctcgcgctcgacgaggacgggttcctcgaggacgccagcctgtgggacgaagaggttgcggagaagctcgccgagaccgaggaagtggtgctgaccgacgagcactgggaggtcatcaactacctgcgcgggtactacgccgagttcggcgtggcccccatggtgcgcaagatgctgagggacaccggcaagtccaacgccgagatctacgagctgttccccagcggccccggcaagggagcctgcaagatcgccggcctgctgaagccgaccggctgcgtgtaggccttcgcgtccgggcgcgttggagggagacgcgcccggacgggggacgtgctatgtcagctatagagacgacaggcccggttgtgccccgggtcatggttgccgcgccccatggcaggagcggcaagacggtcctcacgctggggctgctgcgcgcgctgcgccggcaagggtgcgccgtccagcccttcaagaagggcgccgacttcatcgaccctggctggcatacggtggcagccggcaggacgagccgcaaccttgaccgctacttcatggagcccgaccagatacgtgccgtggtgcgcggggcatcggcgggcgccgacgtgtgcgtggtcgaggccgccatgggcctgtacgacgggctggatgccgagggcagcacgtcgtcggccgagatagcgaagatcacggccacgccggtcgtcctcgtgctggacgtgacgcgcatgacgcggacggcgggcgtcctcgttctgggatgctgcgcgttcgatccggacgtgcgcatagcgggggtcatcttgaaccgggtgcgcggggcgcggcagcgcgcgctggtcacggaggtgatcgagcgcacgtgcggcattcccgtggtgggcgcggttccggccgatgcgcggctcaacgtgcccgaccgccatctgggcctcgtgacgagcggcgagaccgatgagcgggagcgcctgctcgacggcattgccgacgtggtggcggagtgggtggatctggatgccgtgagggccatcgcggcgagcgctggggagctgccggcagcggcgggttccgggcttgtgggcgacgccgcggatgcgccgggcgcgcgggcgaccatcgccgtcgtgcgcgacgaggcgttctcgttctactaccccgagaaccttgccgcgctcgagcgcgcgggcgcgcgcctggtgttcgtgcgcagcctgggagacgaggccttgccgtccgacgtggacgggctgtacgtgggcggcggcttccccgaggagttcgccgagcagctgcaggccaacgaggctttccgccgcagcgtgcgcgagcgcgccgagcacggcctgcccgtgtacgccgaatgcggcggcctcatgtacctgggacgccgcctggtgcatcgcggccggagctacgacatggcgggcgtgctgggcttggacacggtcgtgcaggacaggcagacggcgcacggttacgcccgcgccgtcgtgggcgcgtccggctcctggctcgatcccggcatggtgctcgtggcccacgagcaccatcactcgcaggcgacggacctcgaccccgcactgcggttcgcctatgcggtggagcgcggccgcggcatcgtgcccggcttcgacggcgcgtgcaccggcaacgtggtggccggctatctgcacgtgaacgccctcgcctcgcctgcgtgggcccccagcttcgtgcgggcggccgagcgttaccgcgcgcgacgcagcgcgcggtaaccatctcgaagcggctgcgcggcaagcctccccctgggcgccgcgcatgccgccaccgttccttctccgtgctcggtcgccggatgcgctacaatagcgggcaatcgaaacgaacgagaacgaaggacaccaccatggcaatccaatcccccgaaggcacgcgcgacctgcttcccgacgaggcgaagttctgggcgcgcttcaaggccgtggccgcggacatcttcggccgctacggctacctgcccatcgagacgccgctgttcgagcagacggagctcttcgtgcgcggcatcggcgaggccaccgacgtggtgtcgaaggagatgttcaccgccatctcgggccagaacctgcaaacgctcctggacggcggctccatcaaggcgaagagccgcctgtcgctgcggcccgagggcacggccggcgtcgtgcgcgccgtggtgcagcacgacctggtgccgcagggcgcgcagccggcgaagctcatgtacgcgggcccgatgttccgcgccgagcgcccgcagaagggccgccagcgccagttcaaccaggtgggcatcgagtgcctgggcgccgaggagcccagcgtggacgccgagggcatcatcatgctcatgcgcttctacgccgccatcggcatcccggtggagtccacgcgcctgctcgtgaactccatgggatgcgacgcgtgccgcccggcctaccgcgaggccgtgcgttcctacctggccgagcatgcgggcgagctctgcgaggaatgcaaccgccgcgcggagatcaacccgctgcgcgcgttcgactgcaagaaccccggatgcgctgccgtcatggagggcgcgccgaagatcaccgaccacctgtgcgacgactgccgcgagcactacgaggccgtgaagtcctacctggacggcgcggggctcgcctacgtggaggacccgaagctcgtgcgcgggctcgactactacacgcgcacggtgttcgaggtgcaggtgaccgagggaatgggcagccagaacgccatcggcggcggtgggcgctacgacaagctggcccaggaggtgggcggccgtcccgcgcccggcttcggctgggcgctcggctacgagcgctgcgtgctggcgctcgaggcggcgggcggtgcgttcccgccggccgcgcgctgcgacttcttcgtggcgtgcgtggacgactcggtgcgcgcggaggccttctcgctcgtgcaggcgctgcgcgacgccggtttcgccggcgaggtggatcaccagcatcgcagcctcaagagccagttcaagctggccgacaagctgcatgcctcccatgtggccgtgctcgggcccgacgagctggccgagggcaaggtgaaggtgcgcgacatgcagacgcacgaggaacgcctcgcagaccttgcggaagcgaaggcgctgctagcccgcttgtccgccgagccccagggctgcgagcccccgaatatcgaagacgtgttcggcgcgtaggggccctgcacgccgcgcgtttcggaagccgttctaatcgacgacgttctgcgggtggccgtccacgaaggcccccacgttggcggcgacggttgccagcaggcgctcgcgggcctcatgggtggcccaggcgatgtggggcgtgacgacgatgttctcgtccttcgcctggagcagggggttgtcggggcgcatgggctcgaccgataccacgtcggcgccgaagccggccagcttgcccgagcgcagcgcgtccaccacggcctgctcgtccacgagggagccgcgcgcggtgttcagcaggtaggacccttccttcatcttggcgagcgctgcggcgtccatcaggtgctcggtctcgggcgtggccggcacgtgcagcgaaaccacgtcggccgtggccagcagctcgtccagatccacctgccgcacgccgtcgccttccagctgcggcttgggcgagcggttctcgaacaccacgggcatgccgaaggcgcgggcgatgcggcccaccgcctgcccgatgctgcccatgccgacgatgcccatcgtctttcccgccagctccacgagcggcgtgctccagaacgagaagtccttggcgcgcgtccagccgccgtccatgaccagctgggaatgctcgcccacgtgcaggcacagctccagcaagagcgcgaacgtcatctgcgccacgtcgggcgtggagtaggccggaacgttcgacaccacgatgccgcgtgcgcgcgccgcatcgaggtcgaccacgttgtagccggtggacgtgagcgcgatcatcttgaggcgcggcgcccagccgagcgcctcggcgtcccagaccgtcttgctcgatacgacgatgccggcttcggccacgcgctgtgccagctggtcgcgcggcgtgcggtcgtacacggtgacggtgccgtacgattcgagggcgtcccagctaaggtcgccggggttgttcacgtatccttcgagaaccgcgatgttcatgggcgctccttcccgcaggtgcactgttcggcttgctctgccggcgattgtagcaccgcgtgaacggtgcggccttccgggtgccgaagcgatgcgatgcggtaacgcgggcggctgcccctcggggcgggaggcagggaagcgggtggcctgaaaaggatcggcccggcgagaggggagctcgccgggccacaaggagggggatgtgcggcgttcttggacgccgctactgctttgcaaggggttacaagcagtgcaagttgaaaggaggggagccttttcacttgctgggatcagtatataagttggccttgaagaacatatgggctgcacgtgcgcgttttgtcgattatcgccccgtttgcgttacgctcccgttacctggcgagaggcggagggcggagctggctgccatgccgtatggggccggggaagctcggaaaaggatcggcccggcgagaggggagctcgccgggccacaaggaggggatgatgcggtgcctattgggcaccgactctgcttttaaggggtaaagcagatgcaaactgaaaaggaggggagcctttcgtttgctgccgcctagtataaaagttggccttgaaaaacatatgacggaggagtggccgttttgtgaattagagggcttgaaagtaacaattaggtaaagttgccggctttccgtccttccgtcaggcgccgcctcccgcaggatccgcctcgcccccgtccggcccgccgactggcgcgtcgtccgcgccatcgcagtcgacctcgcacgcgatgcccgccgccacgggtacgaagtcgcccgctcccggcgccacgtcgccgacgccgcgccgcaggtacgcccgcagcgcccgcagcgccgccagctgctcgggtgccagcgcccccgacgcgcggtcggccttgagcccggccgccagcatgcccaggaagcgcgcgctcaccacggccacgatggtggtggccagcaccagctgcacgccggccagctgctcgaccgcccatgctgcgcccgagagcccggcgccctccagggctccggccagcccgcgcgtggccagcagtcccacggccatgggaaaggtcatgcccgcgtagccggggtggaacgcgacaccgaagaacttaggcagcttcgcaaccacgtagaccagcgacacggcctcgcaggcgaacagcagtcccatgaccacgaggttggggtcggggaacacgttcacatacgacacgaggcacatgctgcacggtcccagcatgatagcctgcgagtgcatcatggcctcggccacctcgcagcgcttcatgcgccacagcatgaacggcgtcaccgccacgtagatggcgattccccacaccacgatgcccaccgccagcggttcgggtatgaacggcatgcccgccaccgttgacaccatcaccccgttcgtggtgacgtaccagctgggcatgaacgtcttccattcgaaccgccgcaggaaaaaccgggcgaagaacaccgccacatgcacgcacagcaggcccagcatggcgaagaacactgcctgcgcggccgcccatgcggccgggaacagctgtgcgtagaacacgcacagaaccatgaccagcatgggaaccgtcgggtagagtgcggccagcatggggttggcgtactcggccgccaccacgctgcgcagatggaaggcgatcttcaacgcgtacagcaccacgaccgccgtggcggcggcaacggcgagccagtgcacgatcgggaatccgagcgtgtcgtacacgccgctcagcaccagcaggccgagcgcggccggcacgacggggagcggcagcttcgagaccttgtccttgacgtacatgcttcccccttcgtcggtgcgcccgcccgcggtgcgcggccccatgataaagccgggggcccctccgatcaatcaggtaattcccgccggggcaaaacggtccgtaggaaaggatcggcccggcgagaggggagctcgccgggccacaaggaggggatgatgcgatgctcttgggcatcgctactgctttgtaaggggtacaagcagtgcaaactaaaaggaggggagcctttcgcttgcagggcccattatagacgcaggggttgaaaaacctatggtgcaggcgtgttcgtcttgtgcaacggccgtgcacggtcggtgaattgcaggctgggtccgcacggctgccgctcgcggacgctcggcaaccgctcgcgtgcaaggcacctggccggccgccgtgcggccgtttcggctccttctgtcgaaggaacgggttttcccgacgcccgctgcgcgtgccgcgacgtttgggtatcatagtggaatcgaagaaaggagcctccatgcccgatatcgcgctgcgcttccacaaggacatgctcgtgctgtccgcccccctcgccgccgtgctcgcccgccagggtgtcgacgtggcacgcgacctggagtacctgaacctcatcgagccggaggccgtgcgcgacgcgctgcgcttggagtccatcgccggcgcccagtgcctcgttgccggcacggagggcatcgcgcccgcccgcctggcccaccacggcatggaagaccgcttgggcgacctcgcccgcgcggcgctcggcatcgtgggctcgctcaagccccagcacgtgctggcggaggtggggccgtgcgggctgccgctcgacggctcaagcgcggcatcgctcaacgagaaccgcagccagtacgcccgcgccgcacgcgcgttcgagggcgctgcgctcgacgcgttcctgttgggagggttcgcgaaccccgtcgacctcaagtgcgcgctcatgggcttgcggcaggcgagcgacctgcccgtgttcgcggccatcgacgtggacggcgacggcctcgttgccgacggccgcatggcggtcgaggaggccgtggccctgatgggcgagttcggcgcctccgtggcgggcatcaccaccggcgcgcccgccgatcgggccgcggagctcgtcgagcgtgcctgcgcctcgaccgacctgccggtgctcgtgcagctgcgcgtggccgaccatgcgccgcggcagggggcctccacgcccgagaacccctactactgccccgacgtcatggtcgacgccgccgcgcgcctgcgggcggcgggcgcccagttcctgcgcgccgtgggcgatgccacgccggcctacaccggcgcgctggccgcggccacggacggcttcgacgtcgtggcgccccgcggcgccgatccagccgaggacgaggacgatctggcgactctgctgtctgccgtgcgggggaggtagcgcatggcctccggctccaacatcgagcgcagcccgcactacggcgccctgcaggacctggtggacggcctgttcgccagcgcttcggccgacgacgccgtgcgccgcctcgacgcggtgatagccgccgaggccgccgacctccccgacgacctcatggaggtggtcaggctgctccccccggggtcctacacccgccagcgcctctgcgaccagatcaactcgtctataggcggacacgcctggggccaggtctacggcacggtggagtaggcccctctcgccatcggttcagatcgggcgttgaggggcctgcgcttgggaagcccctcgcgcaccaagcccctccgatcaagagcgccctgcatttctgaagttcctgtgatgcccttcgtgattcacgaatggaagtcaatttgtaacatataccccccttgttttccttctcgctcgcaggtactatatgtccacgctagatcgataatcccccacaacatattgtggaaaaatgacttaaagacagtggaaactcggggcataaccgcggtaaaaccactgttcgcaaaaggaaaacggcagagaggaacggcacgcatggtcaccaccatcatcaagcgcgacgggcgcacggcggaattcaacgagggcaagatcgccgaggcggtggaacgcgcgttccaggcatgcggcgccatgcaggaccgcacggctgccgaggacatcgcgcgcaaggtggtggagaagctggagagcggcgccatcgagggcgtgcccacggtggagggcgtgcaggacctggtagaggagacgcttatcgagtccggcttcgtgcagacggccaagtcctacatcctctaccgcgccgagcgcagccgtgcccgcgacgtgaacagccgactcatccagacgctcaaggacattaccttctccaaggccagcgactcggacatgaagcgcgagaacgccaacatcgacgccgacaccgccatgggcaccatgctcaagtacggttccgagtcggccaagcagttctacgagatgtgcgtcatcgatccgaagttcgcgcgcgcccaccgcgagggcgacatccatatccacgacatggacttctacacgctcaccaccacgtgctgccagatcgagctgaagaagctcttcaagggcggcttctccacggggcacggcgtgctgcgcgagccgaacgacatcacgagctacgcggcgctcgcgtgcatcgccatccagtccaaccagaacgaccagcacggcgggcaggccatctgcgacttcgactacggtttggccgagggcgtgaagaagacgtaccgccgcctgtacaagaagcacctggccgaggcggtcgacctgctggtcgacggcgtggtggacgatgcgcgcgcattcgcgcaggacgtgcttgcggccgtcgaggagcagacgggcctctgggccagcctcaagatggacgagggcttcgaggttgcggtgcgcgaggcgctcgtcacagccggcgtgggcgagtcgcttgcggacaaggcgctcgcctacacggcgaagaacgcgcacgccgacaccgaccgcgccacgttccaggccatggaagcgctcgtgcacaacctgaacaccatgcactcccgcgccggcgcgcagacgccgttcagctcggtgaactacggcatggacacgtcccccgaggggcgcatggtggtgaagaacatgctgctggccaccgaggggggcctcggctccggcgagacgcccatcttccccgtgcagatcttccgcgtgaaggagggcgtgaactacaaccccgaggacccgaactacgacctgttcaagctggccatgcattgctcggcaaagcgcctgttccccaacttcagcttcctggacgcgccgttcaacatccagtactaccagggtacgccggagaccgagatcgcctacatgggctgccgcacgcgcgtcatgggcaacgtgtacgatcccgaccgcgaggtcacgcccgggcggggcaacctgtcgttcacgtccatcaacctgccgcgcctggccatccgcagcaagggcgaccttgacctgttcttcgacctgctggacgcgaagctggcgctcacggtggggcagctcgacgagcgcttcgagatacaggcgcgcaagaaggtgtacaacgcgccgttcctcatgggccagggcgtgtggatcgactccgagaagctggctcccggcgacgagcagcgcgaggtgctgaagcacggcacgctttccgtgggcttcatcggcttggcggaggcgctcgtggcgctcaccggccagcaccacggccagtcgcaggcgtcgcagaacctggggcttgagatcatcgggcacatgcgcggctacctggaccgcctgtcggccgagcgcaagatgaactacggcctgatcgccacgcccgccgagggcctgtccggccgcttcgtgcgcatggaccgcgcgcgctacggctccatcgagggcgtcaccgaccgcgactactacacgaacggcttccacgtgccggtgtactacgacatcagcgcgttcgacaagatagagatcgaggcgccgtaccacgcgctcacgaacgcgggccatatctcctacgtggagctcgacggcgacccgtccgagaacctcgaagcgttcgaggccgtcatccgccacatgaaggacagcggcatcggctacggctcggtgaaccatcctgtcgatcgtgacccggtgtgcggctacaacggcatcatcggcgacgtgtgccccaagtgcggccgcacggaggaagagcacggcatggccttcgagcgcatccgccgcatcaccggctacctggtgggcaccctcgaccgcttcaacgacgccaagcgcgccgaagaggccgatcgggtcaagcaccagatgtaggtggctccggcggcctgccggctgccggaactactcgacgctgcggccgcccgtggtgcccgatcttgcggcgatggcggaggctcgcgtaccgaagcacgcttcgcctctgccatccctacgatctcgggcaccacggccggcctcgctgacttactacgccaacctgttcgattattatgcgcccctcgggtgcatgcgaggctgcttatgactgctcccaacgctatacgtctcttcggcacggccccggactccatcgtcgacgggccggggctgcgcttcgccgtgttcgtgcaggggtgcacgcacggctgtcccggctgccataatcccgagagccagccgtgcgcgggcggagaggagcgcgacatcgacggtcttgtggccgagatcgcggccaacaagctggcgcagggcgtgaccatctcgggcggggagccttttgagcaagcggctgcctgcgccgagctggcgcgccgctgccatgcgctcggcctgaacgtgtggacgtatacgggctacacctacgagcagctggccgcgggcgtgcccgacccggcggcgcgcgacctgctcgagcagaccgacgtgctggtggacggcccgttcgtgcaggcgaagcattccttcgacctcaaatggcgcggttcctccaaccagcggctcgtggacgtgcccgccacgcggcgagagggccgcatcgtgctctgggagccgcgcgaggtcgagccgccgaagcccccttcctggtaagcttcgcgcccttccctattccccttgcacaaaaggacgatcatgtgatactatcctttcaatcatttgattgaaaggataggctatgagcgacgatatcactccttccgagatcaagcgcatccgcaagaagtacggcttgacgcagcaggcgttcgcccggcttctcggaatcggcgaggccagcatggtgcgctacgagaacggtcagcctcccagcaaggcgaacgctaaccttatccgcgccgccgcacacaccgctttcatgcgcgaatgcctggagcgcgacggcgagtccatcccgcccgcgcagcgcgagagcgcggagaaggtcatatacgcgatggtcacattcgacgacaagggggagatcatggatatcaacgagatgtacatgctcacgctcgagcaggagatcctcaacgagaaggccgccgagatcctggcggaggtgtcgcggcttcgccgcgaggcggagaagcggggcgacgaagagggcatgctggtctatgacgatgtcatttcgctgatcgccgagaggaaggggcagatcatcagggaagtggacgggagcgagaaaaagctcgcggagatacgcggggccatcgacgggctcgcgcgcttcgcgcgtttccatgcggcgaaggccgcatgatgaaagccgatccgggcgctttcagcgaggaagagtttgccggcgagtttcagtcgatagctaagcacctcgtgctcgaatcgcgttgcgcgccgtctgcacatccccgggcggttctgctcggggggcagagcggagcggggaagacagcgctccacgagctttgcgtcaagggtttcaaggatgggagcatcgtcatcaacggcgacgagtaccgctcacaccatccacgcttcgccgagctggacgcccagtacgggcccgaggcggtggctcataccgccgcatgggcgggacagatggtagaggcgctggtcaaagctctgtcatccgcccgctgcaacctcgtcgtcgaaggaacgctgcgcacctcgcaggtgccgctggacacggctgcgctgctacggggcaaaggctatcgcgtgtcgttggcgctcatggccgtcaagcccgagatatcgctcgtcagctgccagatccgctacgagctcatgcgcatggccggcacgacgccgcgtgcgaccgatcccgcccaccataacaagatcgttgcagacatcgtccagaacgtgggcgtcttggaaagctcgggcctgttcgacgagatccggctctactcgcgcgaaagagagttgctgtacccgcttgagggggacacgcgccgcgccaccgacgtgctcgaggcggtgctcttcggcccgtggactcctacggaacgggagcactacgagttcctggaggcaaagctcgcctcgctgcagggaggggcgtccctcccgtcggagcggccttagagccgcgggaccggccggaggtgcacgaggctggccgcaggggacgccgaggtcgccccgagccgcccagaggtcgcccggagctgcgccgggggtcgccggtgagccacaccgaggtttccgggggtcgcccttgtgtagtcccgtacttggtaacatgcccgttaggttcgtttcgcggcattccgtggtaggataaaaacatggaacaactcgaacactatatacagggcatcgtgcacgtcgattggctgaccacggccttggcggctgccgtcatcctcgcggtcacggccatcttcgcgcgccttaccgttcgcttcatgcgcaagatgctgcactacaacgaggagaagaaccttccctccagctccatcttcgtcaacatcgcccgcggcgccgtatggctgctgggcgtgtgcatcatgctgtccacctgctacggcgtggacgtgagcgccgccatcaccgcgctcgggatcggcggcatcgccatctcgctcggcttccaggacaccatcgccaacctcatcggcggcttgcaggtcagcctgctgcgcatcatcaagcccggcgacaacatcgaggtgggctcgtcgtccggcgtggtgaaggacatcacctggcgccacaccaccatcaggaacagcaagggggaggaagtcgtcatccccaactccatcatcaacaagacggcgctcacgcacctgccgcccacgaaccaggtgagcctgcccatcgtggtggtcacacccggcgagcacctgaacgacgtggcggcggccatcgagcacgaggcatccgaggcggcggggtcggtggcgaagctgacgaaggagccgaagctgtccttctcggccatcaccgacggcggctatgtggggtccatcacgttcaaggtggccgacagccgcacgagcgcccgggcgggcgatgccgtgctgcgggccgtggcgccgctcacgcgcgccggagcgcccgaggcggccggcaaggttctcgaggaggctcggcaggaggccgaggaagcatcggaggaggctgccgagaagcccaagtccaagcccgcggtaaaggcgagcagcaggcaggcctctcctacgagcctacgcaagcgcatggcgcgcatgttccgaacgagcaaagggggtcgatcatgaacgagaaacgccttgagggcccgggtccgctgcatcgcgaggacggcgcgctctccgcatgcgggtgggccacccagctggagctcgcctacgaccgcacgcgcatcaaagcgcccgggtggcgcatcaaggagtgggactactacttggtgaacgacggcgcctatgccgtggcgctcacgctgggcgacctgggttacctcggccttgtctcggcgtcggtcatcgacttcgcgcaggcggcctacaagaccacgagcgtcatcacgccctttccgctcggacgcttccgccttccttccacctcgcgggaaggcgtctcgtccttcgagaacgggcgcgtgtccttccgcttcgaggcagggaacggcgagcgccggctgcacgcccgttttgcgcagttcgacggcgacgacgacctcgtgttcgacgccgtgctctccgacgagcccgaggaaaccatggtcattgccacgccgtgggccgaggatccgctcgccttctactacaatcagaagatcgtggccatgcgcgcccgtggcagcttcaagaagggcctgctggtacacgggttcgcacccgacgactcgttcggcttgctagattggggccgcggcgtgtggacgcgcgacaacacgtggttctggggcgtggcgcaaggctggcaggacgggcggggcggagcccggccgggctcgcactgcttcggcctgaacctgggctacggtttcggcgacacgtcggccgcctcggagaacatggcgttcgtggacggcgtgtgccacaagctgcaccgcgtggacttcggcgtgcccgagaagcccgccgcggccaacgcccgcaaggtcgccgaccgctacgacctgctggccccttggcacgtcaccgacgacgagggccgcctcgatgtgacgttcactccgctgctcgaccgtgcggactgcatcaacgccctggtcgtgcgcaccgaccagcaccaggtgttcggcacgttcgacggcacggtggtgctcgacgacggcacgcccttccgcatcgccggcctgcagggatcagccgaggtcgtgcacaacgtgtactagggtgtgacagggggacgacggggataacgtcacgttcttgggcgctttgcggccttgcgtctcattggggaacgtgacattatccccgtccccctgtcacacccttgtcacacggagcggcccgccgatcggcgggccgcttttcacgttccaggcaggctgcttgtggaggccggcttcctacagcccctcggtttcgaagcgcttcttcagcgcctcctggtggatgctgtactgcagcgccatctccttggccacgcgcccgctcttcaccaggtcgaacaggctctggtccatcgtgcgcatgccctctgctccgcccgcggctatcacgctgtctatctggtgcgtcttctcctcgcggatgaggttgcggatggccgtgttcgtgaccatgatctcgaaggcgggcaccacctcgccgtccaccgtgggcacgagctgctgcgacacgatggcgtccagcaccatggacaactgcatacgtatctggcgctgctgcgaggcggggaaggcgtcgatgatacggtccaccgtgccggccgcgcccgtggtgtgcagcgtgctgaacagcagctgcgccatctccgcggcggtgacggccgtgccgatggtctcgtagtcgcgcatctcgcccaagaggatgacgtccgggctctcgcgcatggccgagcgcagcgcctcgccgtaggtggcgatgtcggtgggcacctcgcgctgcgtcacgatgcagctgccgtgcttgtggacgtactcgatggggtcctccatggtgatgatgtgcccgctgcgctcgtggttcagcttgtcgatgatgcaggccagcgtcgtggacttgcccgcgcccgccggtcccgtgaccagcacgaggcccttctgcaggcgggccaggcgcagcacctcgtcggggatgtggaagtcggccgggttcggcaggccgaacgggatgacgcggatgacggcgccgaacgacccgcgctggcggaacacgttcgagcggaagcgccccacgcccgcgatggcgaacgagaagtcgtcgtcgtggttgccgttgtccacgaagctcttcatgctgcggccgctcacctcgtagatggcgcgcacgaacgtctcggtgtcgtcgggcatgagcggcgccgagtccaggcggatctgcctcccgctcacctcgtaagacagcggcaggcctgcaatgatgaagatgtcggacgccttcgcatccaccatctcccgcagcagctcttcaagtttcatctcatcgctcctatcgtgtctgcgcagcgcccgaccacagcgtctcgcctgcgccgctctccgtccacagcgtcgtagccttccacgacgccacgctgtaggtggcgtccgcgtgtatctgcagcacgacggcgagcgcacgcccgctgtcggcagtgaattccgccttgaccgtcgatccgtccagctcggcatccgccggcagcgccgcgcgaacggcggccagcgcctcggccagcccgccgcccgccgcccgtaccggtgccagcgcggcgtcgatgtcggctgcgaactcctggcccgcccgctcgttggcgtacgtgtcggcggtgaaggacgcctgccgctcggcggcggcgtacgtggcctgcgccgtcgtcaccgagagcacggccatgacggccaggcacaggatgatgacgagggcgaacaggctgatgggccctatgcgcaccgatccgcgtccccgcgtggtcatgcgacatcgcccccttccgctgctgccgcatccggcgcgcggccgatgtccgtgcccgcggtgccgtcgctcacgtagcgagacgtctccagctcgtagactgcctcgccgccgcaggataccgtgatgttcgcgcggtacagcgtaccgccctccgtgcgctcgggcacgacctcgcgcgacacgacataggcgtcctccgcatcggctcccgtgcccgtctccgagcccagcgtgccgccgtcgccgtcgaaagcctcgctcgacgtgcccgcgagcggcgcggccgcgaactcctccgccgcgttcgatgccagcagcacggcctgcgtcagcttgcgctcctccacgccgcggttgtgcgccgcgccgaacagctgcatgaacaccgccagcgcgaacgccagaaacaccaaaagcaccagcgcctccactacgaacgcggtgccgtgccaggtagtatcggagccgcggcgggcggcgagcagcgagtcggccggtttccttgccatgctaggcacctcccctcacgctgcgcagcgccacctgcacgctgccgtcgtccgtgtccacggtgagcagcccgtcctcgtaggagaacgcgaagcgctgcgaggcgacgatgggggtggccttctccggcgtgtacgccgcgtcggccagtgcgtactcttccacgatggaaccctggtaggcgtagatgcgcgtctcgaacgtgccgctgtccagccgctcggtcagcacgagcgagcggccctcggggcccttgcccgcgccgacggcgtccacggagtcggccgcgcgcacgctgttggcgatgagacccgtagccaggcgcgacgcgtcggcctgctcgcgcacgtccaccaaggcgcggtagagccctgtgccggccatgatggcaatgagcagcgccacgatgaacagcgcgaacagcagcaccgtgaacagccgcccgaagttctggccgccttcggcccgctggaccacgcccctgctggtcaaagcctccataaccgcatcctcgtcccgcccggaagggcgctcgcccctcatcgcggaaccaccacgacgctcggcatgatgttctcggcgaacacctcgtaggttatcacgtagtcaccgcggttcacacgcaggccgtagctctgctccaggtgctcgagcgaggaggggtaggaaccctcgatggcgcagcactgcttcgcgctgtccaggatggcgttgcgcacggacacggcaccctgctcgcgcaggttctgaccgacggcccccgccgcgaaccagccgcccacggccagcgccagcacgagcgcaagggcggcgagcctcatgccccgccggcgcctccgctgctttgtcgaacgctcgtggtacatcgccgcgccctagccgatcgatcccatgatgccgatgagcggcagcatgaccgaaacgagcgtggcgcccacggccacggtcaggaaggcggcgagcgcgggctccacgccgtccaccaggcggtccatcttcatgatggcatcgtcgaagaatgtgagcgacaggcggcccagcacgtcctccacgctgccggagcgtgcgccgatggtgagcatgcgggcgtacacgggctcgaaaacgccgctgtcggacaccgcctgcgccaggctcttcggcgcggacaggtcgagcatcgcctcgcgcgccccctcgagctgctgtctgagcgtgcggtggtcgaccatggacacggcctccttcatggccgtgtcggtgtcgatgcccgaggccacgtacgtggccagcgccgacgtgaagcggctcaaggccagctggtacatggtgttgcgcgtgaagggcatgcgctcggcgacgcgcatgatgctgcggcgcccgccctcgctgcgcatggccaccgccatggccagcacgataaccgtgcacacgagcgtcacggccagcgccgcccacccgatgccgatggaggcgcccacggcgttgaacgacccggccgccaggttgcccgacaggctctcgtacacgttcacgaacacgggcaggatgacggccacggtgaaggccaggatgacggacatgacgcacagcagggcggcggggtagacgatgctcgagcgcatcttcgcgaacagccgcccctcctcgtcgtagtacacggccagggtgcgcagcgtgggctccaagcggcccgacacctcgcccacgcccaccatgtccacgacgtggcgcgggaagaagcccgatccgtcgagggccctcgccagcggctcgccggcgataagccgaaggtacacggcgtcgcacgcgcgcttgaaggcgccgtcctccatgttctcgcccagcaggcccacggcttcgtcggtctggatgccggcggccagcatgatggcgacgctctcgcagaacgcgcttacggcgctgctctcaagcacggtagtggccataatctcattcgctccttgtccgactttgcgcttcgggcccttgcggtatcgtgctcggcccgcactcagtacgtgtaccggtcagtgtattccttcgcgtcccccacgtacttccccgacccgccggcggcggcaaacgtcaagtcgatgcgcgtccacgtgtcggggtcgacgctcacctcgacgctcctccagcttccatcaagatataccaaattccatgcatggtaaatattatcaggggaaacgtagccggtgacgatcttcgtgggaattccaaggcttcgcagcatggcggctcccaggctcacgtagtcgaagcagatgccctttccctcggccaacgtggcgtcggggtcgggcacgtagcccgtggcgtcggccagtcgctcggccttctcggtgtcgtagctgatgttctcggcgatccaggtgtagatgctgcgcagcacgtcgccctcgttccgggcgccggctgcaagctcgctcgccttcgtcacgcaggcgctgtccgcgtcgtagtcgcagaacacgttcggacgcaggaagggctcgaactcgctcgcgagcaccgcgtctacggtggttccgttgatggacacgtagcggtcgccctcggtgttctgcatgacctgcacgtcgtaggtgccgtcgcccatggtgaacggcacggaaatgggcgtgccgtcgccgggcaggtcgtagttgcgcttcacgccgtccttggtgaccagcagcttcaggcggctcgcgttctgcgccgaggccgccacgtagccgagcgaggcatgcgagacgtctatcatgctgtcgtggccgaccacggaggcgtcggcgtcgaagggggaggttgccagcgccgggcgctcgaaggcggggccgctcgtcgcgccctcgctgtcgccggcgcccacggtgccgcccccgccgcccggggtggcaccactgtcggagtcgccgcatcccgcaagcggagccaatgcaacggccagcagaaacgcgagcgcggtcgcagaggcgcggcgcaacgccgtcgtctggcggggcttgcatgcgccgggacgtttcacggaccaatccttcgtgttcaggttcggcagggcgcagcgcgacgggcggagccctggagtcgtgtccattatagcgtgtccgaaaccgggtcctctgcgcgttccgcacgtccataatcgtcccggcgccgtctcgggaagaggcgagggaggggaagcgagtggtcgtttatcgcctgcgaacggtattcaacaggggggtcaacggtaaattgagactcactatgagggtggagaggcgagctttgccgccctgatctccataattgcgtgttttcgagcagcaattatggaaacggtatttggaaggagtggtcggggcacctccggcattcgatatgtgatcgcatttgtggtaaaatctcatacggattttgccgtgctttttcgcggggcataatctaccgcgtcaagaatgcacatggcatgtcagaaaacgtataggcgaatctaacgcacgcggtgccccttgagaagcggggcccctgaagaggtacctgaggattcggtgatacgtatgagcatgctggaaaaactaagcgacgcgaagaacacgttcgagggcaaggcgctggccgtcttcatgtccctggtgatggtgctctccttcatcaacttctcttccttcgccgatgcggccgagaacggcacgtcgcccgacgcccccgaggcgcaggcggacgatccgtcgagcgagcccgccgaaaccccggctcccgaatccgcaccttcagccgagcccgaggccgccgccccggcggagatcccggaggcttccgagccgcccgcgcagagcgaagcgaccgtcccgcccgcgtccgagcccgaacccgacctccccaccgccgagcccggcgtggccgtggtgggcgtagagctcgaccatgcgtacctcgttgttgccgaccaggagatagcactgccgctgacttctttcaaaacatcgctcaacaaagatctcgtgttcgaggtcaagcctgacggcggctaccagatcgacaaagttgtggcgaagagcaaagccgacgggaccgagaggccgctggagcctcaagcagatggatcttaccggctcgctgcctcggaagtgagcagcaacctcgttataaagccggtggtggcgcttgctcccgagctggatggcgcggtcgacgacgctgacgggccgtctgcgaaacctgccgagggcgaattggccgacggcagcgattcgggtctcgaagcaccgaagtccgaagcggacggcaatgccgcaacaccgtttggtcttgacaacactctcggagttgaagccatcggcgttcctaccgagcttaccgtagatccagcgacgctcaagctcaatgtcggcgcttcaagcaagctcaaggccattgtcgagccggtcggatccaatggcaaagttgtctggacttcgagcgatccaagcgtggcgaaggttaccgatgacggcacggtgaaggccttgtcgggcggcacaaccaccatcacggcgcgttcggttgccaacccggctcttgcaaacgtatccgtggttaccgtaacagagtcgcgtactgtgaagttcaagaccaacacgggcgagggcgagataaagagcctcgccacaacgtcagaggtcggttcaaccataatcatgcccgagctccccgatggggctgttaataattggcctgcgaacagggttttcgtgggatggagcgttgatcagcgtgcggttacctcggacggcaaggaccactacactaatcctgtcttcgctcccggatcgtcctatgtcgtgccctccggaaaaggcaatatcgaactttacgcgatctactcggcgcaaaatatcggtgcggatttttacttgcgtatcgacggacaattcccggcagagccgcagggacacagcaattctgggtacgtcaagattggctgggttgaaaatgctatcaaggtcggcaagttcgtcaccgacaccactggcgcgatggtgagcgccaaccttgctgcaacgccgaatgacgcgatgattcagaaggcgtgtgcgggcaatccgaaactgagcttcgatccggagacgcagaccgtcatctggtatgttatcaaaaacgaggagacgtggcatgtcgacggtgctatccgcgacaaagcgtcagtagtgctggcctacagtcccaatattcctgctggagagactttgagcggcaccttccccaatacaaaggcctatgccgcaggcgcttcggtaaaggttgaaagcggaaaagccgactggcgcgccggctacacgttcaaggagtggaatacagaacccgatggatccggtacctcctaccagggtggttactccatcaccctgaacgaatcgaagacgctctatgccatttggtcgccgaaggacggtacgaactaccgtatccaagactatctgcaaaacgccgacggatcgtggcccgacgagccatcgcatgccacatcggccagtgggaaaacgggcgctacggtgtacgccgatacgacgaaatcgtacaccggctacacttttgatgccggtaacgacaagaacgtgctgaccggcaaggtggcgggggacggctctctcgtgttgaagaggtactatgctatcaacacctgcaaggtcacgtatcttccgggcgattacggagcgtttgatgctgttacgtacgaggccaagttcggcaccgcaacgccggagttccaaggtgagaaggacgagaacgacaagccgttgggcaagcaaggctacaacttcgccgggtgggcgccgagcgtgaccgaaacggtggaggctgaaacgaccgagtacgtggcccagtggacggagatgccggttatcaacgtcctggtcaaaagcgaggataaggaagtggtgtacaacggtgccgaacatgtggtcgacgttgtttccgagaacctcgtttacgaaggcttgcctgcgggctacaagatccacaacctgagcgcatccggccgcggcaccgaggcgggcgagtacgatatcgccatcgacggcacccctgtcgttcttaacgaaaaagacgaggatgttaccggtcggttcttcatcgcgcgcaacaagaacaagctgacggtcaagaaggccccgctcaccattacggcccccacgaaagagaaggtgtacgacggcaccccgctgacgttcgacctgaacgacattatcacaggcgagggcctggtcaaaggtctggtcgatggccagcaactggtcggcatcgacctgttcggctccatcaccgatgccggtacggtggaatcgtccgttctccaggcggtcattacgagcgggtctgagaacgtgacgcgcaattacaacatcacttgcgagccgggcacgctgaccgtgaaagagttcgagggcgagatcgttgcgactaccgaaggcggcgagtatccctacgacggggattcccatggagcgacggtgagcgttagcagtctgccggaaggctatacgctggtaacagcttcctcgaacgccagcgcgaccgatgtgaccgaagagcccgtggtggcgaaggtcgacacgctgcgcatcatcaacaaggccggcgtcgatgtgacggacaagcttaacatcgtcaagaaggaggagggcacgattgtcgtcaagcctgccaagctgtacgtgaagacgcgtactgcctccaagccctacgacggtaccccgctcacggccgccggtgagatgactggtttggtgaacaacgagaccgccgctttcaccaccactggcacggccaccgaggtcaatgcgcccgaaggcacccctaacacgtacacgatagactggaacggcagcgccaagaagtccaactatacggtcgaggaggatcttggcacgctgacggtgaaagagtttgccggcgagatcgttgcgaaggccgaaggcggcaggtacccctacgacgggaacccccatggggcgacggtgagcgtaagtgctctgccaacaggctacacgctggcagaggcctcgtcgagcgccagcgcgaccgatgtgaccgaagagcccgtggtggcgaaggtcgacacgctgcgcatcatcaacaaggccagcgtcgatgtgaccgacaggctgaatataaagaagatcgacggacagatcgaggttacgccggcgccgctggctgtgaggatcgtgggcaatttcgcccttgaagcctataccggcgaaacgttcacggtcgacggtttcattatcgatacccccatcggggacaaggcgacgatcgctctcaaggagggtgtggccgcccatgccgaaggtgcggatgcgggcacgtaccccatgggcctgacggccgacagcttcaacgtctcgtctcgcaactacgaggtgacgttggaggttgtggacggcttcttgcggatatccccgcttgacacgctcgaggtggcggccgaggacgtcaaggaactgtacgacggcaacctgtacggcatcgaggccgtttcatccgccaaggacggacgtacgtccgtaaagtactacaacgaggccaccgacgcattcgaccttgataagtcgccggtgttcaaggatgccggcacatataccgtgcggttccaggcaaccaacccgaactacagcaacgttgccgaaggctccgcaaccgtcaccatcgagaagcgcacggtgacgctggagagcgcgagcgcctctcggcagtacaacggcgaagcgcttgtagcccccacggtgaaggtgggcggtgacgggttcgttgccggcgaggagcctgcttacgaggtgaccggttccgcgaccaacgtcgccgacacgcgtgacgaaaacaacgagttcgcttatacgttccccgagggcgtgaacgcggacaactacgaagtgaccacgctgttcggcaccctggccatcacgccggcgcctttgctggtaacggtgacgggcaagcatgcatcggttccctacgatgggggcctgcatgaggtcgacggcttcggcgacgatgccgcaggcaaggcgacgatcgctctcaaggagggtgcggccgcccatgccgagggcacggatgcgggcgagtacttcatgggcctcacgcccgacagcttcgacgtctcctcgccgaactacacggtgacgctgaacgtggtcgacggctacctgcgcatcgacccggcgggggagatgtccgtttcggccagcgacgtggctaagacctatgacagcaaccgctacggcgtgaaggccgaggcttcggtggagggcgcgacgatccgctactgcgatccggctacgggcgagtacaccttgaaagaatccccgacgttcctcgattggacggacggcccgcagacggtggagttccaagcgacccatccgaactaccagacggcgtatggaaccgcaaccgttaccatcgacaagcgcacggtggttctgcgctccggcgatgccgagcgggaatacgacggaacggcgctcgtcaagcacgaggcaagcgttgtcgacggggcgttcgtccgcggccaagagcccgaaatcgcctattacggctccgcgacgaacgtcgccgacacgcacgacggcaacaacgggttctcctacgagttccctgaaggcgtgaacgcggacaactaccaagtaaccacgctgttcggcacccttaccatcacgcctgctcccttgctggtaacggtgacgggcgcgttcgacaacgtgacgtttgatgggaagccccatacggtggagggcttcacggtgggcgacgaggccgccggggggaaggcgaccatcgcgttgaaggacggcgagcgggcgtatgccgagggcgtggcggcaggccggtatcccatgaacctgaccgcggagcagttcacggtgcagtccgataactaccgcgtgacgttgaacgtgatcgacggctacctgaacatcgacaaggcgggcacgttgagcgtcgatgcccagccggtcgtcaaaacctacgatgggtcgggctacggtgtggaggccaaggcctcggtcgacggggcccatatcaggtactacaacgcggaaacggatgcgtacgacctgacggaatcgccgaaatacgcggacgcgggaacctataccgtgaaattccaagctgcccttgataactacaacaccgccgagggcgcggcgaccgtgaccatcaacccgcgttccgtcacgctgaccagcgccgatgcggccaaaccgtacgacggtacgccgctggtcgccgaggacgtcatcgtgtccggcggcttcgtgaccggcgagggcgctgcgtattccgacttcgcgtcgctgaccgatgcgggcacgacgtccaataccttcgactaccgcctgaacgagggagcgaaggcatcgaactacaaggtgaggaaaatccccggcacgctcgaggtggagaaggccccgctggccgtccgcatccagggcgctgtgaaatcggtcgcctacaacggcgcgctccaagcggtcgacggctacaaggtgctcgacgacgttgccggcaaggcctcgatcgagcttgccggaaacgccgccgcccatgccgaaggcgtggacgtgggcgagtaccccatgggcctctcccccgaaagcttctcggtgacgtcgcgcaactacgaggtgacgctggaagtggccgacgggaagcttgccataagcccctccggcgccttgacggtttcggccgagcccgtgagtgccatgtacgacgggaagcgccagggcgtcgagccgaccgcatcccttcccggcgcgaagatcagctactggtccgccgagagcggcgactacacgctcgatgcgtgcccgacgtacctcgacgtgaccgacgggccccaggcggtgaaattcaaggcgacgcttccgaaccatcaggacgcctacggcgagaccaccgtggaggtaacggtgcgccctgtctcggtgacgagcgccgatggcgagaaagtctacgatggcaacccgctgacgaacgcgaccgtaaccgtgggcggctttggcttcgtgaacggcgaggagcccgcgttcgccgtaaccggctcgcagaccgatgcgggatctgcgcccaacgccttcgcctatgctttccccgggggcgtgcgcgagggcaactacgcgataaccaagaacgagggaaccttgacggtgcgcaaggcccccttgacggtaaacgtggtgggcaaccacgacacggtgacgttcgacggtaggtcgcaccaggtcgacggttttgccgacgatgctgccggcagggccatcatcaagctcaaagacggcgtgctcgcccacgccgagggcaccgacgcgggaacctacccgatggggctcacggccgacagcttcgacgttgcgtcgaggaactacgacgtgacgctgacggtgacggacggctaccttgccatcaacccggcaggggtcatgacggtggccgccgacaacgtttcgaagaggtacgacggcaagcgggtgggcgtccaggcgacggcctcggtcgaaggcgccgaggtcaggtacttcaacgcggacacgggggcgttcgacctcgaagagtcgccgacgttcctcgacgcgacggagggtgccgccgttgtgcgcttccaggccacgcacccgaactacgcgaccgtcgagggctcggcaaccgtgacgattgacaagcggtcggtggtgctgacgtcggacgatgcgagcaagacgtacgacggcgaagcgctttctgcagagcgcgtgacagtgtccggcgagggcttcgccgacggcgagggagccgtctataccgatttcgcgagcatcgtcgatgcgggcagcgtaccgaacgcgttcgcataccgacttgaagagggaacccatgccggcaactacgatgttaccgtcgtcccgggcgtgttgagcgttgcgaaggccccgctggcgatcacggtgacgggcaaccaggctgcagctgtctacgacggcgcgaaccacctcgccgaaggctacgtcgtcgacggcgccgacggcaaggccgaggtcgtgctgcgggacggcgtgctcgcccgtgccgagggaaccgacgccggtacctacccgatggggctcgcggccgacagcttcgaggtgcggtcgaataactacgacgtgacgctgacggtggtggacggctcgctgtcggtggcgcctgccaagctgctcatctcggccaacgacgcgagcaagaggtacgggcaagccgatcctgcgctgacggcgtcggttgcgggcctggttgggggcgacgccttctccggctcgtataacgtgacgcgcgtcgagggcgagtcggtcggcacgtatgcgatcaccgtcgaggacgcggtctcgggcgatccgaactatgtggtcgaagtggctccgggctccttcaccatcgttcccgccgacgccgtttccctcgtggtaggcggcggcacgaaggtctacgacggcacgccgctggtgccgacgggcttcacgccgtccggcttggccgacggcgattacgtggaggtggtgtacagcggctcgcagaccgatgccggctcgagcgcctcgggcctcgcgagctacgttatccgcaacgccgcgggcgaggacgtgacggccaactacgagaacgtcaacgtggtgcccggtgatttgaccgtgacgcctgcggctgccatgatcgtcgtggccgatgcggccaaggtggccggcgcggccgatccgacgttcaccggcacggtgacagggctcgtcgacgagggtgacctcgggagggttgcctttgtccgctcgaacggcgacgaggctcccggaacctacgtcgacgcgctcacggcgtccttcaccgacaatccgaattacacggtgacggtcgtccccggcacgttcaccatcacggccgccccggtggttcctccggcgccggtcacgccggccacgccgacgcccggcacgccggtgcccccggtcacgccggccacgccgacgcccggcacgccggtgcccccggttacgccgggcgtaacgcccgagggcacgcctccggctgcagcggcggtaatcgaggtcctcgaggacgctgtcactccgttggctggcccgcaggaggagacgatcggcgacaacgagaacccgctcgcaggcttcaaccgggtgaactgctgggtgcactactatctcatcctgggcatcatcgtcacggtgatctacggagcgggcgtgctggtgcggcgcatcaacttcacgcgcaagctcaagggcttcgagaacgacgtgctcggcatcgaggacgagcaggcggctgccccgttcgcggcgccgttcgcgacggatggcagggaggcctagcatgaggaagagcaactggctgatactggccgtcttggccgtggccgcgggccttttcctgtggctgtggtactacctgggcttcaacttcgtggacgacccgttcgacctggtgctcgccgtggtatggtgggcggtggttctggtgctggtcgtgggcatccacactgccgagaaaaggcgccggcgccgcgtgcgcacggcctacctcgcgccgggggtgctgttcaacagcgaggccgggttcgtcgacctcgaagcgttcgaggagggtaccaccctcgcggacgcgatcgagcagacgctcgtcggcctgaagtacacgttcgaccgcaaggatccagccgacgaggacgaggcggcgacagggcccggcggcatcccgtcctctgccgtgaacatcgacgggcgttcggcatccggcgaagcggccgcctccgccaagcctcgcggaaccgtgaggttcgagcgcatcgtgcgcacggacaagttcgacaaggacgatgccgacaaatgggaaggcgaggtcgttgacgtgaggacgcaggaagccacgcccttcaagggcaaggaggagctctccgtccttctcgcggcgtagtcccgccagccggcctcccggtaaagcgcaaaaagcaggcgacccctcgaatgaacgaggggtcgcctgctgtaagaaccgaaggagcgcgcagcgctagtcgtcgaccccgatgatcaccgacgaggccttgacgatggcgtaggcctccttgcccacttccagctccagctccttgagcgaccccatggagatggtcgacgtgataagctggccgccctccagctccatgatcacgatggcgttgaccgctcccggatgaatggccgtgatggtgcccttcagcgtgttgcgtgcagaaagcttcattgaatcaatgcacccctttcgggtcgtcccctcgttccaaaccgtcccctccattgtaacgcccctggtgcattcgtgcgagcagaaccgcaactcgcgagagcaagccggctcttccgaggctttaccaagatttgaccggcccgagacagaggcttgatgctctttcttcatcatgttccgtgcggcgctgctccgtcgagggcggcactgcgcgaagcgaacagatacgcgcccgggaggggcgccgaggaaaggaagagcatgaagaagcgtttggtgatgatggcgatgggagccctgctcgcgctgagcgcattcggcctcatgggctgctccggcggcggcaacgccggttccggagacggcggcgagggcgatggcgcagcgggcacggtcccgtccggcgaggtctccgtgtactcgcgcgaggacggctccggcacgcgcggggcgttcgtcgaactcatgggcatcgaggagaaggacgccagcggcgagaaggtcgacatgaccaccacgtctgccgccatcacgaactccacctcggtcatgatgacgtcggtggcgggcgacgagaacggcatcggctatatctcgctcggctcgctgaacgacacggtcaaggccctcaagatcgacggcgccgaagccacggccgccaacgtgaagagcggcgactaccaggtggcccgcccgttcaacatcgtgacgaaggacgggctgtccgatgtggcgcaggacttcatcgatttcatcatgagctccgacggccagaagatcgtcgaggaggagggctacatctccgttgccgatagcgccgccgcgtacaccggctccggccagtccggcaagatcgtcatcgcgggctcctcttcggtgacccctgtcatggagaagctggccgaggcctacaaggccatcaactccggcgtgaccatcgaggtcaaccagtcagactccaccaccggcgtgaacatggccacggaaggcacctgcgacatcggcatggcctcccgcgagctcaaggactccgagaccggcgtcacccccacggtcatcgcccaggacggcatcgccgtcatcgtgaacaatgcctccaacgttgacgggctttcctccgagcaggtgaagggcatctacaccggcgagatcgcgaactgggaagacgttctggcataaagcccggcgacccgattgacaaggaacccgcatgtctcacgtacatctcaaggaaggcattgcgaaggcgctgttcgtggctgccgcggggatttcgatcctcgcggtggccctcatctgcgtattcctcttcgcgaatggcgtgccggccatcgcccagataggccttccggaattcctcttcggcaccacctggcgtcccgccaacgacgtctatggcatcttcccgatgatcgtgggcagcatctacgtgaccgccggcgccatcatcgtgggcgtgcccacggggctcttgtgcgccatcttcctctcacggttcgccggcgggcgcgtggcggcggtgctcaagcccggcgtggagcttctggcgggcatcccttcggtggtctatggcttcttcggcctggtggtcatggtgccgttcattcgcgacaacatgccggggcgcggtctctcgcttctggcggccgccgtgctgctgggcatcatgatcctgcccaccatcatcaccgtgacgcagagcgcgctcgatgccgttcccaagaaatactacgagggggccctggcgctcggcgccgatcacgagcgctcggtgttccgcgtcatcgtgcccgctgcggtgtccggcatcatggccggcatcgtgctgggcgtgggccgcgcgatcggcgagacgatggccgtcatcatggtggccggcaaccaaccggctattccgggcagcatcttcgacggcgtgcgcaccatgacggcgaatatcgtgttggagatgggctatgcggccgacctgcatcgcggtgcgctcgtggccaccggcgtggttctgttcgtgttcatcctgtttataaccatgctgttcaacgtcatcaagaaacgaggtgagatgaagtgatcacccgcaagctgaccatagcctacgaggcggccgatgcgtccgcggccggctcttctggttcgatcaacccgagtgaccgttttgatgcgctctatcaagttgtcgaggcgcgtcataacaaaacacgccgcatcgtgtcgaccctcttgcggtggatcgtgtacgcgggcgctgtcatcacgtcgttggtgctggccttcatcgtggggtatatcctggtcaacggcgttccctacctgacgccgagcctgttcgagtgggagtacgattccacgaacgtctcgctcatgcctgcgctcgtcaacacgctcgtcatggcggggctctcgctgctcatggcggtgcccgtgggcgtggggtcggctatctacctggtggaatatgcgaagcgcggcagccgcttcgtgcagatcgtgcgtaccaccaccgagacgctgcagggcatcccctccatcatctacggcctgttcggcctgctgttcttcgtgacggcgctccagtggggcctgtcgcttctggcgggtgcctgcacgctggccatcatggtgctaccggtggtcatgcgcaccaccgaggaggcgctgctggccgtaccggacgcctaccgcgaaggcggcttcggtttgggcgcgggtcgtttgcgcacggtcttccgctgcgtgctgccctccgccgtgcccggcatcctgggaggcgtgatcctcgcgctcgggcgctgcgtgggcgaggttgcggcgctcattttcacggcaggctccattgccgccattccgaacttcgccgagggcgcggccgcgctcttcgattccacccgcaccctggccgtgcatatgtacgtgctatcgagcgaggggctgcatgtgaacgaaacctacgccacggcggttgtcctgctggtcatggtggtgctgctgaacctcatggccaccttcgccgccaagaagatgaacaagggaggcaccaatgactaatgcgactctggagagggctgctgtgacgagcgccccggccacctacctgccgcatgcgcagggccgggcggccgagcgcaaggcggcccgcaaggcgcccgccgacgctccggccaagatgggcgtgcgcgacctgaacctgtactaccaggacttccaggcgctcaagggcatcaacctggagtttccgaagaaccaggtgaccgcgctcataggcccgtcgggctgcggcaaatccaccctgctgaagagccttaaccgcatgaacgaccttgtggagggctgccgtatcgagggcgagatcaccctcgacggccgcaacgcctacaacgacatcgacgtgaacagcctgcgccgccgtgtgggcatggtgttccagcagccgaacccgttccccatgagcgtgtacgacaacgtggcgttcggtccgcgcacccacggcataaagagccgcgccgacctggacgagatcgtggagcagagcctgcgcgacgccgccatctgggacgagctgaaggaccgcctgaagaagaacgcgctcggcctgtccggcggccagcagcagcgcctgtgcatcgcccgcgcgctggccgtgcgccccgaggtgctgctcatggacgagtccacgagcgcgctcgaccccatctccaccgcgaagatcgaggatcttgtgggcgagctcaagagcaagtacacggtgatcatggtgacgcacaacatgctgcaggcactgcgcgtgtccgacaagacggcgttcttcctgctgggcgagatggtggaggccggcgacaccgacgacatcttcaccagcccctccgacccccgcaccgccgactacgtggccgggcggttcgggtagaaggagtgaggcgctttacgcaaatttgacctctcggaggctgcggctgcgcggcgcctggcttacaataggcccaacacgcggccgggacggccgggagaccccatggagcaactgcgatgatctactacgttgaagacgataccaatatccgcgaccttacggtgtacgcgctcaagcaggccggtttcgaggcggcgggctttgccgcggcgggggagttcttcgtcgcctgcaaacggcgcctgccggagctcgtgctgctggacatcatgctgcccgaggtggacggcctggagatcctgcacatgctgcgggaggacccggccacgaagcacctgcccgtcatgatgctcacggccaagggcacggagttcgacacggtgagcggcctcgatgccggcgccgacgactacctggccaagccgttcggcatgatggagctggtgagccgcgtgaacgcgctcatgcgtcgcgccgccgcgccggccgtggcggccgacgacgagttctcgtgcggccccattgcgctcacggtgtcgtcgcacgacgtctccgtggacggcgagaacgttgcgctcacgctcaaggagttcgaccttctgcgcacgctcatgcagaacgaggggcatgtgctgtcgcgtcgccagcttttggaggacgtgtggggcatgacctacgtgggcgagacgcgcacggtcgacgtgcacatccagacgcttcggcagaagctcgcggcggccgtcgagggcgcagacgcctacatccagacggtgcgtggcgtgggctactgcgtcaagcagccatgagcttccgcatgcggggccttccccggcggggcggcgcgggacggagcgcccgatgagtcctacgcacctgcgggtcaagagcctctccggcaagatattctcgggcgttttggcgttcacgctgggcgtcatcctcgtgctgggcgtggtcatgaccaccatctactatatgtcctacgagcacgacgccgaggccgagctcgccgccagcgcgcaggacgctgcggcttacctcaacgcgtcgcccaccacggcgaacatccccgcgctggaggagcagttcgccggcctcacccgctacacgctcatcgcggccgacggccaggtgctctacgacagcgccgccgaccctgccgccatggagaaccacgccgggcgtcccgaggtccgcgaggcgggggagaacggccaggcggccaccatgcgcttttccgacacgctgggcaccgacacggtgtacgccgccgtgaagctggacgacggcagcatcatccgcctgtccgagtcgcgccactcgcttctggccttcctgggcgatatgctggtgccggtgctcgtggccgtgatcgtggccgccgtcctcgtgttcgtgctgtccaagacgctcacgcggcgcattatgaagcccatcgacgcgctcaacttcgccgacccgctggagaacgagatatacgaggagatggacccgctgctcatccgcatcgacgagcagcagcgcctgctcaagcagcagaaccgcgagctggcccaggccgagaacctgcgccgggacttctccagcaacgtgagccacgagatgaagaccccgctgcaggtcatctcgggctacgccgagctcatgaagaacgacatggtgcagccggccgatcgccagaagttcgccgccctcatctacgaggaggcgcaggccatgcgctcgctcatcaacgacgtgctcacgctgtcgcgcctggacgagtccgcgttcggcgacgacgcggtgctcatcgacttgcacgccgtggccgagcgcgtggcgggccgcctgggcagcttcgccgccgaccagcaggtgcaggtgcgcgtggagggcaccgcggcgcgtatcgccggcagcgagacgctggccgaggagatgctctacaacctcatagagaacggcatccgctacaaccatgagggcggcagcgtggtcatgcgcgtggaggcggaaccgccggctcggccgggcggcgggctgccgggcgaggacgcggcgggccaggtggtcgtgcgcgtgagcgacacgggccccggcattcccgaggagctgcgcgagaaggtgttcgagcgcttcttccgcgtggacaagagccgttcgaaggagacgggcggcacgggcctcggcctggccatcgtgaagcacgccgtgctctaccatcacggctccatcgaggtggagagcgccgagggcgccggcaccacgttcgtcctgcggttcccggccgcctagctcacgcgccatacaactcaccaggcgaaaggcggcgtggtagaaaacgtgccaggtatacgcaggttttctgcaaggttcgagcggcttttccgccagcttcctgtatgatcctcgcggctccggcgcaaggatcatgcgtgcttctcacggtcatctgcaccctttctcaacggttcccctgcaaggtcgcggcgctatgctcgtgcgggcaggcgagggcgaaggcgctgcggggccgatctgccggagttcctcctcccttgcaaagtgataactattttgttatcatgcagcgaaaggcgggaaggatgtacaaagtagagttgtaccatgatgcaaaggggcgatcggagctgctcgacactttgcgcaagctggaggataagagcagtacggacaaagaggcgaggacggcgtatttaagcatgctcaaggctatttccgagctggaagggcatggcacgaggatcggtatgccgaccgttcgccatgtgagaggcgagatatgggagctcaggccgaaatcccagcgggtgttctttttcttctggaaggacaatacgttcgttttgctgcattcctatattaagaaaacccagaagacgcctcggcgcgagataatgaaagccgagcgtaaaaaacgcgattggatagcgaggcatgccgatgagtaaaaacgagggttgctataccttccaagactacctgaaagaagcgaagctcactcctgccgagcgcgaggagatccggctggacgtggagctcacggggaggctgatcgaggcgcgcgaggcgcgggggatgacgcagcgcgatttggcggaggcgagcggcctcaagcagccggccattgcccgcatcgagtcgcatcgctcggtgccgcgcgtggacacgctgctcaagctgctggtgccgctgggctacacgctcaagatcgtgccgctcgaaggcagcgaccgtctttgagcggcgactggaaggcgactgcccccgactcatcgttcgaaggcgtctcccctgatcgtggcgccgaaagcgccgcggccccttggaaacgccgaggcgctggcaacctcgcggttcccagcgccttctctgcgttgcgtgaagagccccacccccggccagaaggatgaacccacctcaaaaggtgggtgctcgcagcccgtttcctggctttcgtatcaacggacacgaatctccattccgcgcgctatcttgagctccctcatgttatagcatcggtccatcgcaaagtatggcttcgagggcaggacctgattcagagtatacgtgcgtttcaggcgaagaaaagtcttgacatcctccgtcacccgatattcaacagacgcacacaagccccctgtggggtgtgacaagggtgtgacaagggggtgtgacaaggggacggggatgatgtctcattccgcctgcgcctaacgagtttggaagacatcagggaacgagacatcatccccgtccccttgtcacaccctatccatacagacgttcgcatgctatcatggttgccatggatacgctattcaccgaaatggaaaacgagcgcaagtcggaagtcgcccctctggcagtgcgcatgcgcccgcgctcgctcgacgagctcgtggggcaggacgaggccgtggggcccggcagctggctgcgcaacgccatcgagcaggatcgcttgagctcggtcatcctgttcgggccggcgggcacgggcaagacgtcgctcgcgcacatcgtggccgagacgacgaaggccacgttcgtggaggtgtcggccatcggcggcacggtatcggatctgcgccgggagatcgatgcggccgacaagcgcctgaccatgagcggcctgcgcaccatcttgttcgtcgacgagatccaccgattcaaccgcagccagcaggacgcgctgctccacgccgtggaggatcgcgtgctcgtgctggtgggcgccaccacggagaacccgttcttcgaggtgaactcggcgctcatcagccgctcccgcatcgtggagctgcacgggctgtcggacggcgacatcggggatctggtcgaccgcgccgtggccgaccagcgcgggctcggcggccggtaccggttggatgagaaggcgcgcgaagccatcgttctcttggccggcggcgacggccgcggggcgctcaccacgctcgagctggcggccggcatggtggagcccgggacggcgaagaagcctgcgaggatcaccgagaacaatgtgcgcgccgccacgccgcatcgcacgctgccctacgacaagaacaaggacctgcactacgacgtcatctcggcgttcatcaagtccatgcgcggcagcgaccccgacgccgcgctgtactggctcgcccgcatgatcgacgggggagaggacccgaagttcatcgcgcgccgcatgttcatcgccgcgtcggaggacatcggcaacgccgacccgcaggcgttgctcgtggccgaggccgcgttcaagtcggccgaggtcatcggctatcccgagtgccgcatcaacctggcgcaggccgccatctacctggcgctcgcgccgaagagcaacgcggcggaggcgggcatcgacgcggcgctggccgaggtgcgcaacggcccggcccgcaacgtgcccgaccacctgcgcgaccgccaccgccccggctccgagagctacggcacgtaccgctacccgcacagctatcccggtggctgggtcgagcagcgctacctgcccgacggtctcgagcgcggcgccttctaccgcccgagcgaccgcggttgggaggcgtaccgcgccgacgcggccgcgcgcgaccgtttcgaggcgggcggcaacgggcaaaaccccacgtcgcgctcaaagtaaccgatcggctaccgcctgtgtaagccgggtgaaaacgtgactcgatctgtatagaatccgaggtggaaatggtatagtgaaaactcgctttagctcaggaggcgttcccatggatatcagcgaagtcatcagcatagcgttgcccatcgtctacgtgcttgtcggcgcagcgctcatctggctcgtcgtcgagctggtcatgacggtgcgcaggacgcgcaagaccgtcgaggaggtccagaagcaggtcgagcccaccctcgccagcgtggagcgcatcacggcctcgctcgagcccgtggcggcgaaggtcgacccgctcgtcgagcgcgtgtcgctcaccgtggacgccgcaaacctcgagatcatgcgcgtggaccagatcctcgaggacgtgaacgagatcaccgactccgtctcctcggccgtcgacgccgtcgacacggtcacgagcgcccccatggagctggtgaacaacgtgacgaaccgcatgcgcagcgcgttcaagccgaagcgcgcaagcgacgagtccgtggcgctcggccgcgagaaggccgccgacgccacggtgggcgacgcggtgaagagcgtggcgaagggcacggcggccgtggccggggcggccgtggccgaccagcgcgagcacatggccgagcagcgcgcggagcgcgaggagaaggccgccgccaagcgcgccgccgccgagaagacctccgaggccgccgcgagcatggccgacgccgtgacgtccgccgccgcctccgatgccgacgccgcgacccgctacttcacgtacgagggcggcaccgaggccggttcgtccggggcgaaggcggctggcaccgtgtccggccaggataaacctgaggcatagcgaggagccggcccggtggatcccgaacagaacgagcgcgagcaggccaaggcgctgaaggcacgacgccgcttcctcacggtgtggaccatcgtgggggccatcctgctgacgggcgtcctcgtgtacctcttcaacctgttgagcgtgccggtgggcatcgtcatctggtccgtggtgatcgtgttctgcctgcgcggccccgtgaacaagctggagaagctgggcgttccccgcctggccgggacggcgatagcctacgtgctcatgttcgtggtgctggcgctggtgggcctgctcatgttctcgccggccttcggcgtgggcgaccagttcacgaatctcatccaaagcgtgcccggctacatccaaaccatcgcgaactggggcaacgacctgtatgcccggtatgccgacgtgctgcagaacgacacggtgcaaggatggatcaccgacgcgttcaacgccctcgtggcatgggcttccacgttcgcgcgcgacagcgcctcgggggtggtggccatcggcaccggcgtggtgaacacgttcgtggcgcttggcttcgcgctggtcgtggcgttctggatgctcatggagctgcccgacctcggccgcgagagcgagcgcctcgtcggcccgaagcaccgcgaggacctggagatgctgcacgtcacgttcacgcgcgtcatgggcggctatatcaagggcatgcttctccagtgcgccatcatcggggtgggctgctttgtgctgttcggcgtcatcggcatcccgaactacgccgccctgggcggtatcgccggcctgctgaacatcatccccatcgtgggcccgtggctgggcggtgcgctcgcggccgtggtgggcgtgttcgtgagcccctggatcgcgctcgtggcgctgctgggcaccatcgccatccagcagatcgtctacacgttcgtgtcgccgaagatcatggcgaactcggtggacgtgcacccggccctcaccctcatcgctttgatggccggctcggccatcggcggcgccatgagcggcttcaccggctcgctcgtgggtatgctggcctcgattccggccgtggccgtggcgaagtcggtgttcgtgtactacttcgagaagcgcacaggccgccagctcgtggccaaggacggggtgttcttccagggcacgccggctgacggcgatgccgtcgaccccatagccgacgccatcgcgccgcatcccgacgcgtcggccgcgtacgagcgtggggagcagcggaaggccgacgcagaaaagaaggcgcggcagaacaaagaacgctaaactgtctccagcacgttttgggcgggcccggcgcctcggtgccgcgggcgccttgagcatagggggcatcggggaggtttggccgatgcgcagaccagaggaccaacgggaaagaaagatagacgacatggagtatatgagcactgccgagatacgcgagaagtacctgagctacttcgaggcgaagggctgcaagcgctggccttcgtcctcgctgattcccgacgacccgtcgcttctgctgacgagcgccggcatggtgcagttcaagccctacttcctgcagcagaagcagctcgaggcgccttacgtgggcaccacgaccgcgcagaagtgcgtgcgcacgaacgacatcgatatcatcggcaccacgggccgccacctgagcttcttcgagatgctcggcaacttcagcttcggcgcgtacttcaagaaggagatgtgcgcctgggcctacgagttctccaccgaggtgctgggcctgcccgccgagcgcctgtacttcaccgtgtacctcgacgacgacgagaccatcgagatctggaagggcctcggcgtgcccgaggaccacatctcgcgcctgggcgaggaggacaacttctggcgcgccggacccaccggcccgtgcggcccgtgctccgagatctactacgaccagggcgaggagttcggctgcggcagccccgactgcgcgccgggctgcgactgcgaccgtttcctggagtactggaacctcgtgttcacccagtacgacggccaggaggacggctcgttcgtgccgctgccgaagaagaacatcgataccggcatgggcttggagcgcatcgcggccatcatgcagggcgtgcagtcgaactacgagaccgacgtgctgcgcagcctcgtgggcgtgggcgagcgcctgaccggcgccgtgtacggggccgacgccgaggccgacctgtcgctgcgcatcatggccgaccacagccgctcggtgacgttcatgatcgccgacggcattttgccctccaacgagggccgcggctacgtgctgcgccgcctgctgcgccgcgccgtgatgaaggggcacctgctgggcctggacaagcccttcctcaacgagtacgttgacgagatcgtgaacctcatgggcgacgtgtaccccgagattgtggagaaccgcgagctggctcgccgcgtcatcctgtccgaggaggagcgcttcggcgccacgctgcgccagggccgcgccttcctcgacgaggcgctggccgggatagagggcgaggtgctgccgggcgaccgcgctttcacgctgcacgacacctacggcttccccgtggaggtcacgcgcgagctgtgcggcgagcgtggcatcgaggtggacatggagggcttcggccgctgcatggacgagcagcgcgagcgcgcccgcgctgccaatacgaaggatgccgaggcggcttggtccacgtacggcggcgtgatgaacgagatcttggaggccgtggggcccaccgagttcctcggctacacgaagagcgaggcggatgcgcgcgtgctggcgatcgtgaaggacggccagcaggtagacgtgctggaagcgggcgaggagggccgcgtggtgctggacgccacgccgttctacgccgagaagggcggccagatcggcgatacgggcgttctggccgaagacggcgtcgtcgtggcggtgctcgataccaaggagcccgagaagggcttgatcgcgcataccgtcaaggtgatggacgagctggcaggcgggcgcatccaagtgggcgacaccgttcatgccgccatcgacgtgccccgccgcgagcgcatacgccgcaaccacacggccacgcatatcctgcactgggcgctgcgccaggtgctgggcgatcacgtgaagcaggccggcagctacgttgccgacagtcgcctgcgcttcgacttcacgcacttcgaggccatgacggccgagcagatcgccgaggtggagcgcctggcgaacgagaaggtcatggagaaccatcccgtgcgcgcctacgagacctcgctcgcgtcggcccgcgaggccggcgtcatggcgctcttcggcgagaagtacggcgagttcgtgcgcgtgctggacatcgaagggttctcgcaggagctctgcggcggcacgcacgtgtcggcaacgagcgagatcggtttcgtgaagatcacgtccgagacgagcgtgggtgcgaacctgcgccgtatcgaggcagtgaccagcttcgacgccctggcgtatatgaaccgcgtggaggtggagctcaaggagagcgccgaggcgctgcgcgtgcccctgttcgacgtgagcgagcgcaccgccgccaacgtgaagcagctcaaggagctgcagacgaagatgaagcgcaaccgccagaccatcgcagacgacggcatctcgtcgctggtggaaggcgccgtcgaggcgaagggcggctatcacgtggtgttcgggcgcctgcccgaggccgacgcagggcagatgcgcaacgcatgggacgtgctgcgcgcgcgtctgggcaagccgggcgccgcggtgctggccaccgagaaggacggcaagcccacgctcttggccgctggcacgccggaggcggtggaggcgggtttcgacgccggtgccgttatcaaggcgatctccggcaacatcaagggcggcggcggcgggaaggccgccatggcgcaagcgggcggcaaagacgcctcggggatcgatgcagcgctcgaggctgctcgggagatgctgctgtaaggctctgggctggggctgtccgacgcggcacgcgctcgggcagccttggctcgcgcgaacagcccgttgggccagcttgcacacgaccaggaaaggcccttagcatgcgcatcatggcgctcgacataggcgaaacgcgggtgggcgtcgcggtgtgcgacccgggggagcgggtggcgtcgccggtgtgcgtgctgccggctgccgaggtgctctcctgtgcgaagccgttccgccggctgctggaggactgggagccggagctgctgctgtgcggcttgccctatacgctggccggccaggaagggccgcaggctgcgcgtatccgtacggcggccgatgccatcacgaaggcgtgcggcatcccccacgagttcgccgacgagcggttgagctcgcaggaggccaaacggagtttgcgtgaaaagggcatgggcgagcgggagatgcgcggcaaaatagatatgatagccgcaagtctgttcttgcaggcgtggcttgatgcgcgccgttaggcaagccgaaaggtagaggaacgtccatgcccccacggaagcaagtcacgtattcgcagcgcccgaaccatgcggcccgctcggcgcacgcgcgcggcgagcgcgaattccgcacctacgacaccagctatatccgcccgaaacagagcaagggcccgaagatcttcgcggcggtgcttgccgtcgtcgttatcggtggcctggtttggggcgggctcaccctgttcaacagctgctcgggcacgccggcagagctccttgccgaaggccaggaggccaccgtcgtggtggagcagggctccggtgccaaggccatcggggagcagctcgtggagaagaagctggtgggaagtgcttccgacttcacgaagcgcgtgaacgagatgggcgtggagtcccagctcaagcccggcacctacacgttcgcgggcggaacgtcgctcgacgacatcgtcaggcagcttgccgcaggccccgacatgggcaacgcgctgaccatccccgaaggctacaagctctccgacatcgccgcggccgtcgccacggcctccgagggccgcatcacggccgaggccttcacggccgcggcatccgatgccagcgtgtacgcggccagctacagtttcctggccgatgcgggcacgaactccctcgagggcttccttttccccaagacctacgccgtggccgacgacgcaacggccgactcgctcgtccgcatgatgctcgaccagttccagaaggagacggcgggcctcgactggtcgtacccgcaatcgcaggggctctccatctacgacgccgtgaacctggcctccatcgtggagaaggagtcgagcggcgacgagcagatccgcgcccaggtggccgccgtgttctacaaccgcctggagacgacgggcgagcccagctacggcttcctgcaaagcgatgcaacgaccgcctacgaggtgggccacgatcccacgcccgaggaggtgcacgccgagacgccgtacagcacgtacacgaacaagggccttccgcccacgcccatctgctcaccgagcctcgactgcctcaaggccgtgtgcgcgcccgaccaggaatcgctcggcaagtacttcttcttctacttcgagggagacagctactacttcaccgaaacgtatgaagaccatatgggcacgttctcgtagggcgtctgctccgagtatctgaccgaccctatctgcaaagcagccgaccatgccgcttcttgaacccgaccgctatttctcgcgcctatcgcacgtcgacatcgagcgcgacttgctggcgctcggcttccgcttcgtgctgctcgacatcgacaacaccatcctcacgcgcgacacgcatgaggtgccgcgcgacgcgggtttctggctcgcgaaggcgcgcgacgcgggcatcgcgttctgcctcgtgtccaacaactggcacgagggcgtctaccagctggcgaaccgcctgtcgctgcccatcgtggcgaaggccgtgaagccgctgccgcccgcgttcctcatggccctgggcaagataggggccacgcgcgatgccaccgtcgtcattggcgaccagctggtcaccgacgtgctgggcgcccacttcctgggcatgaaggcctacctgctggccccgctcgtcgagcaggacctgccccacacgcttctgctgcgcaacttcgagcgcctggtcatgggcgagcggaagcccgagggagctggcgttccgacagcttgccagccgtcggaaccggccgacgctgcggcttcccccggcacccgatctcgcggcgatgccggaggctcgcgtaccgaagtacgcttcgcctccgccatccccacgatctcgggtactggggaaaccctcgctgaccttggtggacctgtgagcggggggactgggaaagcccttgcagacttgggtggacctgcggtggaaaccgacgaacctgctagaacgggaggagcttcatgagcaagctggaaactgccgagagcctgtacttgctggggcatcccatcgagcattcgaagtcgccggtcatgtacaacgcggtgtacgcgaggctggggttgccgtggcgctacgagttggccgacttggccggtgaggaggaggcgcgggcgttcttggccgcgcgggacttcctgtcggtgaacatcaccacgccgtacaaaccgcacgctttcgaggcggccacgcacaaggcggcatcggccaagctcgcacgtggggcgaacctgctggtcaagcatggggaagcgctgcttgcgtacaacacggacggccagggctgcgtggccttcctcgagcgcatgggcttcgacttcgccggggcgtcggtggcggtgtgcggcacgggccccacggcgctcgccatcctgcacgcctgcgccgtcgccggggcccgcgaggtcgtgcttgtcgggcgcgacagggagcgcgcgcagtccgtgctgcaggattacgtcgacgagttcgggcggctgtcgtcggccgcgatcgacctgccggcggcgagcgagcaccaccgcagcttccgcgaggcctacgacgccaccgcgttcaagttcggcagctacgcaacgtccacgcaggccataagcgccgccgacctcgtggtgaacgccacgccccttggcatgcaggcaggcgacccggccccgttcgacggggctctcttccagcccgggcagcgcgcgttcgacgtggtgtacggccacggcgagacggccttcgccgccggcgcccgcgccgctggctgcacggtttcggacggcgcgggcatgctcgtggcccaggccgtggccagtgtgcgcaccgtctgcgacatcgccggcgtcgacgtcgacctggacgcgatcgacctgttcgaggtcatggccgaagcggcggggttctcgattccgacagcctaggtgctccgccgttcttcaggtggcgaagcgaagccgacattggggggagacagggggacggggatgatgtctcattcgttgaatgagacatcatccccgtccccctgtctcccccctgtctccccaaagggcgctttgcgtcgcctgccctcgtttcgttcgcttcatggcgatctggtacgacgggcgaaccatcgttcgctctgccgtgcggctgcggtacaataggcgcaaaacgacgacagcgggaaagcggaccaatatgcgctacctaacagcgggcgagagccacggcccggccctcacggccatcgtggatggcgtgccggcaggcctcaagatctccgaagaccagataaacagcgacctggcgcgccgccagtcgggctacggccggggtgggcgccaggctatcgagcgcgaccgcgtgcgcgtgacctccggtgtgcgcttcggccgcaccatcggctcgccggtggcgctcacggtggcgaaccgcgactgggagaactggaccgaccgcatggccgcgttcggcgacgtgccgtccgaccttatgcgcgaggtgtgcccgcgccccggccacgccgacctcgtgggcgccctcaagacgaacaccgacgactgccgcaacatcctcgaacgagcgagcgcccgcgagacggcggcgcgcgtcgccgccgccggcatcgcccgcgagtttttggccgagctcggggtggaggtgttctcctacgtggcctccatcggcgacgtgtcgctcgacgaagacgacccgatgctcgccgcacccgactacaagccgctcgacatcgagctctccgacgtgcggtgcccggacgaggaggccaccgaggccatgaaggccgccatcgacgccgcgcgcgaggcgggggagagcctgggcggcacgttccgcgtcgtggccacgggccttctgcccggcgtgggcggctacgccaccgcaggcgagcgactgaccggccgcatcggcgccgcgctgttctccataccggctatcaagggcgtggagttcggcctgggattccaggcggcgcgccgtcccggctcgcaggtgcacgatcccatcgagctggaccccaaggccggcttcacgcgcacccgcaacaacgcgggcggcctggaaggcggcatgaccacgggcatgccgctcatcgtgacggcggccatgaagcccatccccacgctcatgacgccgctctccacggtgaacctggacacgctcgagcccgaggaggcctcgcgcgagcgcagcgacgtgtgcgccgtgccggcctgcgccgtggtggccgaggccgaggtggccatcgtgctggccgacgcctacctggagaagttcgggcatgacaacatgaccgacatcaaggcagccgtgaagtcctaccggcagcgcctgcggacgctgtcccggtgatgcgcatgagcggaacgagcctgccgccgcagaaccgccccgcgcgcatcgtgtccgagctggcgaagccggtgttcttcgtgggtttcatgggcgcgggcaaaacgtccgtggcgcgcaagctcgcgcgcacgtgcggcattgcctcggtcgacatggacacctacctggagcgccgcgagggcaggcgcgtgcgggagctcttcgccgaggcgggcgaggaggctttccgcgccatcgagaccgacgtgctgcgcgagttggcgggaaaggacccgctgctcgtgtcctgcgggggcggggctgtgctggctcctgagaaccgtgccatcctggccgagcggggatatgtggtgtacctgcaggtcacagccgacgaggcggcttcgcgcatcagcgacgtgtccacgcgccccctgttccgcgacctcgagacggcccgtgcgaccatcgaggcgcgccttccgctgtatgaggacgtggccgatgccgtggtgaacacggccggaaagagcgtggcggccatcgcgcgcgaggtgcgcggcgtgctggagagagagggaatcctgtggcaacgaaagtgatcgtgaacattcccggcgaggagccgtacgacgtgcgcatcggtgccggcgtgctcgatgcgctgggtgcgcgcatgcgcggcgtcccatcgctcgatcaggcggagcgcgtgctggtcgtcaccgacgagaacgtggcgccgctctaccgcgatcgggcgagggaatcgctggcatccgcaggcttccgcgtgtcggacatcgtggtgccggcgggcgaggacacgaagtcggttgaggtggcgagcgagatatgggaggccatggcgcagctggcgcttggccgcgactgcgccgtggtggccttgggcggcggcgtggtgggcgatctggccgggttcgtcgcctccacgtacatgcgcggcgtgacgctcgtgcaggcgcctaccacgttgctttcgatggttgactcgtcggtggggggcaagacgggcgtgaacctcacggccggcaagaacctcgtgggcacgttcaagcagccggcgtacgtgtgcgccgatacgggagcgctttacacgctgcccgagcgagaatgggcgtgcggctgcgccgaggtggcgaagtcggccgtcatcgattccgacgagttcttcttctggctggcggaggccgccggcgccctcgcagagcgcgacgaggccgtcgtggccgaggccatcgcccgttgcgtcgtgttcaaggccgacgtcgtggccgaggacaaggcggagagccgcggggtgcgcgagtgcctgaactacggccacacgctcgggcatgccgtggaggcgctggcgggctacggcgcgttctcgcacggcgccgccgtggccgagggcatgcgcttcgccgcgcgcctcgcggcggcgctcgcgggcgcgccgctcgagttcgtggccgcgcaggacgacctgctggacgcgctggggcttcccgcgctcgcctggtcggccgaaccggcggatatgctcgccgccatgaagcgtgacaagaaggcccgccacgggcaggttcgcttcgtccttccgcgcgacgtgggctcctgggagctccgcgacgtggacgacgccgtcatcttggagcacttggaggcctgggcgcgctcgaaggaggcgctctcgtgaagcggatactggtgctgaacggcccgaacctcgacatgctgggcgtgcgcgagccgggcgtgtacggctcggagacgcttgccgacctcgagcgtctggtgacggagcacggcgagcgccgcggcgcggccgtcgcctgcttccagtcgaacagcgagggcgagctggtggaggccgtgcacgccgcacgcggcgcctacgacggcatcgtgtacaaccccggcgcgcacacgcactattcctatgcgctgcgcgatgccgtgggcggcatcgacgtgccctgcgcagaggtgcacatctcggacgtcgatgcgcgcgagcctttccggcgcgtttcggtcatcgcgcccgcctgcgtggcgcaggtgaaaggccgcggtttccagggctactgcgacgccctcgatctgctgcttgagggcgtctccgagcgcctgggcgaaggctacgagcagcgctacccggccggccaggtaatcgtcggcgggcgaggcttgctgcaggaggacgaggagggcgaagccgtcccgctgacgctgcctgcagggaccgcccagaccagcgcggccgaccaccaccaagcaccgatcgagagccctgccggtctgcctccccagccgccggcgcaaggcgacgtgggcccgcgtttggatcgcctccgcgccgcttgcgcggacgacggcatcgatgcgttcctcgtacgcgacacctcgaacatcgcctggctcaccgccttcgacggcgtattcgacgacgagagcgcccatgccctgctcgtcacgccgagcgccgccgtgctccacaccgactcgcgctacgtcgattccgcacgcgtcgctgcctcggacggccccatcgccgtcgacgacgcgcggaagacccatgcgaagttcgccgccgatgcccttcaggggccgagcaatgccgaaagatcctctggcgcggatgccgcgcccgaaggcgtccgcggcgggatccctgcgagcactctcgggagcacccctgccaaccctgcgctaccagccgtcctcggcatcgaggactccctctcgctcggcgagttccgcgccctcgaggccacgctcgccgaggctcccggctccgtcccgatcctgcgcgagacgagccgcttcgttctcgacctgcgcgccgtcaaggagccgaccgaggtcgcgcgcctgagcgccgcccaagccgtcaccgacgccgcgtttgcgcacattgtcgcgttcatgcgccccggcatgaccgagcgggaggtccagatggagctggaggacttcatgcgccgccatggtgccgggggcctcgcgttcccctccatcgtggccgcgggcccgaacggcgcgagcccccacgccgtaccgggcgccacgctgctcgaggcgggccagtgcgtcgtgctcgatttcggggcccgtgcctacggctactgctcggacatgacgcgtaccgtgttcctgggcgagcccgacgagcgcctgcgcgccgcctacgaggccatccggcaggcgaacgagcaggtggaggcagcgcttcgccccggcgtcaccggcaaggacatgcacgagctagccgagcgcgtgctggcggaccacggcttcgcgggcaagatgggccacagcttgggccacggcgtgggcatcgatattcacgaggagccgaacctctcgccgcgcaacccgcacccgctcgttcccggcaacgtggtcacggtggagccgggcgtctacctaagcggcgagttcggcatgcgcctggaggacttcggcgtcataacccgtgatggtttcgcagttttcacccaatcgacgcatgacatggttataatatagcggcaaaatacctgcgtgccgccgccccagacgagtgcagtaccgcggtcggcgcgagctatcgaaaggaaccaagggaatggcaatctctaccgccgactttaagaacggcatgtgcatcgagtacaacggcaagctgtgcaccatcgtggagttccagcatgtgaagcccggcaagggcggcgcgttcgtccgcacgaagctcaaggacatcaagaccggccgtgtcatcgacaacacgttcaatgcgggcgtgaaggtggagtccgtgcgcctcgagtcgaagaagctccagtacctgtacaacgatggcgccgacttcaacttcatggacaacgacacctacgagcagacggccgtctcggccgagatggtgggcgacgccgcccagtggctcaaggagaacgacgaggccacgctgctctacgccggcgacgagctgatcagcatcgagccccagatgttcgtggagctcgaggtcacgcacaccgagcccggcttcaagggcgacacggctacgaacacgacgaagcccgccacgctggagaccggcgtggagctgcaggttcccacgttcgtcgagatcggcgacatcctgcagatcgatacccgcgacggccgcttcatcaagcgcgtctaaggtgctctgtcggcctgcgggccgacagaaatgctcgacgctgcgaggcctcctggcaccggatctcgaccctttcatgctgttcccacgtgcgagaagcacggtagaccgcatgatgggccgaccttgggtggtgccagggggcctcttgttgtttttgccccgagcctgagaaagaaggcgccgcctctcgggcggcgccttcatgctagtacttctgggcgatcttgatggctttgcggtagtcggcgtagtcctccacgcagtgggcgtccgaggcgatgtaatccaccaggttgttctccaacagcttgagcgccgcccgcttgctgttgctgcggaacccgcctgcggcgaagttccccgacagctgcagcaggcaacccagatccttcatctcctcggcaacgccgatgtcgttctgcacgggccggtagcgctccggatgcgcgatgatgggctggatgccctggccttgcaggttgtagatgatgcgctgccaattcggcggcaggctggccacgccgaattccagtagcagcaggttcgtgccctcgaagcagaggtgcgacgcgttgtcgattccgaagcttatcaggttctcccagtacacctcgaaacccaacgtcatctgaaagccctgcgaatgcgcgaaccggctgagcacatcgaagtggtcgacgatgcgctgatagtcgaagcgcgagccccggcagtggggcgtgcagacgatgttgtcgatgcccgacttgcgggcagcgttgagcatggcctgcgactcggcgaagtcgctcgacccgtcgtcgacgtcgaacaggatatggcaatggaggtcgaacatccgcggaacccgcttcctggcaaccttcgcctacgagcgcgtccggttcttgtggcgcggcgccttgccgcccggcgtcatggccttgaaagcgttgggcgcgtaagggttgcccgctccaggggcgacggcctgcccgtccggcatgcccgtgcgcggctgctgcgccgcagggcgggaggacgaggcacggcgtggggacgtgtgcccttccttctcccaggacacggggttgttcaggtcggaaggcatggcggatggctcgaagtcctccttgttcacgcgcttgccgtcctgcgtgtagtaggcgtagtagtagctgctctcgtcatcggtgcagaacgtcatgacggtgcccaggatgcgggcatcggccacacggagctgctgggcgcacttcgccacgagggagcgcttcgtctggttctggcggatgaccagcagcgtgccgtccaccaggctgctcaagatggcggcatccacgaacagcgacacggggggcgtgtcgaagatcacgtagtcgaacgagtcgcgcagcttgtccaccagcgacgcgaagcgcttcgtgctcaggatgtccgcggggctcgggatgttcggctcggcgtcgaggaagtacaggttcgggatgtgcgtcggcaggatggcgtcgttgagcgaggccgagcccgagagggcggcgtacaggccgcttgtcgggtggatgtcgagcagcttgcccagggagcggcggcgcatgtcggtctccacgatgagcaccttcttgctcgccgtggcgatggcgttcgcaaggttcgtggacacgatggtcttgccctcgttctgctccgaggaggtgaccacgatggtcttcaccttctcgtccaccgaggcgaagcggatgttcgccagaagcgtcttcgacgcgttggaaagctgcggatgctcgaagcgcgcgaggatcttcttgctcttcttggccatgttagttccccttacccttcagcgcgggtatgcggcccaggacgggcagccccagaagctcctcggcttcctcggggctcttcacggtggtatcgatgaggtcgagcagcacgataagggccacggcgaagaacaggcctgccaagaaggcgacggcggtgtacatgatgcggttcgggcccgagggggcgttgggaacctgggcggcgtcgacgatgttgacggccttgagctccatgacctccacggcggtatcggccgtctgcttggccagctcgttggcaatctgcgccacggcctcgggcttcttgcccgtgacgctcaacgtgatcacgcggttcgtggtggccgaggtcaccttgatgtcgtaacccttgagcgtgctcatgcccagcgactgggcggtggcgtcgatcacgcggttcgactgggccatgacggcgatgtcgttcgccagctgctggctggccgtggtatcgctgctcgtgatgttcgagctctgctcgtcggttttgttgagcacgtagagcgatacgtcggacgtgtagtcgttcgacatgaatccccagcagtaaatggcggtggctcccgcgaaaacgagcgggaacacgacgaccaggtaccacttcttccgaagcaggtggagcagttctagcaaggtcacgggttatctctccttataagcccaggtaccgcgtttccaggtcgaatgctagtcgacctgacggtagtacacgtccaaaaccgtctcgtagacggcattcttgtcgaggtagtactcggcgtatttctcgccctgctgcatctcgcccgggagcgtggtcacgttgaggctcgtgatgccgctcgagagcaccgatgtggccaggtagccgaactcgctgacgcccaggttggtgatggagtactcgccggccgtgttgaacaggtccagcagcgtgcccacgttgccctgggccatgccgagcgcctgcgcggcgaaggccttgatgtactgcacctggcgcgcctggcggtcgagcgaggacgtgaggaccgacgtgtcgcgccactgcacatagcgcagcgcgttgttgccgaacagcacggtgtcctgcccctccacgatgcccgtgttggggatgctctgcagcggcgtgagcgccacgccgcctatggcgtcgttcagcgggccgacgccgctcaagtcgagcgcgaagtagtaggagatgggcatgttgtacagtacgcgcgaggccacggtggtggtgtactggcagctggtttccctgccgtcgccgtagctgtacgccaggcacagctgcatcttgtcaaggccgatgaacgcgctgcccacgaattcgcccacttccaccatgctgtcgcggggaaggccgatggcggtggcctcgccggtttccgtatcgagcgccatcaccatgacggcgtctgcttggccggccttctcgcccacctcggcgggtgccgtgcggtcgaagccgatgatgcagatggagaccatgttctcgttcagggcataggtgtggccgttgtatttgacggtcttgccctcgtcgtaggctacggcgttctcggcggtttggatgtcctcggcttgggaggcctcgtggatggcgccttcgccggctttgatggtgctcataatgccccaggccgtgccgccgcccaccagggccaccacgaccagtacgacaagcgcgacgcgaatgcgcttcttgcgtttcgagtggctccgcttgcgcttgcggatcagcacttcctggttctgggaggccgtctgctgggcaaagaactcggacgagtcggctcgcccttccgttggctgacccgccgtctgctggggagcctgggtggagggggatccgcttcgaggcgcacgcgagggcggcgtcggtcggttagtaggtcggttgatcatctattaaaactccagtaacgatgtagcggctggttgtgtgattggtgtcgctcatgcaggtgctcaactgcactattttatcatcaattgacagttccgtgtcgcttcgggtgttaaccagcagagaatccggatgcatgacgaagttgaagtattcctggcgcaccgtcggatcggagaggttgtaggagttcaggatatggcggtcgtcgtacaggtaggccgagacaacgcggtaggtgagcgcatgccccggcgtgtagatatacagcgtgtcatgctcgttgaagaagtcctcgttctcgaagtagtgcagggtggagaacatggtgccgttctgcaggttgtggccgtagagcaccgtcacggggtcgctgaaatcggtgttgttggccatctcggtgtagatggctccttcgatggcgtagtcgccgtctttgttatggtcgaggtagaggaagtcgttcgtggcgctctgcagcacaggaaggttcacatcggtgccgggaacgtggatccacgcgtagatatcggggttctcctgcttcagcgacgtgaagtcgatggggttttccacccggttgtcggcggtatcctgtgcgggttgctccaccaccggttccggcgtgttcttcatctcctcggccacgcggtcgagctcggcttgctgccagatcagatagccgcacccggcggcgacgccgcacaggagaaaggcgaggagcaccgcgaggatgataatggagcgcttcttcttcctcgcctcgagggggctggcggccttcgcgtgcttgggctggaggtcgtcgcttcgttgttccaaaggcgctttcggcataggaaggaccgctcgctttcgtaaaggtgtttcgtacctcaagtgttgaggctatggtagcaaaccgtttgcccataaaagaagagacctgttgtaaaacaggtctcttcgatacaagttctatataagacttgcggtgtgcttgctactcggtgaccttcttgcgcagggccacgaagacagcgccggcggcgatggccgtcacgacggtggcgccggcaacggtgccgaggtcaatgccggtctgcggggaggtggaacccgtgttggccgtcgaggaggaaacgacgtcgccgatcaccacggagaagatggagaggctgggggccgtgaacgtcagcgtgccgtcggaggcaacaacgcccgtgatgttctcgccggcttcgccgttgccatgctcaacgtagaccgtgaaagcgtggttggcgtactggctgccaacgttaaaggagaacgtcacgttcgtgcccgtgccgtcgaccacaaacgacatcagcggggtaacgccctcgggaaccgtcttggccggcttgtcagaggcgacaggcgcgctgacggtgccattctcggccttgacggtaacggtgatgccgccaacgttacccgtttcattattgccgctcgggctcggggctgcccatgcaagcgtcggaagcgcaagcatgagagctgcagcacaagcaatcgctgcaatcctcttcttcattaaatccttctttccttgggtgctcttcacgcgaacacagttttacagccttacccttctgaatgatagcggccgttcgacgcgtttgtcaatgagaaattgatcttttgcctcgtaaacgtagtaattcctctttaacggggcgttcttcgtgttgtgcaacaaagaggctcgccaacggttgcgggcagcttgccggcgtcaatggcggggaaggggggagaggcggcttgcagattctccatacgacaaccatataagaccggttcgtacaaccgttctgaaattgttggttgaggaaaagcgggggggggggggcttgatcgagaaaaacgactcctggaaaaagaatcttcacatttggcgttgctaaactgtaaacctcaacctatcatttataatgacaaccgccagttttatcagggaatacataatcttttgctatgcatttgaagttgtatttccatggcggctggtaaaaggccggttttggaatgtctgcgttctcgtagggacgtgctttccaaaacgacgaagcgaatccgcggaaatcataaagggctgcgcgagcgcaagctgatcgtgcgcgcccctccgcttctttcgagtcgttccggtcgtggcggttgaaccgccgggcatatcttacaagcgagggatcgtcgctgggtgcgcgtctcgttgcgagtaggaggatgaataacgttgtcgtttcgcatcgcctttcggcgcatggcgaagccttacctttgtataagcccttcggcaggaggctggctatgtggtatgtcgtgcaggtcgtcggcggcagggagcgccgtgtcctccatctggtggagcagctcgtcgatgatgacgtgctgcaggagtgcttcatcccccagtacgagatcatgaagaagatcaagggcgagtggaagcgccgctccgagatcctgcttcccggatacctgttccttattaccgataaggttgaccaggccgcggacgagctccgcaaggttcccgcgttcaccaagctcctgggaaacgacaacgcgttcattccccttaacgcagatgagatagccttcatcgattcctttacgaccaaagaccaccgcgtggtggaaatgtcggagggcgtgatagaaggcgacgagatcagcataacgaaaggcccgctggtccaccaaaccgccctggtcaagaagatcaaccgccacaagcgcctggcatacgtggaaacaacgatgtttggccgcaagctgaacctcaaagtcggactagagattgtcagaaaacacaacaacaaaccagtttgaagattctcccaacctgtcggctgaggcctccctccctttcgatggcttcgatgtcgagttgtccgagtcgtcgccggcagtgtattgtcccttcctctcacttcttgatgacggaactgccgccgtcgcagttggcgaaaacccctttgtcgatcccgaagtcgcgcgtgctgcttattctcgcgaggagggtcggcttgcataccgcttcctaaagagggcgttcgacatcgtcttctcgctgggtgtgatagccgtgctgctggtgccatcgctcctgctgtgcctggccatccgcctggagagtcctggctgccccatctactcctagaagcgcgtgggccgcgtgggcaagagtggcgaggtggagatgttcgacatgtacaagttcaggagcatgcacaaggacgccgacgagcgcctggccgacctcgaggacctgaacgaggccgacggcccgctgttcaagatcaaggacgacccccgcgtgacgcgcataggcaggttcatccgcaggcactccatcgacgagctcccgcagttcctgaactgcctgctcgggcagctctcctgcgtgggcccgcgcccgcctttgccctccgaggtggcccagtacgacgagcgtgccacgcgccgcctgtccgtcaagcccggcctcaccggctactggcaggtgagcggccgcagcgacacgaccttcgacgacatggtggagctggacctcaagtacatagaggagcagggcgtattgactgatctcaaggtgatcgcccgcacggtcggaatcatgctcacggggggggcgcttactagaggcgcccctccgaccctgctgcgggcggtgacgccccgtggctaggaacgggagcctcttctacagggcatgcaaaaggaccttcgacatagcgttcagcgcggctgcgatcgtcctcctcgcagcgcctatggcggtgctgtgcgcgatgatctccgcggagtcgccgggcgctccgctctactcgcaggagcgcgtgggccaaggcgggaggctgatccgcgtgattaaggtgcgcaccatggtcgccgacgccgatgacgtgacgaggcacctgacgcccgagcagctggagcagtgggagaaggagcgcaaggtggagggcgatccccgcgtgacaagggtggggagggttctccgggccacctcgcttgacgaggtgccccagttcctcaacgtcctcaaaggcgacctgtcggtgatcgggcccaggccgatcacgcaagacgagctcgcctggttcggcgatgacgcggaggagtacctgagcgtccccatgggcatcacgggcctctggcaggccaccacgcgaaacgacgccaccttcgagtcgggtgagcgccagcgcatcgagcttgagtacgtgcgcaacgccggcttcaagatggacgcccgctgcttcctcggcacgttcggggctatgttcggcaagagaaggagcgggcgatgacggcagaaaatcggagtcggggtggagtgtttccgccctactcttgtctgatcagtgtttactacaaagaaaatgccgcatttcttaaaaactgtctcgattgcattttagctcaaacggtcaaaccagatgagattctcgtcgtcaaggatggccctttgacagaagagttggatggtgttctaagtgaatacgacaatgattatcccggtctttttacattcttttgctatcccgagaacaagggtctttggcatgccttaagtgtcggcattcctgtatgtcgcaatgagttcatcatgcgaatggacgttgatgattggtcgattcctgatcgtgcggaaaaacagctcacgctgtttgaatgtcacccggagcttggttgtgttggaagcacggtgctggaattcgaagataacataggcaacatcgtttcactggttgatctgccagaggccaatgaagaaatagtccaatttggccaaaaacgttgccccttcaggcacccctcgcttatgtatcgaaaaagcattttgaagaaggcgggcggttaccagtgtatgccatacttcgaggactatgacctgtatatgcggctaaaaaatacaggatgtgttttccataatatccaagagccgcttgtctatgtgcgcgtaagtcgagatttctatgcgcgtagaggtggattttcttacatgcgcgatatgcttcgcttcaagtcggcttgcctcaaacgtagagactacggcttgctcgagttcttggcatgtacgacccctcatattctagtttgtctcatgccaaatattctgcgcacttgggtctacaagagatttcttcgagcttcggcccctgcagatttacgggtggttgagtagctgtgaatgtgatcaggaacgtgaaaagcgggttgcgttttgcggtgaatgaggcaacaagggctcttatctgggatgaggcgctgcgcaagcgtcttgcagaatgttattatgcgtgggcggcacggcgggtgaatgcacgggaaggatttgccgcccggactgcatccgatctccttgattggcgcgctacaatgggttttcgtttcgagtgctcccgtgaagtttatcgagctaatagcttctatggcataggggaagctctgcgcacgttctctggagcgcagagttgcatcaaagcatgcgtggaacatggtgtccatttcggcagttacgtaaacgggcaagaactcgagggaagtgggcttccatgtctcatcaccttcagtcctgcccgcttggaacatatccgagctgtatctgatgtgccggtggcgatggtgggtccgtatattgcttacgctccggattacctcgacgaaattgaaatggaaaaagcgcgtgatgagctagggaagacactccttgtcttccctagccattcggtggatcgagtgaaggtcacctacgagcttgcatgtctcgtttcagaaatcgaacgggtgaagagggagcaggaaattgatagtgttctgatctgcctctactaccgagatttattgaatggcgttgctggagattacgagggccttggctatcatgtggtcactgcgggctatcgcgaagatgcgctttttctggcgcgacagcgaagcctcatttttcttgccgatctcgctatgtccaacagcgtgggaacgcaagtaggctactgcggttatctcgaaaggccacattatattttcgatcaagagaagcgttacggttccgatagcgcgctcgatgattctgagttcaacaatgcctatgcgagaagtcaggcagcggagaaggccgaggttgctgctgaattttccgtgttgactgactcgctgaccggtaaacagcgcgagttgctggagcgttattggggcttctcgaaagttaggtcaagggatgagatgggcggcctcctcgctgtctgcgaggaggcgtatcgcgctaggtcgaaggataggcagcgatctcttcgaagcaatccgcgccttgggcagttgccgtttgaggtgtgatatgggaaatactatgcgtttaggtatgccgcgttcgaagagcactaggaagaaacgcattgtcgagtgggtcccgggcgagtgggcttggtgcctaacactgctgttcatgtttatccgcttcttcactcaaatatcgactgtatatctttatgtgacttacacggcgcttatggtcatgctggctctattgcacttaaatggatctgaagagacttctcgtgtgggcaatgtgaagcttaacggcgctgttctcggactctgcttttccattttggtcatacttgcatttagcccgtattctaaggaacagctcgttaagttctgtttgctgcttatggacgtatatatccttgttgcagttctgaaggttaatgaaatggagtctgccaccaaggtgttctattgggcaagcgtggtggtggtcgcgggtacttttgtgatgtatcttgtgtcgcctgctttcttttcgagcatcgaaggtgcgtttcaggggctgttttactctcctgtcttttttggcgtaccggacaataacgacaccgcagttgctatgttccttctggtttgcttagcttacaagaagggttggaaaacagggctaattcttggcagcatctacccattcctgtattttggtaggcagtacattctaatgtgcttgattgttgttgccctttcgctactagcgatgttaaaactccgtaaagcgtcatggcttcgcgaccaaaagatcgacgaaaaactgaccgcaaagttcttctattgtgtgttcgctgtttccacgattgtcatcattgggtttagctatttctgggttaatgtgatcgtggaggacggtacgtcgtcgtacaaagagtctttaaacgactcatctaacgcaatccgcatgaattcaaacgtatattgttttgaattgatgacaagaacccctgattttttgttttacgggtacgatagtgatgtatttgacgagcttggtatttcgtcaacagattattcaagtaccgcaaactaccttataagcggacgatatcgactggttcaaccgcacgaagaggttttaaaccttgtgctgaaagaagggttgctcttcgcaattttttactacttcattgtcgcccatcttctcagcaagattaaatggggagaaaaaggtaaggcgatccttgtcgccttctttatcgggagccttttcctttctggtttcttcagagattttcgactccttgcgtttgtgatgatcgggcttagcagtgaaattcccttacgctcctttgcgattggaatcacgagaaaccgcaaaaggacggccacttcggggcaggtggctcgatgagcttgcttcagaagatgaataatagtctttccgggcgagcattcatttacacagttggaaactttgtgttaggcgcttccaattttcttgcctccgcaatatttgtacggatgatgagcacttccgactatggtctcgcaagtgtatatatcacctgggtggcgctcgtctcgcaaataattggccttcggatagaaggaacgattcaaaatgcgaagctgacgtacggaaaagagagtttaaaggcctactgctcgtcgatcctgttccttgacctggttgtctttttggtggttcttgttctgtcgataatattcatcgagccagtagcgtttttactgaaccttgatcagggtgtttggttgctcgctgtaatcactgcgttttttttaacatgttcgaatcttcgtaaatgctattgctcggcgattaagaatgctcctggcgatctgctcatatcttgtatcctggctttcgcgcagatcggtttgtctgttttgctcattttgttttctgtatgtgacaattcttactttgatcgtgtttggggctattctgttccaaccgttgccgttggtgtgggtgtgtgcgtgttctttttcttcaaaggaaagaggttcgttgcacccaagcaatggaaattctgcctcagcttttccattccgatgatcttcaacggcatagcctatcttgtgatcaatcagagtgaccgtcttatgctcaattcgatggttggttcggatgcggcgggaatatattcatttgtatacaatattgccttgcctatcagcgtgattacccaatctcttggggcagcttggcagcctgaatactatgagctgaaggcgcaaggcgatgaggacgcactgaaaactcatgagcgtaggtatacgttgaatgtgctgataatcactgtgatattgatgtgcgtatcgccggaaattctgaagttgctcggaacgcaggattattactcgggtcttgttatcttgccggtggttatagctggctatttcttccagtttttgtatacatggccgctgaactgcgagctttaccatcgcaatactgtcggcatagctcttgcgacacttgttgcggcggctttcaacattgcgcttaacatctttttgataccaatttgggggatggttggctcggctgtcgcgacctgcgcggccttcgttctgctctttgtcatgcatcatatatccgcgcggattatggtagacgaatacactatgacgcttaaatggtttgctccctatgtgatagcttgcgtgtgtgcaaccgctgcactcacctttcttgtcgatgtactcgcagcgcgctgggctttgagcttagtcctatgcgtcctgcttgttgtgaggttcaagaagaatcgatcgattatttgatgacgataaggggtgattctcttgtttttcattgattatagaaggcggttcgacggcgaagttttacttgaatccgatgttgttgagcgttctgttccgtcgagtttgaagagatcttccaatgggaagtcattcttcgttggcgagttgtttgagtgcagcgaatctgacttttttagtagccaatgggaggaggagccagatcggctgaacgaaggctgctcggcgctctatgcggtcacttatgatgaaaagagctgcgtgttcgctgccgacatcagcggcagggagcttctgttttactaccatactaatgatcgtcttgttctttctgattcgctatggggtgtgttgaagcgaatacagcccggttttgagggtgttgacaaggactctctggctgaatcgattgtcatgggtgggggatttccttgcgatcattcaactcctgtcaagaacctcaagtggctcggggcgaactgcatcgggagattcgatgcgcgctcatgggctctcgacgtgcattcctatggtgatatccggagaagcggcgatattgtggacgtggatgaggcggttgaacagttcgatgcagccatgagacatatggcttgttgcttaggtgagaggcatcctgatgctgtttttgggttggggctttccggcggacttgattcaagaactgctcttcattatttgtcggatgctgggctcgagctggaatgcttcaacgttggtaaggcgaggccccacggagttctgcttgcatcgagtttgaaaagggcacatgagctcgcaaatacttcaagaaccaactattgcaacgttgagtggcaaccccactctattcgttcgaagatggatttaatgctcgaaaaccaacctcttggcactgggggacattacacgaacgcttataaatacgaaagcgaagggcgcccgagattcgacgtgcttgtcggaggggggcaggctatagggcctatgctcgtgggagtttcagcgtttaaccattcggacaagatgagcgtcgatgacttgtgcgcatatcttcttcatttggccattggcgaggtaagggcctatgcctatacggaaaattcctttcgaaagcagatgcgtcagttgggcgcgagtggggttgatatcgagggcggcaagaaccgcgagcagtgggatgccatcgttggaaagggggcttatgggaggacagcgcgaaaggtacgctcattcgtagaagattgcgctttgcgaggttataggccggccgatatcacgctggattataggacgcgagcgcttggcccaacgggtcgcaacggagcttatgagagcggactcggtactgaaaagagttacacaatatatacgccttttctgattcgcgatgctttgaggtgggatgctccgctcgttgaagagaggcgcgttctcaaggagcttattgccgcgaaaatgccggaatacacagaaatcggcgaggaaacgtttgggtctaccaaaatgaatcaatcgaatctgtccctgttcgcacagaaagttgccttcgcgatgcgcggcagcggcattatgacagacgactggtactctaggcaccccgccatacgcaaagcgttccttgaagatatgacgagtccttgcaagtggttctatgagctgtttcctagcgcaagggattacgaaggtatatggaatatgagcccttcgcgcatgaattctctttgggaggctaaacgcgtcgtcgactgtatggaaagcaagcgatatctcgaattcaagtagatgggacacggttctgaaatgtcgacaatgagcatccttgctgtcattcctgcacgtgcgggatcgaagggcattcccaataagaacatacgcttggtgggagggcgcccgcttgtgtactatgctattagaaatgcacttgattccgagttcgttaccaatgtggttgtgacgacggactcccctgaagtgcgcatcattgctcagcagatgggtgcacgggtgcattggagggaggctgcactgtgcaccgacgacgtggcgctcgatgcggtggtggcagatgcggcattcgagggcgcatgggactgggtggtcaccatgcagccaacatcaccgacgcttacgactgcgacgctggactctgctattcggcgtgcgattgacgaagacttcgatactctcatttctgttgtgaacgatccgcgcctttcgtggggagagaatgctgaagggggcataagcccgaactatgccgagcggctgaatcgccagtggctacctgctgactatgcggaaaccggggcatttgtgatctcgcgtgcctctgttgtgacgccgcagacgcgtattggcgaaaaggtaggtgtgttcgaggtgccgtctggtgaggggatagatgtggacacgttcgacgacctgcgatgcgcgactgcgcacttgaggcgtgaaagcgttgccatctatgtgaacggcaataacatgcgtggcatcgggcatatctatcgtgctcttgagatggcagatgagttctattcaaagcccgatatctattacgatgtgaaccagaccgatccgattgtgtttggtcgtaccgcccacgagctcatcggtgtggacggtatcgctgatctgttcgaacgctgccgcaacaaggactacactcttttcgtaaacgatatactttccacttccattgactatatgatcggattgcgctccgtagttcccgaggcgaagattgtaaattttgaggatgatggagaaggggctcttaaggccgaccttgtattcaacgctctctatcatgatgatgaattacctcatgttaaagcgggtgagaggtattacatctcgtcgaaaacctttctattctaccatcctatcgagatcaagcagagggtagagcgtgtgtttgtgtcatttgggggtgccgacccgcagaactattcagacaggctgctcgccattgtcgcaggggacgacaagtacgaggatgtggatttcaccgtagtgcttggacgcgcgaagcacaatgtcgatgggttgttggaatataactcgctgccgaacattgaggtcctctacgacatggccaacatgccagagctcatgagcgcgtgcgatgtggctgttacctctcgtggtcgaaccggctatgaacttgcgctcatgggaatcccgtccattgcgatggctcagaacaaacgagaggagaagcatggctttgtttgcaacgagaacggttttacctatctgggtttaaatcctcccgatgaaattctgaaatcgaatcttgatatgtacttaacgttatcgcgcgaagcgcgccagcgtttccaggacatgctgctttcccacgatctgcgtaatggccgcaggcgcgtcatgggccttataaatagtctttaaaaccgcatccaaatgacggaaggagcgaaatgagagccacaaccccgtatctgatcgccgagatgggtgtcaatttctatgacactgcgaaggttgaggggatatctcccgtagatgctgccaagcgctacatcgacggagcggcggaggcgggttgcgactgcgcaaagtttcagtcctacaaggcggaaaccatcgtatcgaaggactcgccggcttattgggacatcaccaaagagcctactaagacccagtacgagttatttcagaagtatgattcgttcaacgaagccgagtttgcagaactttgcgaatatgcacacttcaaagggatggactttaccgctacgccgttcgactatgccagtgctgactatctagaacgttatgtcgacttctataaaatatcgtcgtcggatgcgtcgaaccttccctttctcgagcatgttggttcaaaaggaaagcccgtggtgctaagcgtgggggcgagctggttgtcggaagtggacgaggctgtgcggactttggagcgttcgggttgcacagacattacgatcttgcattgtgtgctgagttatcctacggacccagctaatgcgaacttacgtgtaatcgaaacacttgcccaagactttccgaggcataaggtggggtattcggaccacgtggcacccgactccgccatgcaggtgctttctgcggcatatctattgggagcgcaagtgatcgagaagcacttcacgttggataaaggtctttctggcaacgaccactatcattcgggtgatatcgccgattttaagcatgcggttgaaaacttccgacttatcgatagtgtgctggggagcgcagacaaggtagtgttgccctgcgaggaggagtcccgtcgtgaggctaggcgctcgctggtgctgacacgcgatatgtatacaggcgaggttataggtgtggacgacctgatgcccaaacgcccgggtacaggtattgcgcccgcctttgttgacgtgataattgggcggacggtgaagatggatcttgcagaggacactgttcttacatggaatatggtgtaggttgattcgacttgaatgagatggtattgattctatgttgagtgaggggctgtgctgcggagggattttgccactagcttcgttcagttgcccttactcgggttttcggcagtatgttactgggacggatcgggtacgtccgcatgttatgtctgtaatggcagagggaagttgcaaggtgtttggccgtatcaatccatgagagcggtggcgaacagcccgatctcgttgtcgtggtgcttggcgtagtcggggttccgctccacggggaaacggtagctgttgtctccgaatcctatctgtttgagcgcctttttaaagtttgcacagtgctctgaatcttctcgatgtttcgacttctgcttggaaaggaagtcgtttccaagctgctcgatggtgcttgcatgtgcctctttggacttgacgcggtattgccgatttgagttggtgaattagctgctcggttttctccgtcgctccgtacagcacgccaaaggtgtcggacgcgccaaggcccttttcgctcgatactgccttcagtgatgagtgggtgtcgtgcacatacgagaaccctctgagcggcttatcagctaggaggtcggcgagcggttgctacccccccccatgtcattatgtcagcgaaaaagtgataatttcattgcggggtggttttctcgatgtttggctggctgctcgatggttggattgttgggctcggctgaaacctacctctccccaaagaactccgagtcgaaaaactccgccagcgacacgccgaggcctttggctatcttctccaggttgaccgctgccacgttgcgcttgccggtctccacctcgccgaagtaggagcgcgacatgcctatgaggttggcgaactcctcctggctcaccccgcgctcggcgcgcagctccttgatgcgcaggcctatcttgctccggatgtcgtagtcgctcatgccgcccctttcgccttttcctcccatgattccctaaggcccgctataagttgactcgctatgggcggcattctgcggggtcgggcgaatcgggagaacgtgcgggaggggagcgcccctagcggctcggaggcgcgcccttggcgcgctcttccccaacccaagcctgcgcaacctccacgaacgccctcgctgcggcgctggcctcttcgcctgggcgcaggcagagggctatctcgcggtcgacgggaacctcgggcggcagggcggccagggggaagggggcgttctcgaggatgagtgaggacaggacgctgaagcccaggccggcacttgccagcgacatggcggcatagtcgctcacgatggagaaccttacgcgcggttccacgccgtttgcgcggaacaccccgtccatctccgacgaagctccgctctccagcctgatatagggctcgctggacagggccgaggtggggaagaagggtgctttcgccagcgggtggtcgggcgccacggctacgagcagcgggtcgcgagcgagaggcacggtgcgcaggttcagcctgacgggcagcacggcgaagccaacgtcgtagtcgcccctccatacagcctcctcgagttcggcctgatcgtcgatgcaggccaggtcgagctcgacggaggggtgcaggagcccgaacttcttggcaatgccggggagccattggatggccgtgctggtgaacgtgaccacgcgcacgttgccgccctcgagatggtgcaggtcggccgcgcgggcatgcagccggcgctcggcattgcagacgtcctggacgagcggtgccaggtccgccccctcggcagtgggccgtgcgcccccgtagtcgcgcacgagcaaggtggtgtccagctccttctccagcgagttcaccaggtagctcatgccggcctgcgtatagcccagctctcgcgcggcctccttgaagctgccggtctccaaaactttcaggaacgcctcgtatttctggttggccatggttttcgatccccttcgtaaagctgtgatcggtagtaacaagaaatactttcaattgtataaagaaagtctcgttttactttcaattggactaagcataccataggtgcaatccggaacagagaccgagggccctgccaggcgacagggcgttgctctgcgctgtccaacgacagggcggaaacaagagaggaggcgggacgtggcgcgcatcatggacatacgcgggatatgcattgcgagcgtcgtgctgcaaaccgtcatcttcggctccggcagcgccttcacgaagctcgcctacgagagcatctcgcccctttgggcgcttgccatccgcttcgggctggcgtcggcggtgttcgccgtgctgttcgggccgcgcatcgtgcgggggctgcgcggcgcgcgcttgggcgactggctgccggcggcgctgtgcatggcggtgtcgtacatctcctgcaacgtggcgctcgacctgaccacagccacgaacgtggggttcctcatggcgcttcccgtggtgttcacgcccatcttggcagccgtggtgctgcgccggcgctaccggctggtccacttgccgttccaggcggcggtcgtgggcgggctgtacctgctgtgctcgagcggcgggtcgttcgcgttcggttggggcgagctctgcgggttgctcacggctgtgtcgctggccggcgcgctcgtgttcggcgagcgggggcttgcgcgcatggacgtggtcaccgtgtcggcaacccagatattcgcgacgttcgtgttctcgctggccggtgcgctgctgttcgaccggccgctcgacgttgcggcggtgcagcccctcgcgtggggaaccgtggcgttcctggcgctggccagcacgtgcctgacgttcgcgctccagaacatggcgttgaagcggctgccgtccgccaccgtgtccatgctgctcacgggcgagcccatcttcacggcgctgttctcgtggggcgtgctcgacgagacgctttccacggcggggcttgtgggcgcggccgtcatcgtcgtgtgcgtggtggcggagacctgggtggacgggcgtctggacgagaaagccggtgcagcagaaggggctgcggcggatgcgcttcccgcgacagcgcctgcgcctgccttcggcggcgagccggcgtcgctgggcgagcccgcctatgcggctgccacgtcggtgcgcggggcggtggccctgcctgcggcgttcgttcctccgcatccggcatacgagcaggaatgacggtcttccggcagcgaggcccgcgccaaaagatgcgggcctcgctgccggaaagagcggtgcggggcgtccggccggaaaaagccctgcgggcgcccggcgtgcgaccgtagaaggcgctccggtcgcgaaggaccgagccgtcctgcacgcaggccgtttcagctgcatctttccccggcgttctcttttccctacaaacctccgccgctcattgcccttttcgcggatttggtgcatcatggttcaaagagcccgacagcgctgcggcgcagcgggctgaaccgcgacgaaggaggcttctcatggctaccataggcgacggattcaaggacatcttcctggcgggcatcggagcgatggccatcaccgccgagaaatcgaaggacctggtggaccagctcatctcgaagggcgagctcacggtggaccagggcaagcagatcaacaccgagctcaagcacaaggccgaggacgtggccagcacgctgcgctacgacgccctcgaggcccgcatggccgccatgacgcccgaggagcgcgcggcgttcgcggccaaggcggccgagatcgccgcgaagcagagcgcgcaggcgccggtcgcaacgccggccgagggcgcccctgcagccaaggccgaggtgggcgacgcctctcctgtggagacgtcggccgcgaagtcggccgcggtggagatccccatcgagggcggctcgcctgcgtctccccagacgcccggcgcgtagccgcggccctgcgcgcgttcgagagaggcgcccgcccatggccatggccgacaacacgctgctcaagtacttcttcagctccggcgcggagatcgatccggaagggcggttcaatctcagccgcaagacgcgcacgcgccggctgaaggagatctactccatcctccagaagcaccatttcctgcgcggcttctcgccggaagagttccgcgccatgctggaagacctgggccccagcttcgtgaagatcggccagacgctgtccacgcgctcggagatcctcccgaaggcctactgcgacgagctggcaaaactccagatggagtgcgatccgctgccgttcgaccagatgctcgaggccctcgacgacatctacggcgaacgtcagggcgacatcttcgacgccatcgatcccacgccgctcggcagcgcgtcgcttgcgcaggtgcacaaggcgcgcctcgcgaacggcgatgtcgtggcggtgaagatccagcggcccggcgtgaaggccaccatggcgctcgacatcgacatcatgcgcatggtggcgcgccaggcgtcgcgcttcatgaaggacgaccagatgctcgacctgcgcgacgtggtggaggagctgtgggccacgttcctcgaggagacggacttccagcgcgaggcggcgaacctccaggagttcgcgcggctgaacaaggacgtggcgttcatcgacagcccgcacgtgtacccggaactttgcggcgagtacgtgctggtcatggagtacatcgacggcatacccatcctggcgaccgaccggttgcgggccgccggttacgatctggaggagatcggcgagaagatcctcgataactacgccacccagatcctcgatcacggcttcttccacgccgacccgcatccggggaacctccttatccgcaacgggaaggtcgtctacatcgatctggggatcatgggacgcctgtcgccgcacgaccgcgccgggttcggcaacatcatccaggccgtgggcatgcagagcgctaccgagctcaaaacggcgctcatgtccttcgccatcgcgaaggacaacgcggccatcgaccacacgcgcttcctggccgaccttgacctcctgctggaggactacggctcgtgcgacgtggccgacatcgacatcggcatgttcctgaacgacatcctcatgctcacgcgctcgtgcaaggtcacgctgccgtcgtccatcacgagcgtgtcgcgcgggctggtgacgctggagggcaccatcctgccgttcatcccgaacgagaacgtggtgtccatcatcaacgcgcacatccagcgcacgaaggatccggccgaggagctggcaggggccatggaggacctggcgctggcgctgcgctcgtcggcacgcggctcgatggacgccgcccagtactccggcgaggcattgaagatgctcacgcgcggccagctgaaggtgaacaccgaggtgctgggcagcgaggcgccgctctcgcatctgggaaagatcgtgaaccggctgaccatcggcatcatcatcgcggggctgttcatcggctcgagcatgctgtcgctctcgagcatggagccgcgccttttgggcgtgccggtgctcgcgttcttcggttacctgggcgccgcgatcctgtccctctgggtggtcgtggacatcgcacggaaaaagtaacgggcgcctttcctgtctttagccaacgttttaccagatcagatagcccgcaaccaataattgcggaaaaatccaactggaagcggtcgcgcggcgattcccgcaaccgtacccttttgagtacgctatgatgaatgaaacgagaaagggttcggaaccatgaacgtcgagatcgcccagcgcctgtcggcgcgtcgcaagcaatcgggactgtcgcaggaagcgctcgcggagaagctgggcgtgtcgcgccaggctgtgtcgaagtgggagcgctcggagtcgtcgcccgacaccgacaacctcatcgcgctcgcgcagctctacggcgtgtcgctcgacgagctgttgtatgtggacgacgagatgcgcgacgacgtggcgttcgaggccgtcgaccgcgctgccgagcgcgcggcggctgccgacgcgccgaagccggcatcgggaacggatgcaggcgcggctccagcagcaggagagggcgcctcggataagccgggaaccgacggggaggcggacggtacggcggctccggagcctggatccgccgacggcaaggagtccaaggtgcgtatcgggctgggaggcatccatgtgctcgatggcgacgactacgtgcacgtgtcatggcgtgatggcgtgcacgtgaaggattccaagaagggcgacgaggtgcatgtgggctggaacggcatccacgtgaaggaaggatccgttgcgagcgtgcagggcgcgtgcgaaggggacgccgccgagcccggtgccgacgcgaagaggtcaagcagtcgctgcacgctcgaggacgacgacggcagccaggtggtcatcgacgacgacggcgtggtcatcaacggcgaacgcttcgacagctggcgcgacgcgaacgagcgctacgggtacgggcacatccacgaggagcgctggaacgagccctgcggctacacggtgaacggggagcgcttcgacacgcttgacgatgcgaaggccaagtacggcccagaggtgggccgtaccattcccgttcgcaagcattacctgcgcgcgttcgaaaaggagtgggtgaagttcccctatccgctggtgataatcgtagtgtacctgctgttgggcatcttgaacggcgcatggggcgtggggctgttcctgttcctgaccgtccccgtgtactatatggtgggccacgccatcgggcgccggcgtatagcgccgttggtgtcgggcgtgtatcctatcgccgtggtggcatggttttgctatatggcgttcctgctgaaccagccgcatcccgcctgggtggcgttcctcaccatcccgctggtggaatggctcgtgcacagcctttcgcgctggtggcgcatccgcaagagcgagcgcgcggccgcgaagaacgcgcctatcgacgtggagccgcagtaggggagcggggggacgttctgcgccgatctcgcttgcgagtgcaaggagcgattgcggaagaatcgtaacaaaggctccgctgccattgcggcgttgcgccgcacgctgctatacgagatgacagcagcgctcgcttcaccgggtggtgccggtcatttacttaacccgggggcgtttcgtcgcgttcccgggttttttctctgccctcttttcccattcgccttatctggtgagcactttgatcgcgaccaaaagaatccagatcgcaacctgaacaatagtcgccgttgcggcaagtcaaatacgtcccatcaaggcacttcgctttcgtcggggcaccatccggcaggcaaacgctgctgctgccgtcattctggcaagcgagacggttggcacaccctcattttatccttaaaatagaacaatatgactccttaataaaaccattaaactatggtactatgacaatagttcaataggacaatgataggcattctaataaggaatgccgtcgagtccgttccggggaggcgcgttgtggggacgcgtgcgagaagcgaagggggatggtctatgcgacaacctctcatctgctatttcaacatggagaacgcgagagaacgaggaatggggaggaacgaatgaatagtgatgctacgttttcgcggcgaacgtttctgaaggggacggctgccctcggtgcgatggcggcgctcaccggctgcgcgagccaggaggcgctcaaaccgagccccgccggcgaggccggtgtcgcatccggtgaggtgcaagtccgccacaactggtgccagatgtgcggtccggcgaagacgaagtgctcgacgctttgctacgtgaaggacggcaagttcacgaacgtcgagggcaatcccgaggctggcaacaactacggtgtgggcagcagatcgctgtgctctaaggcgaacgcggccgttcaggtaccctattcgccgctgcgcatcatgtaccccatgaagcgcacgggtgagaagggcgagggcaagttcgaacgtatcacctgggaggaagcgctcgacatcatcagcaccaagctgctcgagaccaaggagaaatacggccctgagtgcttcgctgccctgtcaccgcaggaattcgcggtacagggaacgattgcccagcggttcctaaacgtgcacggcacgccgaactacatgcacagctccatctgcatgacgcagcgcacctggggcgcgcaggtgacagtgggcggcaaggcgctgaatgccgtgacccccatcggtccgggcgagatggacaagacgaagctgtacgtcaactggggtgagaacctcgagaactccgcgtgcaaccagggcggccccttcaagcgcgtggacaacaagcagaagaacggtatgaagatcatcgacatccgcccgatgctcgatccgctggcttccaaggcggacgtgtgggttcccgtacgccccggcaccgactgcgcactggcgttggccattctccacgtcatcatcggcgaggacttgtatgaccacgacttctgcagtaactgggttaacggcttcgacaagctggctgagcacgtcaagcagttcccgccctcctgggcgtctcctatcacgggcgtacccgaggagcagatctacgaggtcgcccgtatgatgggcaccatcaagcccatgggtatcggcttcggcaacggtgttggcgaccaggcgagcgacggtacgtccaccatccaggccatctgctcgatcgaggccatcacgggcaacatgggtatcgcgggaggcggcaacaagggcaaggtcctgcctccctcgctgatcaagaccaagccgttcgaccgtctctccgaccgactgcccgagagcgaggaggacaaggcgaacggctggcaccccggtgcgagcaagctggtcgctcccgagatcccccgttggtaccagggcccgcactcgtggcactgcggattgacgagcgcgtacttcaagggcatcatgagcgttttgacggagaagccctatccgattcggtgcctgctggcgcagtcgaccaacccgctctcggcgacccgccagccccagaaggtggtggaggcgctgaagaagatcgagttctacttcgtgatggacactacgtggaactcgtcgtgcaactacgccgacgtggttctccccgctttgacgcactacgagacgagcgaccagttcaacgtgaagaacatggctgggggcacggccatcggcatcaaccagggggtcatcgagcccatcggcgagggtcgttccgactggcgcttctactgcgacttagcggtaaagatgggctatggcgaggatttctggaacggcgatttcgaccagaacctgcgcgagcaactcgagccgtcgggcatctcgctggaagagttgcgagagaagggctggatcttcgtcgagcgcaccgacggtgccaagccgagcgaccctccgtacaaggattacgcgaacatgttcgcgagtctgccgaacggcaaggtgcaatgctacaacgagctgattggcggcaagcccgacacgctcgacatgggcaccatcggctacctgcccgagtacgttggacccacggagagcgtcgcgagaacgcctgagcttgcgcaggagtatccgatcgtattctcggacgtccacgcgtatcgtctgtgcaaccacagctactatcaggaccttccctacacccgcgagctgcagaagttgccgtgggcgaaggtcaaccctgccacggcaaagaagtacgggattgcgaacggagagtggatgaagattgagtctccccatggctggatcaagctgacagccgagtacttcgagggcattgcgccagatgtgatcatggcgaagcgcggttggtggcaatcatgcgaggagctcgggctccccgggtacgatttcctcgatggcgggtgcgaggccaacgtcctgtacgacgggactccggagaacttcgacccgttcacttcctccatgggcaagcagacgctcgtgaagatcagcaagctcgagggaggggatgaataatggccaagcaatacggcttctatatggacaccgagcgctgcatcaagtgctgggcgtgcgagatcgcttgcaagcagtggaacggcatcaaagcaggaaccattgcgcgccgcaaggtgcacgaggtgacgagcggcaccttcccgaacgtcacgcgcacgttcgtgtcgatgtcgtgcatgcactgcggcgagccggcctgcgcgaaggtgtgtccggcgggtgccatcacgaagcgcggagaggacggcatcgtggtggtggacaaggagaagtgcatcgggtgccactactgcttcttcgcctgcccgttcggcgtgccgcagtacaccgacgagggcatggacaagtgcgactgctgcatcggcaacggtgtggagcccggcgacacgccccactgcgtggccacgtgcccgacgcaggcgctgcagttcggtaccatggacgagctggccgcgaaggtgggcgacaagaaggccaggcagatggcggccgacgcgaagccctcggtcgtcgtgtcgtgaaaaagcgatgccgagagcgcggggctgcgtgtcccatggcgctctcggccgacatgacggaaaggaggaacgaccatggttgagttgcagacgacctggagctggctgccggcgatatacctgttcctcggcggtttgggcgcgggcgcgtttctgacggcgtccgtcttgcgcctggcgaagccggggcgattcaagaggaccgtgacgggaggcgtgtggacggccgtggcggcgctggccatcgggttgctggcgctcgtgtccgaggtggagaagcccttccaggccatgatactgttcaagagcttcgtgaacggctcgtcgtggatgaccgtcggcgcgtggctgctgctggtcacgttcatcgtgttcgtgctgagcgcgctgttcaccaccgacaagatcgccgactggctgtcttcggcgtgcaagcccctcggacaggcgcgcgcgggcatcaacaaggcgctcgcggtgatcggcatcccgcttgcgctcgcggtagcggtgtacaccggcgtgcttctgggcgcggcgcccgccattcccctgtggggaacgtggctgctgccggcactgttcaccgtgtcggcgctcgacacgggcgtggcggcggtgtccatcttcgcggccgtgattgaccgtgacgagggcatcgagcgcgtgcgtgcgacgctggagaaggcggttgtcggcttggtggtgctggaggctgcggtgctcgccgccttcgtgatcagcatgcagggcgccggcgccgacgaggcccgggcgatcgggctgctcaccgagggcgcgctgggcgtgcagttctggctgctcgtggtggccgtggggctggggtgcccgctcatcgcggccataacccagctcgtggcgtcgaggcagaaggacaagatcggcccggccgtgccggtgggaggcgccgcgtgcgcgctcgtcggcgggttcacgctgcgtttcgtggtgctggctgccggcctgcatgccgcgctcgtcagcccagcggcgctgcaggcggtgcagggcgcgctgatgctggtttcgtaaacgacggttcgatgggggcgcccgcttcggtgggcgcccgcgagggggagggcgatcatggacatgcgcgaacgcaacgccgaggccgaggctcgggagctcacgtactcgtttctgtcccatctgttcctcgaggaggtgtcggaggatttccttgcgcggctcgccgaggagccgccgtcgctcgagggcgagctcgggcgctacgcggccgggctcgcgggcgcgaacctcgcggcggcgcgcacggaggcggcagcggagttcgcggcgctgctgctgaacatgtcggccgatccggtgttcccttacgagtcggtgtacacgagcgccgagcacctgctcatgcagcgctcgcgcgacgaggtgctcgcggcgtaccgggctcaagggttcgagcgttcgggagatttgaacgttcccgaggaccacgcgggcatagagctggcgttcatggcgcgcctctgccgcaaggaagccgatgcgctggctgccggcgacgaagttggagccgaggctgcacgcgagacgcagcgggtgtttctgcgcgaccacgtgctggcctggtttccgcagctctgcgccgatctggagaagcgggcgaagcggggtctttaccggggcctcgccgagaccgtgcgccagttccttgcgttcgagcgcgaggagctgggcgtcgggtaggggcgtcggccgctcacggcggccgacgcccctacccgcgggctccgcgcggccggccttccctccctcccgggtcggccgtgcggggtctcgcgctttgcggccccgtgcggcaagcggggcgaggaatgctatcatatgacgatactacttggcgaatgaaggtgggggactatccgagcgtgagcgccgccaatcaaaccgtgcagatcaccatagacagcgacagcggcatcccgctgtggctccagttgcgcaaccgcttgatctacctgatagcgtccggccggttcaaggcgggcgacaagctgccaacggtgcgcgagctggccgttgacctaggcgtcaactacaacacggtgagcaaggtgtaccaggacatcgagcgcgacggctatatcgtgtccaagcgcggcaagggcacgttcgtggtagagcggggtcccgccgaagccgaggcggccaagtccgaggttgattttttggccgacgagttcatccgccagtgccgcgagctcggcgtgccgcgtcaggacatcgccgatttggtggcggggaggctcgcagcggcggacgagacggagtgagcgacggagaggcggaggagcgacgatgggactgttcaggcgtaaccggatcgagcacgacgcgcagggcgagcggaaggttgccgagacggagctcgaggccaacgaggcctctcgtggcggcgtgtacctgttcttcctcgtcatgttcgccgtgggcttcctcgtgccgttcctgctcacgttcgcgttcgtgtcgccgctgaccatcgctgcgtcggcggcggtcggcttcgtcgtggccacttcggttcgcatcgcgccgcagtgggagcgcgtggccgtgctgcgcttcggccgcttcaaccgcatcgcgggcccgggcatctactgctgcatcccgttcgcggagtacgcggccatccacgtggaccagcgcattatgacggcctcgttctccgccgaggccgcgctcacggccgatctcgttcccgtcgacgttgacgccatcctgttctggatggtgtgggacgccgagaaggcgtgcctcgaggtggagaactatccgaaggccgtgctgcgctcggcccagacggccatgcgcgacgtcatcggccagctcaaccttgccgacatatccatgcgacgcaagcagatcgaccgcgacctcgaggagatattgggcaagaagtgcgagcagtggggcgtgaccgtcatgtcggtggagatccgcgacatcatgatccccaaggagctgcaggatgcgctgtcgaaggaagcccaggccgagcgcgagcgcaacgcccgcatcatcctggccgaggtggagaaggacatctccgagatgttcgtggaggccgccgaggtgtacgaccgcaacccccgcgccatgaagctgcgcgccatgaacctggcctacgaaggggcgaaggactcgaagggcgtgctgctcgcgcccagcgcgctggcggacgggttcaacatcggccagcgggcaggagggggagagtagcgcggcggctctttccctgcgaacgacgacgagccgcttatgcggctcgtcgtcgttgtacctttgcggagttagaaccgctcggcggcctcgtgcttgtcgctcttggcgaagcggctgtagtcgtagccgccggtgccgttgcccttcttggagcgctgcttcttcgcaggcttggaaccctcgcggtacggcttgtcgaaggacttctcgcctcgggcggaggcgggcttgccggagcggtcggagcgcttgcccggcttgccggcgttcgcgcggtcgtagccgcccttgccggagcgcggggcctcggtgcgctcgaagcgcttgccgcccttatcctcgccgcccatgcgcgtgctgccttcggcagcgtagctcttgcgggccggcttgccgccctcgcggtcgtcggacgtgcggtagccgcccttgccggcgggcttgccgtacgatttgcccgcaggtcgcttgccgtagggcttcgagccgccgttcttggagccgccctggcgcgcgccgcccttcttctgcttcagcagcgacgggtccagctcgtaggtctccagctccatgaacgggatgtccttgccgatcaggcgctcgatgtccttcagcgtgcggctggtctcgcgggtgacgaacgagatggcgtagcccttctcgccggcgcggcccgtgcggccgatgcgatgcacgtagtcctcgggcatgtcgggcaggtcgaagttgatgacgtggtccacgtcgggcacgtcgatgccgcgcgccagcacgtcggtggccacgaggatggacgtcttgccgcggcggaagttgtccagcgcgcgacggcgggcgccctggctcttgtccgagtggattgactcggcgcggaagccggcgtcgcacagcgcctcggcgcagtcctcggtgcggttcttcgtgcgtgcgaacacgatgacgcgctcggagcccttctcgcgcagcacggcctccaagagctcgggcttgttgaagttcttgatgggcatcatgaactgctcgaccgtcttggccgtctcgccgttgcgggcgatctccaccatggccggatcgttcagcagcgagcccaggttcttctggatggactggtcgatggtggccgagaacagcagcgtctggcggcactcgggcgtggcgtccacgatggtggtgacgtcgggcaggaagcccatgtcgagcatgcggtcggcctcgtcgagcacgagcacctccacgcaggacaggttcaccacgccacgcttcatgaggtccttcaggcgcccgggcgtggcgatgagcacgtcggtaccgccgcgcagctccttaatttgggggccgtagggcgtcccgccgaacaccgtggtggtgaagtggccggtcttgcgcgagatttgcatgcacgtgcgggcgatctgctgggcgagctcgcgggtggggctcaccacgagcatgcgcggcgcgcggttgcggcccttcacgcgggggagcgtgctcagtacgggcagcaggaacgcggccgtcttgccggtgccggtgctggcggccgcgatgacgtcgcggccttccaggacgagcgggatggcctgctcctggacgggggtggggttctcgtagcccagcttctcaaccgccgcgagggcgttcttggacaggccgaggtcggcgaatttcgtcataagggtattccgtttctcttcgacgggcgtccgcctctgcggaaccgctccgtggccgcacccgctccagcggcgtgccttgcgcttgactcgagccgctttctgcatctgtgagcgtcatcagcgtgcgcaaaagagaaacaagaaagaatttcgtgcaaagcgacttaccagtatgggggtttgcggggcgcgcagcgacgggaatctcgcgaaaccgcccggttatgcgcgaaactccacaattggcggaggagggcgagtcgtatcaaaaaaatctcagttcgtggcttttccaacagattattccgaaataaatattattctcatattagtatatattttgaaggggaaaggggactatgacttcgaaacgttcgtcagcgggagcgatcgtcatcgcggtggcggtgatggttgtgctgttcttcggctcgttcatggtcgggcagtatcccatcgatccggtgggggttgtcgagatcattggggcccagctgttcggcttcgactgctcgcaaagcgacatggcccagaccattgtgtggaaagtgcgcctgcctcgcatctgcgccgcgctgctggtgggcgcagcgctctccattgccggcgccgtgtaccaagggcttttcaagaaccccatggtttcgcccgacatattgggtgcctcgtcgggtgcgggcttcggcgcggcgctggccatccttttgtcgcttccttatgcgttcatccaagtgaacgcattcgcgttcggcatcgtggccgtggggctggcctacttcgtgtgccagcgcgtcagccgtggcaaggatgccattctcatgttggtgctgggcggcatgatagtgtccaccctgttctcgtcgttcatcacgttgacgaagtacgtggccgatcctgatagcaagctgcccgagatcacgtactggctcatgggcagcctgtccacagtgaacctgcaagacatcttgttcttgctgccgccccttctcgtcggcatcgcacctttggccttcctgcgctggcagcttaacgccatggcgttcggcgacgaggaggcgcaggccatgggcttgaacgtgaagcggttgcgcgggctgttcatcctgtgcgcgacgctgctcacggcggcctcggtggccatcgccggcatgatagggtggatagggctcatcatcccgcatatggcccggttcatcgtgggaccgaactgcaaggtgctcctgcccatgtcgttcttggtgggcggcagcttcctcttgctggtggacaacgtggcgcgcaacctgttcaccgtcgagatcccgctgggcatcctcacgtccatcgttggcgcgccgttcttcttctacctactgctgaagagaaagaaggaacagctatgatcttggaggcacgcggcgtatgcgccgggtaccgcgacgtcgacatcgtgcacgacgtgagcttcgagctggagagcggggaggtgctgtgtctgctgggacctaacggcgtggggaagacgacgctgttcaagtcgcttctgggcttcattccattctcggcaggcgggctgtatgtgggcgggcgtgcggtggaccaccgtcgccggaaggagacggcctcgctcatcggctacgtgccgcaggtgcacgagccgccattcccattcgtggtcatcgatgtggtggtcatgggatccatcgcacgggccgatgcgttcgcgggaccggggcgcgacgcgttcgacgaagccgacgagctgctggagctgctgggcatagcgtatctgcgcaaccgtgtgtacaccgagatcagtggcggagagcggcaaatggtactcatcgcccgcgcgctcatgcagaacccgtcgttcctcatgatggacgagcctacgtccagtctggacttcggcaaccaaatgcgggtgctcgcgcagatctgcgcgctcgctcatcgcggcgtggggatcatcatgacgtcgcacttccccgaccatgcgttcctgtgctgcgacaaggctgcggtcatgagccgcacgagcccgtttcgcgtggcggacgtgggcgacatcgtgtgcgaggagactttggaggaggcgtacggcattcccgtgaaggtggcgtccatcgacgtgccggagcatcccgacgggacggtgaccacgtgcgtgccgctgttgaagacgaaggcgcattcgtgtccgtgcggggaagagggcttgttcggcgttgacgggagggtgcggtgatgagcggtaaggcgaacggcttcgtggcggcagacgcgccttgtagcttgcatgagctgatcgaggaaacgctgcacatcacctgctcagatggtctgatgcctaccgtgaggcgcttgtgtttcggcgcgcggtgggctgtagtggagctgtcggatggacgtgcggggcgtgcgttcacgttcaacgggcagcatgcggtgtatggggcgctcgacttcgagtacatgaggagcttgcagagcttaacgggcgtgtatgcggacgatgcggtggcgcagctattggacgagcacgtgtatggggctgtcgtcggggccgccgatgatgcggcgtaccgctcgcttcgccgcagcgtggcgctggcggttgcgaacgcgctttcgtgcgaggtgaatgcacccgaagcgctggctgagcgcggctttgtcgtctcggattcgtccgaccggtcgtttttccgccccgacgacgccgtggtgctggtgggcgcgggcatgctgctgcgggaggcgaccgccatgtgcgcctcgctcgacgtggtggacctgcgtcctcgtgctgcgctgcagagcgtgctcctggatgccgatggcgtgcgcacgggtccgggcacggtgcggttccatgacgtggagaacaccggggcgcttgtcgcgcaggccgatgtcgtgggtataacgggatgcgcgctggagaacgacagtctgttcgatgtcgcccgcctgccgcggcgcgcgcgggagttcgtggtgttcgggccgtccgcgcaagcgccgatggagttgttcgccgctctgggtgcaacgcgcgttgtggcaagccgcattgtggatgcggatgcccttatcgagggcatgctggaggccttcgacgccgccggaccgcgcagcgcgaccgaaggctatgtggtgaccatgcccgagcagggcagggagtaacgggaggaagggggcgccatgaatgggggatttcgcatgctgtcgaggagatgtttcgtccagctcattatggcggcgggcgcggtcacggtgggcgcggcggcgctgagcggttgctcgcagggcagtggggaagacggcgttggagcaggtgacggtgccaaacaaggcggtgcgggcacggtgaagatcgcgcgtccggctacggtgacggacgcgaagggccgcgaggtggcggtgccggaacgcatcgagcgcatcggcatcacgtgcatgggcggagcgctccaaacgatgagcgtgctgggtggggccgaccgcgtggtagtgacgccgtcgccggccaagtcctcgccgcttctgttggagatattcccgcagtacgaaagccttcccgacgccggtacgttcgatgacgtcaacatcgagaccattgccgctgccgagcccgacttcgtgttcgtgtccagcacgtcggacaagggcaacgcgcagatagaggatatcggcattgccacgtacacgctttcgacggcgaacgcatccgccgaatcgctgcgacaggaatatcaaaacgttggcgtgctgctgggtaccgaggacatcgcggccgagctcgtggggttctgggacgatttgatggggcgcgtggagaagggcgtgtccgctctgcccgagggcgagcggctcacggtgtaccgctgcgccgccgccatcacgaaggctagtcatacgccgtgggcctcgaattggatacgcacagcgggcggtgttcccgtggccgatgacggcacgacgggcgacgtgagcctggagaagattgccgcatgggaccctgatgtcatcagcacctcggcgaaggtggagggactgctgaacgatccgagcctgcagaagctgaaagccatcaaaaacggtgccgtgtacaagagtccgaagggttgcatgggctgggacacgccgtctcccgaggttcctctcgggttcgcgtggctggcgcagatgctctatcccgatcgtttcgaagatatcgacctcgagaaggaggcgaaaggcttctacgagaggttctaccactacgaccttactgacgagggctaccaggcattcttcaaataaacgccaacatgcggtcgcggggatagcctgcggtcgcgggaaagaaaggatgtgctaccgatggaccagaacatgaatctgctcacgcgccggcgtttcgtcgagctgctaatggcaaccggcgtcgttgctgtggggtcagctacgctcgggggttgtgcgcagggtggcgatgccggccagaagggcgatgccgcgaaggatgaggcggatgcaggggcgcaggccgaggcgtcgattgtcgtggacgcgaagggcaacgagttcgccatacccgacagtgtggagcgcatcgccatcacgtgcaatggcggcaccacccacgaggtggccatcttcggcgcggcggacaagatcgtggcacagccctccatgaagaagttcccgcagctgctgaagatgtatccgcagttcaacaacgtggtgaacgccggctcgttcgacgacctcaacattgaggccctggtggcaaccgagcccgacgtggcgctagtgggcgtgagctccgacaagggcaacgcgcagatcgccgaggtgggaatccccacctacgtcatgctcatcggatgggcggccatcgatacgctcaagcaggagttcctgaacgtgggcaagatcctcggcaacgaggagaaggcacaacggctggtcgaccactggaacgccacgctgggcgatttggagaagaaggttgcgaagatacctgcgggcgaccgcaaaaaggtgtattacctaagcggtgccgacatcacgaaggcgaacaccggcgactggggccgcacgtggatcgatgcgataggcgccgacttcgccgtgcccgagaccgacctcaacggcgacgtgaccgtggagaaggcgctcgaatgggatccggatatcatcgtcgtgcagggcggcagcaatctcgacgagctctacggcgccgagcaggtgcaggatctcaaggccatcaagaacaagcaggtattctccatccccatcggcggcttttggtgggatcgcccgagccccgaggcgacgctcggcttcttatggctggcccagacggtgtatcccgagtatatgggggacatcgacctggcggcagagaccaaggacttcttcaaggagttctacggctacgatctctccgacgacgagtacgtgtcgttcttctaagcgttccccttccttggaacggctccgggtgctgtgccgaagccgccgcagcgcccggggcgtaagcagctgcggggacgcgggaggcggctacgacaggcggtggagctcgaaatgcttgcgggagaaggtgaggtagccgtctttctggaggcggctcagctcgtgggaaagggcgctgcgctccacgtagagcgcgtcggcgagttcttgccgggtgtaggggatgtcgaatgcggagctgccgtggagcgcggcctggtcggatagataggcaagtactttctcgcgcgtggagcggttcgatatgatgcccagcttgcccagcaaatcggcgttcatctgcagggtgatgcgggccaggttctcgcggatgcggttgacgtgcaccatgcagcacggcttggcttccacatgccgctcgaggttgaactgcagcagcgtgcacgggctgctggcaacgacgtcggcaggcaaagggagatttagcttgaagaactgctcggctgcgagtaccgagccggcggcgtattcgcccaagatggagcggttgccccagtagtcgttgctcacaagctgggcgcgcccctcgcagaggtagccggtgctgcgctgtgcctcgccgcggcccaggatgcgctcgtgcttgctgaacgtggcgagcgtcgcattgaggcaggagagcacatggggaaccttttcggccggaacgccttcgaacagcgggaggttgacggggagggcggcaaggtcggacacggggcagctccttcggcttttggtggtaaaaccaactgaaattatcctggtttatgcattatcttacttcaaggattaatgagaggcaagattggctcgggatttcgcagggaagcgcacggagaagggacgggatgcgatgttgagaatcgcggtgtacggaaaaggcggcatcgggaagtcgacgacggtgtccaacctggcggccgtactggcgctgcggggctacacggtcatgcagatcgggtgcgacccgaaggccgactccacgtacgtgctcatgcacggcgagcgcattccctcggtgctcgatctcatgcggaaggcggcgaaccccacgcttgaggacgccgtgcaccgcggtttcgcaggcgtgctgtgcgtggaggcgggcgggccgacgccgggcacgggatgcgcggggcgcggtgtcattacggcgttcgagcagcttgccgcgctgcatgcctacgaggagctcgcgccggatatcgtgctgtacgacgtgctgggagatgtggtgtgcggcggcttctcgctgccgctgcgcggcgagcactccgacgtggtgtacgtggtcacgtcgggtgagatgatgtcgatgtatgcggcttcgaacatcgcgcaggcccttgagcggttcaaggcgcgcgactacgcgcgcttcggcggcctggtgctgaaccggcgcgacgtggcagatgagcgcgcactggtggagagtctggcagacgagctggggacgggcattgtggccgatgttcctcgctcgacagacgtccacgcgtgcgagcaggaaacgctcacggtgatcgaaggcgcccctgcaagcgcggcggcgcgtgcctatggggccctggccgatgccgtgctggacgaggcggggttgccccgcgcgaaggcgggaattgcaggggagccgagcgagaaggctgccgtgccaacgtcgaatgcgaaagcggccgctgcggtggcgcttgcggacgggcccaaggcggagggggacggccgtggcctctgacctgtcgtacttcatcccgcaccacggccgtcccaaggtgtcgctgcgcattccggagagcttcaacctgtatgtgtgccctccctcctgcgtgcggcgcgtgtcgatccgcgcactgcgcaacgacacgcgcggggcgatgggctttttgttcctcaccgaggccgacgtggccacaggcgcgtacgagcatgccgttgccgtggctgtcgccgaggcgctaacaacgctcgaacggcctccacgcgcgttcttcatccatctgaactgcatcgatgactttctcggcactgatgaggacgccctgctcgacgagctgcgcggacggtttccgggcttcggattcgccgtggtgcgcatgaaccccattgccgccgaccgggggctgtctacggggttgcgtatccatgataggctctacagcatgctggagccaacgccgcaccgcgacagcgcggtgaatcttgtgggcacgttcgccgatatcggagatgactgcgaactgttcggggtgatgcgggcctggggggtgcgcgaggtgcgccagctgttctcgtgtgcggacttcgaggcgtaccagcggttggcgtcaagccggctgaacgtggtgttggcgcatatcggctcgtatgcggcggcaaacatggagaggcgcctgggcattccgcgcgtcgacgcgccggtgtcctacgacttggacgaggtagggcagcagtaccgcgcgatcggctcggcgcttgggcgggccggcggggtggtcgatgggacgtgctcgcaagagggtcgggcgttcgaagggtgccaggcgccgggagtggcggccgatgacaaggcggcccatctgcttgcgcaggccgagggtgcggcacgggatgcgatcgcacatgcgcgcgaggttttgggcgacacgccggtcattgtggactcctctgccgccatgcgcccgttcgcgttggcgaaggcgttggcgggttacgggttctccgtgtgcgctgtgttcgcgttacatgagaaggacgatgatgccgaggagcgagcctgggttgccgcgcaggcgcccggcatcgccgtcgtgcgcggcgagagctacgagggcatcctcgatctggggctgcccgccgatgccgtgtgcatcggcttcgactgtgcctacctgctgaaggcgcggcgcttcgtggacgtgcagaaggacgagggcttgttcggataccaggctgtgcggcggctcatgcggctgatggaagccgcactcgacggcgatacggtttgggagtgatgcgctatggcccgattgtccctgttcctgccctcgttcgccgccgactactccggcgtgtgctcgtgcctgttcgatcttgatgccctggtggtggtggccgacgctgcgtgttgcacgcgcaactacatcgactacgacgagccgcgctggtcgcgcggcaagaccaccacgctgtgcgcgcaactgcgcactttggacgtggtcatgggcgacgaggccaagaccgtggcgaaggtggccgccgcggcgcgcgagctggagccgcgcatggtggcgctgctggggtcgccggtgccggccatcaccggcatggacttccgcggaatggcgcatgacatcgaagacgcgacgggcgtgccggcgctcggcttcgccaccacgggcttcgccacctatgagagcggcttggatctggcgcaccgggagctggcggagcggttcgggtccgcaggcgacgggatgctgcgcggcggcgacggacgtcctgcgcttgctcttccggccaggccgactgcggacaggcggccggaggggacgggcctgtgcgggctggcagcctctttggaacggccggccgtgaacgtgctcggactgacgccgctcgatttcggagggggtccgaatgcagaagacctgcgggaatgccttgatggcgccgggcttgcggtgaacgccacatggtgcatgggcttgtcgcttgaaggcgtggcgcaggtcgaaaaggcttcggtcaacctcgtggtttcggcgggggcgctcggggtcgcccgggttcttgagcgagcatacggcacgccgtatgtggtgggtcttcccctggcgggcgcgcaggccagcctcgtgtgcgaggcgctgcgccgggccgcatgtggcggcgcgtcgtcgtatgcgttcgcaggcggtttgcatgctgaaggcttcgatgcgggggcgctgccagagacttcgcgaattgcatttgacgcgcggatagatgcgtccgacgcagggggcgaggcggtactcgtagtgggcgactgggtgtgcgctgcctcggtgcgctcggcgctgcgtctttccggctggagcggccctgtgacggtggcgagcctgttcgggcagcgtcccggattcgccgagccaggcgacgttgccttggcgggcgatgccgacctagccgccctcgtggcacgcggcgggttctccgttgtggtgggagacccgctgctcgcccgtatccccggcgtgccgggtgcgcgccacgtgcggacggcgcacccggccgtatccagcgatcttttcgccaaggaggtgccacgctacttcgttgacgatatcgtgcggaggctctaggttcataccggcagacaacaaggaggacgacgatgaaattcgatcatgagaaggcgctgacgcgcgccgaggtgctgaaggcgctgaaagcgcgctgggagttcgagaagcgtaccgagcgcgtgccggtgggcgaggcatgcgggcgcgtgcttgcgcaggattgccatgcggcgtacgatctgccgcggcatcgcgtgtcgtcgttcgacggcatcgccgtgcgggcggccgactttgcgcagggcgtccccgacacctgcgaatgggtgcgtggcgtgcacttcacccaggccgataccggcgatgacttccccgacgagttcgacacgatcatagcggcggaggacgtgggatacgacgaggcagggcggctcatgctcaattctgccctcgaggtcaaggtgggcaacgctatcaagcgcgcgggcgccacgatgggcaagggcgagctgctctacgaggcgggcacgctgctcgggcccgaggccctggctattctggcggccggcggctgggccgaggtgcccgtggttgcgcgcttgaaggtggcctaccttcctaccggcacggagctggtgcccgtgggcactgtgcccgagcgtgggcagaacgtgcagacgaactcgcttatgctgggcgcctatttcgcgcgatggggcgcggagatgattgcctatgacatcgtggcggacgatcgcgcggccctgagcatcgccatcgaccgtgcgctggccgaggccgacgtggtgctggtcaacgggggttcgtcgcgcggctcggaagatttcaactcggagcttctgcaggagcgcgcgtcgtggttctcgcacggtgtgaaggcggttcccggacgtcccatcggcctggcagttatcgaaggcaagctggccatcaacgttcccggacctatgattgcggcatatctggcggccgactggctggtgaggggcctagtgtgccactactatggccagccgatgccgcagcgcgtgaaggtgcccgccgtgctcgatgcgccgctgggcgcccgccccggtttcgagcacctggcgcgtctcgtggctcatgacgtgggcggtgtgctgcatgcggcgccggttccgaactcggcaacgttggccgagaacattcgctcggtgaacgccttcttggccgtccctgccggcgtgcgttacgaggccggcgatgtggccgacatagagctgctgggcacgaaagcgaggtagagcggaggccgacgagcaccgcttagaagaaaaggctggaggtcgttgagggccccagccttttcctttttcgcatgtgcgatgttcttcgtgctgctccggcgtcgcgcgtggcgtcccggatcgtgtcgctgctgcgcatatgacaccctgtcatatgcagcgcgcctgttttgtgggatactggcagaggagtatgcgcgatgcgcgcggcgtttccattcggagcggttactgcgtccgggcgcggcgccgcgcttgggcaatgacgaggggaggggatgtgctcggcgaactggcggtgggctacctgttcctcggcgggaccggggccggggcgatcgcggtcgcgtccgtgctcgacctggctctcgtgcgcgcgcccttcgggacggatgcccgcgtgtccgcggacgaggcgccgccgtgcgagcgggtcgtcgccttcgccctgctcgccggctttgcgacgctcgcgctgggcgtgctgtgcctgctgttcgacctggggcgcatcgatcgggcgctcgacctgttcctgcggccgtcggctacgtatctgaccgtcggttcctttgcgctggccgcgctggtcgcatgcggggcgttcctcgcgctcgtgcggttcgcctacctgccgttcgcgccgcgtgcggcggtggttgccgttgaggcggttgccgtggcggtggggctggtggtcgtggcgtacacggggctcttgctgcaggggctgggggcggtggcgttgtggaggtcgccgctcatcccggcgctgttcgcgctgtcgtcgctgtcgtgcggtatcgccgtggtgctggcggcggcgtttttcgccgacccggacggggctgcggaccgtgtcgtgtccctgctcgtgagggcggacgtcgcgatcatcgtgctggaggccgtggcggccgcgctgttcgcgtgcctggcgctggcaagcgaccatccgggcgctgcggcgtcggcggcccagctggtgagcggcagcggggcgctggcgtggtggggcggtttcgtggcgtgcggcctggcggcacccctggccgtcgagctggcgctcgctgctcgcgtccatgttcgggcgcaggagcgggcccagcagccggcccttcgggcggccctcgccgtggcggcggtgctcgtgctggtgggcgggctcggcatgcgcggggccatcgtggacgcgggcatgcaccgcaacttggagcttgaagagccgagcgcgcaggcgcttagattggaatagaaatggcagacgacgtggccctgttcgagatcaacgagaagagcagcatccccatctggctgcagctgaagaaccggttcatctacctcatcacctcggggtactacaagccgggcgaccagctgcccacggtgcggggcctggccgccgacgtcgaggtgaactacaacaccgtgagcaaggtgtacatgagcctggagcaggacggctacatccagtcgaagcgccgccagggcgcgttcgtgctggacgtgagcggcaagccgggcgtgagcatatccaccacggccgagatcgtgacgcaggagtacctcaaacgctgcttcgagctgggcatgtcgctggaggacatcgaggagcagttcgcacagagcatgagcgacgagaagagcaagcgggacgcggccgtcggcgcgcgggcctgatcgcggaaaaggagcaagcatgggacgcagcaaacgtgccggtacgtcgcacggcggagcgcagggggcgccgggcgccgcgccggccgtggcgccgggcgcgcagttctcgacggccgggcacatcgacacgggaaggcgtcgcgcctcgcgcaacggcgccgtcgtgttcgccatcgtggttttcgcggttgcgttcggactggtgcttgccgcggcgcaggccctgctcggcggcataggcttgggcgcgctcgttgcggcggccatcgtgggatggctcgcttcgtcgtccatccacatcgtgctggaatgggagaaggccgtcgtgctgcgcctgggcaagttcaaccgcgtggcggggcctggcgtggtgttcacctggcccatcgtggaattctacacgctgcgcgtcgaccagcgcgtttcggccacgtacttcggcgccgaggagacgcttacgggcgacctcgtgcccatcaacgtggacgccgtggtgttctggatggtatggagcgcgaagagcgctgccgtggaggtggaggactacgcgtcggccgtgtcgtggatcgcccagacggccatgcgcaaggccatcgggcgcgccaccgtggccgaggtggccacgcgccgcgaccagctggacgaggagctgaaagaggccatcgaggagaagctcaacccctggggcatcacgatcatcgacgtggagatccgcgacatcgtgctgccgaaggagctgcaggaggccatggcgcaggaggccgtggccgagcgcaagaagagcgcccgcatggtgctggccgaggccgagaaggatatctccgagatgctcatggacgcatcagaggtgtacgccggcgacgccgacgccatgaagctgcgcaccatgcacctggcctacgagagcgtggagaagtccggcggcacgctcgtggtgccgagcgccttcagcgaggggttcgtgcccgacgcctccggaggggaaggcgggggagcgaagtagctggcgaattatcttccgaaaaatgctgtaagatacactttttggaaccaaaaaatgtaaatcgttacactttacggcatgtatgttatcatcttcctatcgagcgaaggagatgatggcatggagcgcaacgccctcggcgatcttgaggcatggaggcgggattcgcgtcggaagccgttgcttatgtacggcgcacgtcaagtggggaaaacctacctgctgaaggaattcggcgcgcgcaacttcgaggaggtggcctacttcgatctggagaagcaggcggacgctcgcgcagccttccaagggaacctcgcgcccgaaaccatcgtgtcgaatctttcccaagtgtcaggacggtctatcgatgtgtcgaggacgctcatagtgttcgatgaagtgcaggcttcgaatcgcgcgctcgcttcgctgaagtacttctacgaggatatgccggaagcgtgtgtcgtggcggccggaagccttttgggtgttgcggtgaatcgcgaaggctattccgcgcctgtcggcaaggtggacacttacaccctgcatcccatgaccttcgacgagttcttgcgtgcggtcggacagggggcccttgttgaagggattcggaacggttttgagcgcgacgagccgtatttcctccatgaacgagcactcgatctgtatcgcacgtatgtgctggttggagggatgcccgaagccgtgctcgtgtacgacgagacgaaggacttcaacgaggttgcggccgtgcagaacaacatcctcgacctctacgtggcggatatggccaaatacgcccaacctttcgagacggcgcgcattgtggaggcgtggagaagcatgcctgcccagctggcgaaggaaaacaagaaattccagtacaaaacggtacggtcgggcggtcgtgccagccagtacgagacggccctcgcttggttggagacggccgggctggtgaatcgctgcgtgcagatcgtctccgggcagttgcccctctcgcttcacgagaaccgggacgcgttcaagatgtaccttgccgacacgggcttgctttccgctcgcatgcaggtgcgcgctgccatgcttttcgacgaggaggggaggaaggagctcgacgcgggagcgctcgccgagaactatgtcgcccaggttctgacctcgcgagggttcgacctcttatactgggtgagccagggcaaggccgaagtcgatttcgtcatcgacgtcggtatgcagaaggccgtgcccatcgaggtgaagtcgtcgcgcaacgtgcggtcgaagagcctgtcggtgtaccgcgagaagtacgagcccccgtatgccatccggctatccaccaggaatttcggcttcgagggaggcgtgaagagtgttcctctctacgcagcgttctgccttcgacgttgatagctacagcccgtgcgcgcgcttgcgtcgcgcagcttcgcggtacacttcgtcgtcggttcgcatgccgatgacggtagtgttcggatgggatgccccccgttcgctcgaagtctcgcgtgcgtactgagccgaagcgctacttcgccgacccctcgagcttcgcgatggccgatgggcgggcatcgaagtgaagttgggcgaaaacaaggttcccgacggcgttgcgaatctcaatcgcctgcgcaggaaggtgctttcgaacccggccgcgcgcaatagggagccgtcgttcatggcggtcgtaaccgccagctcgccgtttgcgcgttacgatcgcgagaacgacgtatacgtgttccccataaccgcgcttcggccataagcgatcctgggcgtggagaagtccggcggcgcgcttgtggtgccgagcgccttcagcgagaggacgtagagggcgggtcgagaaggcagccaaggaaggccatcaagcgtagataatcgctcgctgtcacatgcttccgataccatgactgatcatatcatggtgtaaaaaccctgttcaattgatattattcgaaaaaaagaataatactttgtcatagcctgtcatacttctgtattgataatcatagtgacgtatggcagactatggcacggagggaatcggccgatttctgatatgaggggaaatctcggaaacgcaccgggtgcgcctgcgcctgccgtgcgatcgaaggggactgccgttcgcagaacgctcgccttcgtccgatgcgccccaaggcattctgcatcaagaatggaggaggagacatgtcggaaacgaagagcccgcatagcggactcacgcgtaggagcttcctgaagacgacgggcgccgctgcggcgacggcggtggtaggctccaacgcagccctgaccggtcttgccgagaccggcgaggctctggcggacgaggcggcccagggcgaaaccacgttcaggagccagtgtcgcggcaactgcggcagccgctgtccgttgaaggtgaccgtgcgcgaaggccgcgccgtcaaggttaccgcaatggaatacccgggcgaggacgcgcatcgccgccgcctgtgcgtcaagggcttcagccagccgcagcgcgtctacgacgccgaccgtttgaagtaccccctgaagcgcgtcggagagcgcggcgcgggcgaatgggagcgcatcgagtgggacgaggcgctcgagatcatcgccggcaagatgaagaccgctctggccgagcacggcggcacgtcgctgggcttctggtcttcctacggctcctacggctcgctgaacggcgccatgggcggcttcatgtccgttgcgtacggccgcttctgcacggccacgggcgcggtcatcttcggggcgggcgccgacacggcgcagcagcacgtgcagtccacgctgctcggcaacaagggcaacgacttcgccgacgcagtcaatgccaagaccatcatcacctggggcggcaaccctgcagaggcatacgtgcacgcatggcagtacgtgtgccaggcgcgcgagaagggcgcgaagctcatcaccatcgatccgcagttcacggcttccgccgcgcattccgacacctacgtgcccatcacccccggtaccgacggcgccatgatgctggccatggccaactacatcatcgagaacaacctgatggacgtcgcgtacatgaagagcagcacggtgtctccgttcctggtgaaggaggacggcacgtacctgcgcctgagcgatttcggcgtcgcccccacagagggtcccgtcaacccgcagaccggccagcccaccaagatcgatccggtcatggtgtgggacgaggcgacgggcgacaaggccccgcttccgaaggctgccgaccctgccgtcgagggctcgttcgagatcgagggcgttacgtacaagacggtgttccagaccgtcaaggacagcatcaaggactactccctcgccaaggcatcgggcatctgcggcgttcccgagagcacgatcgaggagctcgcgcgcatctacgccacggagggtcccgtttacgtcatgacgttccagggcctgggccatcacgcgaactcgcaccataactacaagaacctcgcgttcttggcagccttgaccggcaacgccggcaagccgggtgcggccatctgcggcaaccctgccccgttcagcatggttccctacaacacgaaggcgttcatggccggcaagcccggaccacgcatctgcggcatgtacctgcccgagatcgtggcgaacaagaagttcggccaagacgacatcgacctgcaggtgctgtggattcacaacggcaacgtgctttcctgcgagtccggccgccaggagcttatcgaagcggtgaagaagatcgacttcgtggtatgcgccgacgtgaacatgaacgactccgcgcagtgggccgacatcgtgcttcccgtgccgcatgccttcgagatggaggacgtcgacccggtcggctccacgccgttccctgcgtattatcaaaagggcctcgagccgctgtacgagtgcaagaccgacgtcgagatcatgcgccttctgtcccagaagatgggcatggagaagatctatgccaagagcgaccaggacttcctgcgcgacgtgtacaacacggacaccaacaagaaggccggcgtgagctacgacgacttcgccacgggcgagttcgtgcgcaaccccatgaccaagccggagaacctcgttccgacgtacggtcccgccgagggaacgcgcctgaagtactacatcgagaagccgaccccgcgtaacagcttcggccaggagatcgccgattacgagaagcttccctactacgagcatgcgaacgaggcgtacttggacaacccgctgcgcgagaagtacccgcttctgggctgcagcgagcacaacaagtaccacgtgcactcccagcttgccgcgacgccggttatccgcgagctcgagcccgagcccatgatcaagatcaatgccgccgatgccgccgctcgcggcatcgagcagggcgatctggtgcgtgcgtacaacgaccatgggtacgcggtcgtgaaggcgctggtaaccgagggcatcatgcccggcgtggtttcgatcccgcacggcttccaggcaacccagtacgtcgagggccacacgcaggacctgacgaacgtgttcatgaacgatttctgctcgaacagcgcattctacgacttcctgtgcgaagtcgagaagtactaaagggggtgcaagcatgcattacggaatggtaatcgacaccaagcgctgcgttggctgcaacgcgtgcacggtggcgtgcaaaatggcgaacaacgtgccccaggatattttctggacgcgtgcgcttactgacggcggcgacatgatggacaccccggccggggagttccccgacatctccatgcgctacatcacggtttcgtgccagcactgcgagaacccggcgtgcgcgaaggtgtgcccggtgggcgccacctacaaggacccggagaccggcgtggtgcgccaggactacgacaagtgcatcggctgccgcatgtgcatgtcggcctgcccctacacgggcgtgcgctcgttcaactgggaagagccccgctaccccatggacttcgccctgggcgacgcggacgctcccaagcaccagaagcatgtggtggagaagtgcatcttctgctaccagcgcctcgcgcgcggcgaaacccccgcctgcatggatctgtgccctgcgcgcgcccgccacttcggcgacctggacgatccgaattccgaggtttcccagctcatcaaggagcgttcgtacgagcagcttctgccgagcgagggtaccaagccgtccgtctactacctcgtgtaaggcgaaaggagaatcatgactgaaaacacttcggcggcccagtcgcccaaggctcctgctgccaagttcgggggcaaggggctcaacatcgccatcgtcgtggccggcctgcttaccgtcatgggcctggcgctgtggttcgtgcagctcaacggcggcatggtccagaccggcatgcgcaacctcgactcgtggggcctctacatcaccctgttcatgttcctggtgggcctgtcggccggcggcctgatcatctcgagcgcgccgcgcgtgctcggcgtggagggcttcggcggcatctcgaaggtggccgtgtggacgtccatctgctgcacggtgctcgccatcggcttcgtggtggttgacctgggccagccgctgcgcctgtgggagctgttcgcctactccaatctggggtcgcccctcatgtgggacatcgtcgtgctgggcacctacctgatcctgtcgatcgtgtacctgtgggccacgctgcgcttcgagggcggcaagggctcggctgcgtccctgcgcgtgatcagcgccattgcgctcgtgtgcgccatcctggtgcactccgtgaccgcctggatcttcggcctgcagcagggccgcgagatgtggaacacggcgcttctggccccgtggttcgtgtcctcggcgctcgtgtgcggcgtcgcgctcgtgctggtggtggtcatcgcgctgcgccgtgccggctatctggagctcgaccagtccttcgtcgtgaagatggccaagctcctgggcgtgttcgtgtgcgtcgacctgtacttcttcggctgcgaccttttgaccgagggtttccccggcgggcacggcacggagatcgtcgccatgctgaccacgggccagctcgccccgttcttctgggtcgaggtcgtcggctgcatcctgtgcgccgtcgtgtgcttcacgccgaagctgcgcacgaacccgcttatcgtggtggcgtcgctgctggccatcgcgggcatcttctgcaagcgcgtgcagctgctcgtgggcgggttccagatcccgaacctggactacgcgggccccgtttcgcagtacacggtgacgggctgggagtcgggcatggccggcgcctaccagggcatggtctactggccgaccatgctcgagttcggcgtggcgctcggggtgctgggcctgggcgcgctcctgctgctcgtgggcctgaagcacctgccgctcaagccgaccgagaagtcgcactaggtccgctctgaaggcaacgtgaattgggagcccgtctttcggcgggctccgacaggcgggtgcggctggtgcggccgcacccgcctgtcggatatacggttcgttccttggaaggggagctcatggacgatatggtttccgcccggcccacgctggccgcatggctcgaggaatatgccgccatcgagcgcgagttcgtcgatgcggtggctgccgaggggccggttttcgcgccgcgcgctgcaggtcgctcgcgtacggacgagctgcgggaggccttgcgcgagcgtggcgcgcgcttcatgaacggtggggccagcgtgtcgtccgggttcctgtcgagcgcatgcgccgcgtgcgtgggcggctgtggaagccgcacgttctacatcaacctgcggtgcaaccgggactgctacttctgcttcaaccccaaccaggccgacttcgaggagcactgcgcctgcgataccccgtggcgcgaggagctcgaggcgttcggtgccgcggtgccggaggtcacgcacatcggcctcacgggcggcgagcctttgctttgcagcgacgaggcgctggcgttcttcgcccgcgcccgcgagctctatccagccgcgcatctgcgcctctacacgtcgggcgcaggcctcgatgaggccttctgcgctgcggcggccgagcgcggactggacgaggtccgcttcagcgtgaagctggacgagggggagggctcggtcgaggaggtcctcagggccatcgcgctcacgcgccggttttccttcgacgtcatggtggagatgccggtggttccctccgagctcgggcgcatgaagctgctgctgcggcaactggacgaccttggcgtgcgcggcatcaacctgctggagctgtgctatccgtaccgcaactgggatgagtttgcccggcgcggcctcgcgctgaagaacccgcccttcgaggtgctctacgactacggctacgcgggcggcttggccgtggccggcagcgaggatgcgtgcctggagctcgtgctgttcgcgatggaggagggcctgtccctgggagtgcattactgctcgttggacaacaagaaccgcgagcaagtgctgcaggggaaccgtgccgccgcgctcgaccccgaggtctacgagctggccgacgactgtttctacctgacggcgaaggtgttcgacggcgatagggagaaggtcggcgcctacttggacggaatcggcgcgcgctacggcgtggaggacgactgcgtgtcgttccatcctgctcgcgtcgccgaggcggccgagctgggcgcccttcccgtcctctcgtggaacgttatcgaggggcagggcgccgatgcgtatgttcgcgagctgaagctccaggtagccgatggctcggggctgccgtggtgaggaagctggcgctgaccctgctcgcgttcgcgctggcgggtgggctggtgctggctgccggcgtcgcggccgagccggcgacgggggtgcatgcggtgatggccgagtcgccctgtccggtgacggggtgcgcgaacggcgcatgccatgggttcgacgacgtgccggagcccgacggcattaccgagatgacgtgtcccgaggcggggtgcgcgagcgtggagtgccatgcgtgggattccctgacgacgcgctaccatcaggcatcggatgcgagcttgaacctttggctgctcgcgccggtggcgctcgtggtagggctcgtgctgatcgtgcggaaggtggggtgagcgatggacaagaagaacctcgctatcgacgttgccgccctcgcggtcttcctggcggttgccaaccccgccctcacgggcatcggcgtccacgagtggctgggcctggggatgctcctggtattcttcgtccacgcgctgctgcacgcggactgggcggttgaggccttgcgggggtcgatcgcgcgcccgtcatggggctgcacgggcaatctggtgctggacgcgctgatcgtcgttgcgctcatggcggtgacggtgtcgggcatcatggtttccggagcggtcctgccgacgttcggatggtatgcgcagggctactatttttgggacccgctgcacgcgatgagcgcgaaggcgctcttggcgcttctgctggttcatgtcgtggtgcatgggaaatggctcgcgagagtcttcaagaagggggagaagcatggatgagatcgactgggcgacgagggcaacggcctgggagctggcggcgctgtccttccgctatccgggcccggagctcgagggcgccgtggcatccggcgagtgggcggaggcggcgcgcgagatagcgggggcgttgggcttggcgctgccggagggcttcggcgcgggcgcgtccgcggggggggggctgcgccccgaggccacgcgcctgttcgtgggcgcgcccgagcccgcggtctcgccctacgagggcgtgtggcgcgcggccgacgacggggtgcaggcgctcctgttcgtgaacccgcactccatggaggtggagcgcttcatgcgcgcgtgcggcctgggaaggcccgagggcaccaacgagccgctcgaccacgtggccacggagtgcgagctcatggagcacctggccctgcgcgccgccggcgcggagccgcccgagggagcgcctgccggcgccgacctccccggcggctcgcccgaggcggcctacggggccttcctcgaggggcacgcccgcgcctggatgccccgattcgccgacgctgtcgctgcggagagccgcgtccccttctaccgcgacgcggccgcgttcctcggcgcgctcgttgcacaataagcttccgtgctcccgacgattgccaaactggtagttttttgacagaacaaaacaggccaatgaacaggtaaaatacaatatattacctgttcattggcctgtcaaaaaacactcggtttggcaatcgccgcagcatctccaggatttcgcgttttgcttctcggcctacccgtcccagatgacgcacgagggctgggggatggcgatgcgcgcctcctcgcgaggtgcgcccgtggccgggtcgagggcgaatatgaccacctcgttgctgtcctggttcgccacggccaggtgccgcccctcgggggagagcgagaaatggcgcgggccgcgcccgccgcacgggcagtcggcgagcggggttgcggcgccgtcctggtcgatgccgaacagcgccaggcggtcgctgccgcgcacggacacgtacaggcaccgcccgtccggcgagaacgcgggatgcgccgccagtacgggatgcccggcgatggcctgggcatgcgcttcaccctccgacggcccgtccgccgatgacgcgacatgggtggacggcgcatcctgcccttcggccgcggtcgggagcgccaggtgccctgccagcctccagcccgtgtctgcccggtcgtaccggtacagcagcacgtcgttcgccagctcgtccaccagggccgccaggggcaggtggggatggaacgccagcatgcgcgggcccgagccgggcggcacgcgcacggtttccaccggcggggtctcgagcgttccggtggcctcggcccggtagagcgccacggtgtcgatccccaggtcaaccactgccagcaggttcgtgccgggcacgaagcatgccgagtgcacgtgcggcgagctctgccgcgcgcgattcggtccgcttcccgcatgacgcaccgacggcaggccgccgcaggggtttccgttggcgtcgagcaggcacagcctcaccgagccgcttgcgtagttcgcgccgtagaggcagcgcccgccgggatgcacggcggcgaagcaggtccctgcgtccgcggacgacgagcacgtgccccggcagcagagcgtcccatcctcggctgcctcgtaggcggccaggcagctgcggtcggccagctcgtgggctgcgtacagggtgctcgccgcgtttccgccgagcttcgtctgcgcgccggcctccgcgcccgcctgctcgccggtcggctgcgcgcgcacgaggtacgaggggttcggtgcatgcgttccggcgttcacgatgtgcaggcggcgcccgtcctcgtcgaatgccagcacgtagatgccctcgctcgcggtgccctcggtgtaggttcccacgaacaggcgccgcttcgccctcgctcgctccatggcgcagactcctttcatgcggtgccgctaaccgcgctcctgcgccagctcttcccggttcagcacgtggaagcgccggtagagccgaagcgtggccactcggttccatgcggtgatcaggggcccggtcatgaaggcggccactacggtgaacaccccgatgggcccgccggcgaagagggccaccacggtcacgaggatgtcctgggccatgcgcacgggcgtgtaggagaaccgcgtgcgcgccacgatcacgggcgccacggcgtcgatgggtgccacgcccatgcgggtcttcaggtagagcgacacgcccagcgtgaacagcagcgttccgatcaccaggtgcgcgcccgcgctcgcgaggcccgacggctgccacggcagcaggccgtacagccaggtgaagagctcgatcaaataccccacgaacaccatgttgatgatggtgcccaagcctatctgccacttgtcgagcgcgaacaccgccacgagtatcacgaggttcaccagcagctggaacgtgccgaagtccatgccgacgagcgcgctcagccccaggttcatggccgtgaacggatccacgcccacgttgcccacgcggcacacggtggtgcccagcgcgatgcataccacgccgatgcacgagaacagcagcttgcccttcaggttgtacgtgtggcgcaggtccatccaccgcgccatcagccgtcgccccgctcgaacgacgggtacagcgccatgcctccgtccacgaacaggctcgtgccggtgacgtagctcgactcgtccgatgcgagccaggctgcggcggcggccacctgctccaccgtgccgatgcggtgcatcgggatcatgcgctccgtctgggcgcgtgcctcggggtcttcgaacttctcggcgttgatgggcgtttcgatggcgcccggcgcgatgcagttcacgcggattccgaggtgcgcgtactcgagcgcgatggtctcgctgaacagcttcacgccgcccttgctggccgcgtagtgcgcgaacgtgggccagggaatgcgctcgtggacggatgacaggttgatgatgcagcctttccggtcctgctcgacgaagtgctcgagcgccgccttcgagcccaggaacacgccggtcatgttgacggcgagcgtcttctcccacacgtcgaggggcagctcgtgggtggggtggcgcgactcgatgccggcgttgttcacccatacgtcgatgccgccgaagtgctcgagcgcggcttcgcggagcttgagcgcaccgtcctcctgcgagatgtccgcctgtacgagcacgacgcgcgcggtttcgcccgatgcgttgaactcgtcggcgagtttctgggcctcgccgcggtgcttgtcgctgtggaagttgacgacgacgctcacgccctcctgcaagaatcgccgcgcgatgccgtggccgaggccgacggatgcgccggtgactacggcggtcttgccgttgaggtcgggatacatggtgtacctcctttgaaggggccgattcgcagaagtatggaggtgttcggcgccgcgcttgccttgcagagggggagcgtggcgctcttgtcacggcattgccacgcgcccggcaccggccgagggaaaccagccgagtgcggcgggtgggcgggtgggcggcggggtgacgtctccttctgccgtgccgccgctgcgctgctgggcgcgcttgtcgggtagggggcgcttattggccacagcctcgattctcgtccacatgatcgcaggctcttgaacagggaaattgatacgtttttcgcctgatcaagagtgtggacgagaatcgaggctatggcagcggcggggctgcccggcgatggtcggcggcgcttctgggtgattgacgggatgcgggcgcggggtcgccgttccgttacgatggtgctataatacctatgatttgttacattgcgacaaataagatgctgtcgggcgtgatgcgagcgccattcgcggcagtcggcgtgctcgtcgcaagagcgcatccgcggcggagggcgaccagcggtctgaggggccggcctgccgcgcctgcaggctgcacagggggtcgagatccgtatgttcaacctgctcacgacaggttatctgttcctcggcggagccggggcgggggcgctcgtcgtgctgggcgcgctcgaatgcgccaacgtgcggcgtcggttcgcgttccctccctcccgggctgcgcgcgtcgagcgggcgctcgcgctgcccgacgagttcttcgcacgcggctggcccgtgtgcttcgtggccctggcggcgggcatgctctgcctgctcgtggatctcggccgcccggagcgcctgctgaacctgctcacgtccccggagccgtcggccatcgccgtgggcgcctacgcgctggttctcgcgcttgcctgcgccggcgtgttctcgctggttgagctgctggacggggtgcgcgtccggcccgctgttgtgtggggagcggccgtggccggcgtggcggcggggctcgtggccgtggcgtacacgggcgtgctgctgcaggggttggcgtcggtgctgttctggcagacgccgcttctgccgatgctgttctcgctgtcctcgctgtcgtgcggcatcgcctgcgccttcctgggcgccgcgttcgtcgagacgcgtcggcccatcacgcgcccgctcgctcgcctggcgctcgtcgacggagtactgctggtgctggaggccctggtgatggctggctatctagcctgggcgtttgcaggagagggcacggcgctcgcagcgcaggcgctcgtcgcgggcgatctgcgctgggcgttctggggcggtgcggtcctgtgcggcctggcggctccgttcgcgctcgagcgctgcctcacgcacggcaacagccgcacgcagcttctgtggatcgcggcggcgcttctggcgggtgggttcgcgcttaggttctgcctcgtgggcgccggggcctacgatgcgacgcagctgcccggcctgctgttcggtttgacgataggatgagaggcaaagccatgagacgaagcaaagccgaccgcaccatgcgggacgccccctacgagctcaccgacaaggaggccgagatcagggccgccacctcgtacgtgccgcgcaagtcatcgcgcaacggcgcggtcatcttcagtatcgccgtgttcgtgatgacgggcgctgtcgtgctgggcgtcgccctcgtcgcgaccggcggcatcggcctcgctgccatcgtcgctgcgctgctcacggcgttgctcgtgctgtcctccacgcacattgcgctctcctgggagaaggtggtggtgctgcgcttcggcaagctggcacgcgtcgtggggccgggcctgtacttcaccattcccctcatcgagcacggcaccatccgcgtggaccagcgcaccatcgccacgccgttctacgccgagaagacgctcacggccgacctcgtgccggtgacggtggacgcggtgctgttctgggtggtgtgggatgccgagaaggcgtgcaccgaagtggaggactactacgccgccgtgtcgtttctcgcccagacggccatgcgcgaggctgtgggccgttcgaccgtggccgaggtggcgctgcgccgcgaccagctggatatcgagataaaggaggacattgagaaggaggcggccaactggggcgtcgacatcatctcggtgaaggtgcgcgacatcgtgatccccgacgagctgcaggaggccatgagcctggaggcccaggccgaccgcgagaagaacgcgcgcatgtccgtggccagcgtggagagcgacctggccgagatgctggccgaggccgcgcgcatctacggcgatcccgacgcggccctgaagctgcgcacgatgctcatgcagtacgacaccgtgaagaagtcaaagagcgccgtggtcacggtgccgagctcgttctcggacggcttcgccgacgccgcggacaaggccggtgccgacgggctcggcagggcgccgtcggacgcggtgaggggcggccggcaatgagcccggctatcggggcggcaaccgaaagccgtcccgccccggtgcggaacggagtgctcgaagaggcactggttcggggaaaagcggtggtcggcatggggattgaaccgtttacccgaggggcgtctctcatacggatcgttcgcccgcggcactcccgttgcggggattgcgcgaacgttgcaaggcctgcaacctgcggcaacgtggttctgttatgatgaaagctaaccgacaccgtgagagaaagccccatgagcccgcttgagtcgttcgaaatagattacagcagcggcctgcccgtatggatacaggtgaagaaccgcatcgcctatctcataggctcgggcgcctacgttccgggcgaccgcctgcccacggtgcgcgcgctggccgtggacctggacatcagctacaacacggtgaaccgcgcctacatggacctcgagcgcgagggctacatctccacccgcaagggcaggggaacattcgcggccgagcgccattccgtgggcgccgacctggctgcgaacagccccgtggagctgctggtggacgacatgatccgggcctgcgccaacgccggcctcgccgacgacgacatcatcgccatggtggccgcccgactggcgaacaagaaacttgcgcactaggcgcccgcccgcccgacgtgtcgttgccgatcgggggcaatagcgcgaaaacccttgaccgttcccgatcggtaatagtgttctcaagtcgctgggttcatcccgaacgggaacgcggtatgaatcgaatactctcggcaggtgactttggcgcgatcgttcgtgcgcgacggaaacagctcggttattcccagcaccagcttgatgctgtacaactatttgatcagcaattgcggcgcgcatcttaaaaactattcgcttgcctggactggctccaactccgtgcgctttgttccggcctatgatcttgtgtcgacagcggtgtacgacggtcggcgcggagccaaactgagtcgcagcatgggcctgcgcgtgggggaacatctgaatatcgacaaggtgaatgccgacgacttcgacctgcttgcgaaagagctgaggcagccagcttggcaggctgcggacgagcgtgcgcgcttgcgacatgagctgcccgatgcgctgcggcgtgcggcggagcaggcggtatgctcgggcttcggcgaggaagccgatgcattggccgaccgcatccttttcggcgccaaagttcgcatgaaggcgttcggctagcacatcgtagatgacccttctatctccttctatctccgatccggcatagtttattctattgattgtcgcaagacattgtgataatgtgacaatatcgagattggccaatacgaggattaacaagggggtatcccgaaggccaagcgaggggagcggaggtgcgcactacgttttcccgagcagctttctccagggtatcctgatgatctttgaggaggagatatgtcaggaaacgaacgcccacattctgggttcacgcgccgaagctttctcaagacgactgccgttgcggccggtctggccgcggtcggtaccgccgcaacgccgtcgctccaggccttggcggcaaattacgagtcaggtcaggatgaaacgaagagcgaacatgtattctgcggagtctgccgcggcaattgctctggcacttgcaagctcaacgtccatgttcgcgataacaaaatcgtaaagacttcaaagcgcaaattcaattcctttccgaacggcgagatcgataggatttgtctgcgtggtttaagtcacccctacaacgtttacggtccgaacaggatccaatatcccttgaggcgtgtcggagatcgaggcgcgggagagtgggagcgcatcagctgggatgaagctgtgactgaaattgctgaaaaatggcaggcgatacgagagaagtacggcgaccaggcaattgcttacacgcgaggatcgggcaatatgggaacgatcagcggcgttgcttctcccatgttcaatgttttcttcaataagatcaatgcaacgcagatcaagattgctcgtgatcaggcaaatacgcgtggcgtcaatcgcgttgtaggcagcctgggcgattgggttcttaatgatccttcggacttcaagaatgctaaaacgctatttgtctggggagccaatatcacagatgcccagatgcacgattggcatttcatagcggaagctcaagaatcaggtacgaagctggtggttatcgatccagttttaacgcaattagctgctaaagcagacaaatgggtgccgatacagccagcaaccgatgctgcgctcgcgttgtctatgatgtatgtgatggtgagtgaggagcttgagaacaggccgtttctcaaggagcacacgtgcgctccgtttctagtcagagaagatacagggaaattccttcgcatgagtgatcttggggtggagccgactgttatcgaggtaagcagagagcaggtttcggccgcctcaagttctaacaagggcgccgctgttggccagggttcgacgataacgaagattgtagaccagccggcggtgctcgaattcgacggaaagccggtcggagctgatgatgccaaggaccccaggctaagcggaacgtataactttaacggggtcacttgtcgtaccgcatacgatcttctcgttgccgatatcatggactattcaccggaagcggcctcgaagatatgcgatatccccgctgatactattatcgaactggcccatatggcggtggatggtccgtgcattcatcgactcggctggggatccaactcatacacgaatggcgtgcacgccgcccatgccaatataaccatggcggctttaacggggcaaataggttatccgggtgcgggtaccggtattggtgattttaaaccctgttggggcatcaatgctttggtaaagggcatggcggctgcaaaatatcccatgatatcggcgctgtttttgcccgaaataatgcgtactggtaagtataaaggacaggattatcctattaagtcgctctacgtttattcagggaaccccgtttgcaatcaagtaaacactaatgaatacctacgcgatattgtaggaaatctcgattttctcgtcgttgccgattatacgtttaccgatacggtcaagtatgccgacatcgttcttccagctgcgcattggttcgagcaacaagatgtgattgccatttcggccacgcaatgctttatctatagtgaaaaagcgattgatcctttgtacgagtcgaagtctgacttggatatccttcgcctatttgccgaaaagatgggccatcctgacttgctttctctttccgatgaccaatacatggcacaggtcatcaatacgccggctttggaaaagctaggtataacctgggaaaacgtgaaaaagaacgaagacatgtattggtatccaagcaagccttggataccgtgggagaatgccgaattcaaaactccttctgggcgaatggagttctatgtagagaatccgaccgttcagtttgatatggggcaagaattcgatgttgaacgcgaacacttgccgcggtatttcaatccgactgaggcgtaccaaggaagtcctgcctgggataaatacaagctcattcttttgagcgaacgtccaagattccgcgtgcattccatgtggtctgacaaccagtacctgcgcgagctcgaccccgagccgactatcaaaatgaatcccgtcgatgctggcgagcgcaatatagcagatggcgactatgtggaagtgtacaacgatcgcggccactgcgttgcgaaagccatccttaacgatgccgttcgtcccggatgtacggtgtacccgaaaagctggcagcaaaaccaattcaaagccggatcgtggtcggaattgctgacttcggtctacgatccagttggggtgaatgagagctatttcgacaatctggtcgagattcgtgtctggaatgaggggtgagcactgtggtaaaagaacggctcggaatgacgatagataccaagcgttgcatagcatgcaattcatgtgcagtcgcttgcaagatagaaaataatcttcctaacttcaattggtggaaccgggtgatgacggtcggcggcaatcacatggatgcaccttcagggatgtacccgaatcttgaaatgtacaacataacgcttgcctgtcagcattgcgaaaaccctgcgtgcgtgaaggtgtgtccggtaggggcgacttacaaggatgaggaaacgggagtcgtgcgtcaagactatgacaagtgtatcggttgtcgtatgtgcatggcggcctgcccttacacgggtgtgcgctcgttcaactgggaagagccgaggtatcatcttgaattctccgtcggagactccgatgtgcctgggcatcagaaacatgttgtagaaaaatgcaccatgtgctggcatcggcttgctaaggggttagcgcctgcatgcgttgaggcttgctctgcccgtgctcggcatttcggggatttaaacgatcctgactctgacgtctctcgccttattcgcgaacgcggataccagcaattgctgccggagcgcggaacggaaccgtccgtttactacctcgtttagcttggaaggagaactatcatgaccgaggatatttcggcgacaccatcgcctagagcttcgtcgcccaaggtccctgctgccaaattcgggggcaggggaatcaatatcggcatcgcggtcgctgccgtcgtgaccgtcgcgggcctcgccctgtgggtcgtgcagctctccggcggcctcgtgcagacggggatgcgcaacttcgactcgtgggggctctacatcaccctgttcatgttcctggtgggcctgtcggctggcggcctcatcatctcatcggtgccgcgcgcgttcggtatgaagggcttcggcggcatctcgaaggtggctgtgtggacgtccatctgctgcacggtgctcgccatcgccttcgtggtggtggacctggggcacccggcgcgattgtgggagctgttcgcgtactcgaacctcggctcgccgctcatgtgggacatcgtcgtgctgggcacctacctcgtcctttccatcgcgtacctgtgggccacgctgcgcttcgagggcggcaaggggtccgagaggtcgctgcgcgccatcagcgtggtcgcgcttgcgtgcgccatcctggtgcactcggtgacggcctggatcttcggcctgcagcagagccacgagatgtggtacacggcgcttctggccccgtggttcgtgtcctcggcgctcgtgtgcggcacctcgctcgtgctcgtggtggtcatcgcgctgcgccgggcgggctacctcgagctcgaccaggcgagcatcgtgaagctggcgaagatgctgggtgcgttcgtgctggtggacctgtacttcttcgcctgcgacctcctgaccgccggcttcccgaacgcctcgggcgcggaggtcgtcgccatgctgaccgctgggccgctcgcaccgttcttctggaccgaggtcgtgggctgcatcctctgcgccgtggtgtgcttcgtgccgaggctgcgcacgagcccgctcatcgtggtggcatcgctgctggccatcgtgggcatcttctgcaagcgcgtgcagctgctggtcggtggcttccagatcccgaacatcgacatggccggtcccctgacgccttacaccgtcaccggctgggagtccggcatggcgggcgcctaccagggtatggtctacttcccgacgccgctcgagttcggcgtggcgctgggcgtgatgggcctgggggcgctccttttgctggcgggactgaagttcctgccgctcaagcccgcgaagtaacgacgactgttcgttcgaagcgcgccgggtccgaccccctccctgcccggcgtgccttcgcagttcgacgggcgtctatcgtcgcttgcgcgttgtcgcgcggcaggctccccggattgaagggcgatggttttcatggtgagaaaacttgcggtgacgttgacggtgtttctgctggtaggcctctgcgtgttcggcgcaggactggcggtcgatgccgcggtgggcccgccgcaggcgataacggccgattccccctgcccggccgtcgggtgcgtctcgggggagtgccatgggttcgacaacgtgcccgcgcccgacggcgtccacgagatgagctgccccgaggcatcgtgctcgagcttggaatgccatgcatgggacacgttggcaacgcgctaccaccaggcgagcgacgcgagcctgaacctgtgggtgctcgcgccggtggtgctggtggtcggcctggtgctgatcgtgcggaagctttaggagggggctgtggacgccaggaaaaaccttgggatcgatgctctcgcgctggggatatacgcggttgcggccaatcccgccttcacgggtatcgcggtgcacgagtgggcagggctcgggcttgcggtcgtgtttgtggtgcatgcggccgcccatgccgattgggcggccgatgcggtgcgctcggcgtggggcgagccctcgtgggcgcgtacgggctacctcgtgctggacgcgcttatcgtggcgagctttatggtggtgacggtgtccggcctcatggtgtcgggcgcggttctgcaggcgttcggattgtatgcgcctggctattatttctgggacccgttgcacgcggttgcggcgaaggtcttgcttacgttgctgctggtgcacgtggtggtgcatgcacgatggatcgtgcgcatggtgaggaaggggaagggcgatggcgaacttgattgacgagccgaaggagtggcaggcccgcgcggccctgtgggagctggcggcgctgtccttccgctatccgggctcggagctggccgaggcggtggcatccggcgagtgggccgaggctgccgaggagctggcggcggtgctcggtctcgaggtacggggcggccgcgaggaggaggggccggggtgttccagctcggatgccctcctgggcgccctgcgccccgaggccacgcgcctgttcgtgggcgcgcccgcgcccgcggtctcgccctacgagggcgtgtggcgcgcggccgacgacggggtgcaggcgctcctgttcgtgaacccgcactccatggaggtggagcgcttcatgcgcgcgtgcggcctcgggcgcccggagggcacgaacgagccgctcgaccatgtggccaccgaatgcgagctcttggagcacctggccctgcgcgccgccggcgcggtgccgcccgagggagcgcccgccggcgccgacctccccggcggctcgcccgaggcggcctacgacgccttcctcgaggggcacgcccgcgcgtggatgccccgcttcgccgagcgcgtcgccgcgaagtcgcgcgtccccttctaccgcgacgcggccgcgctgctgggcgcgctcgtcgggtaggggaggccgctttcgggccacagccccgattctcgtccacgtggccgcaggtttctgaacaggcacgatgatgtgtttctcctgatcaggagtgtggacgagaatcgaggctgtggcagcggcggggctgcccggcgacggtcggcggcgcttctgggcgattggggggggcgctgctccgcgagcgcggccacccccgcctgcggctgccgcggccacccccgcctgcaacttccgctaacgcttctccatcgcgggtttgaagcaagcgagcgcccaggcgtcgtcgagcgcaaggccgatccgctcctccaatccctcgcggcgggcggtcagccagagcgcgtgccacccgaatgtgcgcccctgccgtccgcgcggcttcgggaaggccacccacagctcgccgcggcgggaaagcgcttcgcgtgcctcggctatgcgcgcgcggtactcgtccaggttcgtggcgaacagcaccgcgaagtcgtacggccctctggaggggaaggcgaccagctcctggccggccgccatggcgtggaactcgggcggggcgtacagcgcgacccctttcgcgccctcttccagatgcattttcttgaacacggtggactccatacgttcctccttccctcacgtgcctgacagttttcccggccagtctaacgcgagcgccgccccgccgcgtccatcgctgccgttctgcaacgtgcgcgtcgcccggccttcgcacgatgcgcacatggcacggttgcccaaaatgccctacaatagcctccatgattgtcttaggataatttgcatcgcgcagtgtcggcgatcggttcgacgcccgtcgcatcggggcgcggcacgctgtcggacacctccgcggcgggccatgcgctcgctgcgcggcgcgtctgacgcgcgtgcccaacgactgaaaagggaaggggtggctcgatgctcggtccgctgatcgtgtgctacctgttcctgggcgggacgggcgcgggcgcgtgcctcgtgctcgccgtgctggggatgctggcgccgcgcgagctcgttgcggtgcagggtgtcggcgggcgcggcgtcggccgcggcccggcgggcgcgcacgcggtgctgcggcccccggcgccctaccgcaggttgctggctcccggctatgcggcggcgctcgtggcgctcgcgctgggcatggtgtgcctgctggccgacgtgggccgtgccgaccgcctgcttctgctgctcaccagccctgcgctctcgcatgtggcggtgggcgcctggtcgctggtggtttgcgcggcgctggccgtgctggcggggcttgcttgggctggcctggcgcggcgctggcgcttcgcggcggtgcgggtgctgcaggcggcgctggcgttggcggcgctcgcagtcatgctgtacacggggctgctgctgcagagcctgaacgcggtgccgctgtgggccacaccgtggctgccggcgctgttcgtgctgtcgtcgctgtcgtgcggcatggcgctcgtgctggccgcggcccaactcaccggcgcggcgtctgcgttcgccacggtactcggccggctggctgccgtcgatgccgtcgtcatcatgctggaggcggtggtgctggccgcgttcgcgggcacggcgctcgcgggcatcggcggcgacttcctggtcgaccgcacggccgaggccctggcggcatcggccgaggccctggtggcgggcgaggcggcctggctgttctggggcgggttcgtgctggcggggcttgccgtgccgttcgcgctcgacgtggccttggcccggctgcggcgcccgcgcccggtgatcgccctcgtgacggcggcgtgtgtgctggctggcgggctcatcatgcggtactgcgtggtggaggcgggcatgcatccgctgcttgcgatggcgtcttgacgaagagaaggctggaggaacatgttcccgttcgaagttgataccacgaccgacgtgcccctgtgggtgcagctgcggcaacggctgatccatcttatcaacaccggctacttcaagccgggcgaccagctgcccacggtgcgcggtctggcgtccgagatatccatcaactacaacaccgtgaacaaggcgtacctgagcctggtctccgacgggtacctggagtccacgcgcgggcgcggcgtgttcgtgcggggcctcgatgccgatgtgggcgacgagcacgcccaggagatcgacgccatcctgggcgattgcgtggcgtcgtgccgcgatctggggctgacgctcgacgacgtgcagaagtgcatggcgcgcaagatcaagcagatgaagcgcgcagccggggaggagccggccggcgaggccggaggcggccgtatcgtggagatcgacgtgggctgcgttggccgcgcgtcgcagacgggagcgtgatggcattggcaaggagaagcggtgcgcagggcttcgcgcccgatacggcggcgttcgccggcaagggggcaccgccgcccgcccatcggcggtctttccaggtggtgcccgatgcgagcaccgaggtcgtgggcgagcgcgcctccaacgccggcgtgctgctgttctcggcggtggtgttcgccgtgtccttctgcgctgtgctgggcgcagcatgggttctcgccggcggcatcggcctcggcgcggtggttgccgccttggtggtggccgtgctcgccaccatgtcggtgcacatcgcgcagcagtgggagaaggtcgtggtgctgcgcctgggcaagttcaaccgcgtgtcgggcccgggcctgttctggacctggcccgttatcgagcagaacaccatgcgcgtggacggccgcgtgcgcgtgaccacgttcggcgccgaggaaacgctcacggccgacctggtgcccctcgacgtgaacgccgtcttgttctggcatgtttgggacgcgaaggccgcttgcaccgaggtgggcgacttcacgcgcgccgtggagctggctgcccagaccgcgctgcgcgacgccataggccgcgcgggcgccgccgaggtggccatccgccgcgagcagctcgaccgcgagctcaagcgcgtgctggaggagaaggtggccgcctggggcgtgaccatcctgtccgtggaggtgcgcgacatcctgctgccgaaagagctgcaagacgtcatgagcctggaggcccaggccgagcagcgcaagaaggcccggatcattctcatggaggccgaacaagacatctgcgagatgatggacgacatgggcgacacctacgcgaagaacgacgccgccctgcgcctgcgctcgatgcacctcctgtacgagagcgtgcgcgagacgggcggcaccgtcgtggtgccgagctcgttcagcgagggcttcggcgacgtgctgggcgacgcggcgaaggatgcgctaggcggaaaggcgggcagcgggaaagcatgagagaaccctgcgcaaaggatttccgctttttacattgatccaggtagacagctcatgcaaaagttgcaaaagtttgcaaaaaacgaaaaagtttgcaaaaatgatgctcgcaaggcccttctggaaaggtatagccatggtattgcacaaccctttcacaccctcgttcggcatcatcccgccctacatggcaggaagggaggatcttatcgaggagctttcgaacgccttttccaacggcctcggggatcccaatctttcgaccatcgtgtcgggcccgcgcggttcgggcaagaccgccctcctttcttttgtggccgaggaggcggcatcgcaaggatggatatccgccaacaccactgcggcgacaggaatgctcgaggacgttctcgaccaggcgaccgttgcggcgcgtgatttccttgactcgttggacggtaagaagctcaaaggtataaccatcggccagtttgtcggattcgagtgggataacgagaccccgcgttcgggcaattggcgcacgcagatgaacgcgcttctcgatcaacttgcggagcacgaggtgggcctgctcatcacggtcgacgaagtacgggtcgatctcgaggaaatgcggcaacttgcccgagtgtaccagcatttcgtgcgcgaaggccgcaaagtcgcccttctgatggcggggcttccccatgcagtgtcagctcttttaggcgacgaaagcgtgtcgtttcttcgcagggcgcgcaagcatgctcttggccgtattcccgataacgacgtgcgtgatgccatgagcatcaccatcgtgcagggcggtagggccatatcgccaacggcgctcgataccgccgtacgcgctgtcgatgggtttccctatatgatgcagcttgttggctatcgtatttgggcggagaggcctgcatccaaggagatatcgccagacgatgtcgcccgaggtgtggagcttgcccgtcgcgagatgatggaggggattctcgaatacacctatcgcgagctgtcgaagggggacaagcgctttttggccgccatgcttcccgatgccaaggacagctcccttgccgacatagccgagcgtatgggtgtgaagagcaattacgcctcccagtacaaacggcgtttgttggagcagggcgtgatcggcgagtatcaaaaaggatacgtgcgcttcgacatgccgtcgttcagggagtacctgcaaacgcagttggagggatagcatcctagatgccccagttgcgcgtcgaggatgatgtgctacgctgcggaggtagcagcctgacaattcaatgacctgcgcaatcaggaaaaactatgttaaaaatagaataatcatatgacaaattatcctatgacaatcattgattgtcataggataatttcgtatagtgaagccgagggaatttggccaattctcacgagaagcagggggatattctcgcatggggcttgtcggctggggcgctaagctcgcttggcaggcaaagcggggatatcttgacgacatcttcgaggaggatccatgtcaggaaccagaagcccgcgaagcgggctcacgagaaggggttttctcaaggcgacgggtgctgcggcaggcgcgttgggccttgcaggcgctgccggcatgaccacggccgacagctggctcgcaccggcgcaggcgcatgccgaacccgaggagcgggtggggtatacgttccactatcgccactgccaatgcaactgccatttgaagtgcacggttcgcgacggacgcatggttttggtcgagccgaacgaatggcccgacaagcgcaacgaaaccatctgcctgaagggcatttccgagattcagcatacgtacagcaaagagcgcctgcaggttccgctcaagcgcgtgggcgagcgtggtgcgggcgagtttgtcgagattacctgggatgaggcgctcgacaccattgccgaaaaggtgaaggagacccaggagaaatatgggccggaggccattgccatccaaacggccgttgactcgctcaccacgttccttcctaaactgctcaagggccaggagaaaccccaccgcgggatcgatatcgggctgggcaatggcttctccccggcgcttgccgaatcaggtcagcagggggcctcgtcgaacgaggtgaccgattggaagaacgccaagaccatcctgaacgtgggatgcaacatgctggagacatgcatggtaaccgcgcgctacttcttcgaggcaaaggaggcgggagccgagatcattacgctcgatcccaacttctgcacgactgccgagaagagcacgcgatggattcccatggtcgccggagccgatccggcactctacttgggcatgatctcgatcatcttggacaacgagtggtacaacgccccgtacctgaaagccaacacgagcatgccgttcctcgtgaagcgttccgatgggtcgctgctgcgtaaaaaccctgccggcgatatcaagcagcccggctccgacaatcctttcatggtgtgggatgaggctgcaggatccttggccgcctataataccgaaggcgtgaaccctgcgcttgaatatgaggcgactgtcgacggagaggcgtatgccacggttttcaagctgctgaaagagggccaaaagcagtacacatcctcttgggctgccgaaacgacgggcataggcgaagacgtgctcgttgagatcaccgataagtatgcgaaccatggcccttcgatcctctcctttggcttcggcggtggggagaagttctacaatgctgacgtcgcaggtcatgcggcagtgctgctggctacgctcgtcggctcgttcggaaccggcattcccggatggggagcgggcgcgtacgtgaacgcgtaccagaagatatttggtacgggcaagctggcctcgtggccgttgccgacggagtgcaagaccgcctcggcaccgaaggcgagcgtcgactaccgcgacgagaaaagcggcatccgcttcatgtgggtgcagaacggcgcgttccaacagatcgccggcaaccagaatcgcacgaacgagtgggcgaagaccctcgatttcgttgtcgtgcaggacatctggcatacgccttcggtggattgggccgatatcgttttgccggtgtgctcccacttcgaagtggacgaggagatcggcttcgtgcgcgccctgcgcggccatgtccttctgcagcagaaggtactcgaccccctgttcgagagcaagacggatttctggatcgatcgcgagatggccaagcgtctgggatacggggatgcgcttcccaagagccaggaggagctgacgcgcttccagttggaaaaggcgaccgacaaggcgctcgccggcatcaccctcgacgaggtcgtatcgcacaacggcgtggtcgcgctgaagaaccaaccggatatcgcgcgcagctacggcaaccagacctacaagacgacatcgggcaagatcgacctgtactacgagaacctggtggaatacggccaagctcttccccaatacgaagcgcctcatgaagcgttcgagggcaaccccctgcgggacacatatccgcttgtcatgacgcagcgtcgctccaaatacttcatccaccagaacctcatggacgcctcgtggctgcgccagcattacgagccgacgctcgagatgaaccccgtcgacatggaggcgcgcggcctggagtccggtgacgtgatcgaggcgttcaacgatcgtgggtcgttccaatgcgcgtgtgttgccaccgaggcggtgcgtccggggacgacggtcatcgtcgagggcatttggagcaagtatatgactgccggcgatttgcagaacgttaccaacgacgctgcgaacccccgtggaaaagcgctcgccaaggggagggttactcccttcaacgacacgcttatcgaagtgaagaaagcataggtgatcctcatgacgcgattggctattgccatcaacctggatcgttgcacggggtgcaacacctgcgccatggcgtgcaagatgcagaacaacgttcccatgggcatggcttggaaccgcgtgctcaacgaagaatgtgagttcgaggtgggcgtgcagggtacgtatccccatgtctcgcgcgcgcatctgcccgttgcctgccagcattgcgagaacccggcatgcctgcgcgtgtgtcccacgggtgccacgtacaaggacgacaagggccgcgtggagatcgactacgacaagtgcatcggctgccgcatgtgcatggcggcatgcccgtacaacgcgcgtgtcttcaactggagcgagccggtgcgcgaccccgacttcaactacggtgacagggatgtgccggtgcggggaaagggtgttgtggagaagtgcacgctctgcaaggagcgcaccgaccgcggcgacgagcccatgtgcgtgaaatgctgccttgccaaagcgcgcgtcttcggcgacctcgacgatcccgagagcgagatctcgcgtgtcattcgcgagcgcaatgcgaccgtcctgcttcccgagcagggaacccgcccgcaagtccgttacttcaactaaggaggaggtgcgaaccatgcaaacctctacgaaaaccaaagccgcaatcggcgtgctcggcgcgctgacggcggtgggagtcgccgcctggatctaccagctcatgggcggcctcggcgtgaccggcatgaacaacggcacgtcgtggggcctctacatcaccatgttcatgttcttcgtgggcctctccgccggcggcctgatcgtggcatcgtccgccagcgtgttccacgtggcagactacaagaaggtggcgcttcccgccgtcatcctgtccacggtgtgcatctgctgcgccggcatgttcgtgctcatcgacctcggcggcatccagcgcgtgtggcgcatcgtcacggggccgaatccgacgtcgccgctgttctgggacatctgcgtcatcacgctgtacctcgtcatcaacatcgtgtatctgcgcttcatgacgtcgaagaagccgggcgcgcaggacaaggtggccatcgtgtcgcgcttcgcgcttcccgtcgctatcctcgtgcactccgtgacggcgtggatcttcggcctcgagatggcgcgcgagggctggtactcggccatcatggcgcccttgttcgtggtgtcggctatggactccggcctggcgctgctcatactgtcgctcatggggctcaacaagtccggccgcttcaaaaccgacaagaagctgctgtcgaacctcgccgggctcttggcggtctgcatcgccgtcgatggctttctcgtgggctgcgaggtcctgaccatggcctatccgggcgccgccggcgccgagacgctcgccgtcatggcgacgggcgccaccgccccgttcttctggttcgagatcgtcgtgggcattctcatcccgttctgcatcctcgtgtttgtgaagaaccgcgcgcgcatggggctggtggctgccgccagcgcgtgcgtggtggcgggcgtgttcttcaagcgcgtgtggctgctgctcacctcgttcgtcgagttcaatgtgatgggcgcccccggtgtgtcgctcggcacgacggcggcgcagcagggcggcaccggcatgtgggcccttgccggctcgtatacccccacctgggtggagatcgtcgtcgccatcggcgtggtgtccctcggcgtcctcgcgttcgtcgtgctggcgcagaagctgctgcccgggcgcgcggaggcgtgcgaagccgtcaacgttgcagcgggagaggccgcgtaggcgcctcgtgctgaaaggagttttagcatgtgcaaggacattccctggaaaaccctgtccgaggcctatgcgtttgtggggaactcgctgttgaagcctatgacgatgacgttgacggtaggtttggatccggcattctgggaggcgtttcccgcgttcgacggcgccgtggcccaggccggggaagtttgcgcatgctatgccgaagaggccgggcgtcgcgccgagggaggcgaggacgggccgcagcgcgcatcggtggaatacacgcggctgttcgtcggcccgccctcgcccgcggcggcgccgtgggagacgatgtaccgcggcaaggatgtcacggtggggttcggtcaggccacgttcgagatgcgcgagttgctgcgcgaggccggccttgaggtgaggaacgctaacaaccagtacgaggatcacatgggcatcgagcttctgtacctttcggagctatgccgtcgcgaggccacgggggagggcgctaccgagtcggcggacatcgccgcattcatcgagcagcatccgctggcgtggatcgagccgttcctcgatcgcgtgtccgaagcggctcccaacggctacttcgcgggcttgctcctggtggcgcaacgggttctcgagcaccatgcgaggcttctcgcgcgctagcgctcggactggtgtagccgactcaacctttgaagctgccgttttacatcatgcgcgtcgcttggttttcgcgcgctaaacgcagagaagcccggcgggcaatgcctgccgggcttctctgcattcttgtgggttgcgggccgcttagaacaggaacgccccgtccacggtcatggagatgcagttgccgttgggctcgcatatcaggcgcacgttcgcagtggtcggcgtgacgccgtcggcccccaggatggacacgtcgttcacatactcgtagccgccgccttcctggggcgtcacggtggcggtggaggtgtcgacgctttggaacgtgtagaacgtgttgttggtgaacagcgagggcatctcggcctcgagggcggccacggcctgcttctgcgcctcggcggccgcgtcattcttcggctcctgcttcttcggctcgtccgtctcggctggctgggtgccttcgttccctccctcctggtcgggctgcacggcgggcagcgtgaggtcccacgtgccctcggtggcgccgtcgttccagaacaggcgctcggagccgtaccggtcgtcgaacgtgagcgtgcccgacgcctcctcgccagccggcacggcgatgatgccgtcttcgaacgacgagtccaccggcggcatgccgaacgacagcaggcagtcggccctgagcgtctgcggcagcgtgtggctcctcacggtcacatgtgcggtgagcttgccgtcggcgcgctcgacggacgccaccgttacctcgtagtcgcgccagacggccgtctcgcctatggccagggccttcagcttctcggcatcggtgagcgtgtagctgtagctgctggaggcggctgcggagctgccgtctgccggcacattgggctcctcgacttccgagttgcatcccgacagcatgagcgttgcggctacgacgcaggccgcggtagcgagagccatctttttgttcacaacgtaccccttcgtcaagagcgagcaggcgggcggacgcggacgccctgtaggccgacgcatgcgtttgcggggcgtcgtgccagccgttttcggttgagccgtatcataccagttcgtaaaagtttcgtgcgcctctcatcgaaagtgcatggagcccgtcttcgaagacgtcttggcaggctcacggggcgttttgggctgcgggcttgcaaggtgccggtatagcaacccggatgaacggcctcgcatgcatgaaaccggctcgaagggacgaagcggctgcttcggcgggttctcgtgggcgagatcggagcccatggcatggttttcgcgcggaatcaagcagtcggggtctcgtgaacaggcgcttctccgaaacagctcgcgcgcgggcgctgaaaacaagctatgggctgcgatctcgtccctgtgccaattggtcatggtatagccgaacggcagagaagctggcaagggacccgcccgagcgtcctgcccggccgatgcaagcgcccccatgccctctgcatggcctttcggcttccagcggccgcaagagcatcgcgcccgtgcgtcttgaggtccggtgatccgcaagcgcgccgttcttccgctccgccccgcctttcctgcattccgctcgggcgttcggctccggcggctgcggggccgcgccctgtgcgcaccctgcccggtccccggcctcccgattcccggccccgcatgggcgcgccttcctcccgcttgacctccgacggcaaaatggcgagactgtgcagcgcaggaaggactccacgggaaggcgcgcatggacattgcggaactcataggctcggcgttcgcggacgggcaggtgctcacggtgccgtggggcatcgactacttctccgtggtggtgggcgtgctcaccggcgcgctgttcgcgtgcgaccgcaagctggatatcatcggcacggtggtgctgggcctggtcacgggctacggcggcggcattatccgcgatgtgctgctgcaggacaagggcgtgtacttcacgtcgcaccccgaccttatcctgctgtgcatcgtgctgtgcgtgttcgtgttctacttccgcgggctgttcaagcacctcgacgccatggtgttcttcgccgacgcgctgtcggtgggcctgttcgcgctcgcgggcgcgtcgaaggcctacgcctgtggcgagggcttcgtgctcaccgtcatcctgggcgccatcacggccgtgggcggcggcgctgtgcgcgacatctgcgtgggcgagacgcccggcatcttccagcagtcgaacttctatgcggtggcgggcctgggaggcgcgctgctgttcaccgtgctggcctatgcgggcgtgccgctcgtggtggccggcatcgcctgcgtgttcacggtgggcttcctgcgctattggagcgtgtacttcgactggaagacccgcaacgaggccgacctcaccccgcatgtggcgcgcggcgtgggcaaggcgaagcgcgtggtgtcgggcgtgttcctgcagggcggcgaccgcatctcggtgcggcggcagcgcaggcgctcgcgcgtgcggaagggggatggccagggcgcggctagggaggcgacttgcgaggacgaaggtcccgaggatgcggatcgccgcagcggcgcgcgcaaggatgcggatgggggagacggcgcgagctgatgtgccggacgccgggaaggtggacgtgagggcgagaggtgcggccaagcaggctgtcgcgaagcgttaggcggttccgcgtcgcgctgaatgtgcggaaacgatgtcgaaaacatcaccctatgggttactgatgaaaaattcggggggggggggggcattttttgccttgacactatgctagtatggtgctctcaattaaggcggcggtacgccgcaggttgcgatggaggcgaaagctggcgatatggggaacctggcgttcttgctagttgacaagactcgagagttcgtggaggcctgctacgagcgaggagacctcgacgcggcgctggcttgcctcgaccctgtccgtacgacctgctacggttacgccagcgagctccatgccttcgacaccgatgccgtcgctcggctccttgatgcctcttgcgcgttcgcgcgccgtatcgggtcgcgcatcgtatcccatgaatgccacctctcctatcgcaacgagtcatgcgccatcgtgctgtcgaacctgcgtacgcgggcgacgaagggcgacgcgggcgacgggccttcccgcgacgagtatgtgcgccgcctgacgttcgtgtatgcccccgacggtgacgactggcgcatcgtccacatgcacagctcggctcccgatgcaccgcacaacccgcttgcttcgcgcaggatgaccgcgcgcgacgtgggcgcgctcgacctcgatgccgtgctgtcgcaggccaaggtcgagcgggagcgctacgagatcgtctccgagctgtcggacgacgtcatctacgaatacgatgtggcgctcgacacgctgtacctgttctcgacccgcttcggggcgaccccggacatcaggcgcaacaagatcgtggtggagcactgcctggacacgctcaaccccgagggcttcgtgcatcccgacgaccgggagcgctatgccgccgacgcgcatatgctgtcgcaggcccagcccgagcccggcacggagcacgacgcctacgcctacgtgtaccgccttcgccccgtgttcttcttcggcggctacaagggcgagcgggaggggtacgtgcaccagcgcgttatgggccgccgcatctacgacgccgaggggcggctcgtgaggtacgtgggcaagatcgtggacgtgtccgaggagtacgagctgctggagcaatcctcaatcgacgcgcttaccaaggcatacaaccgttcttacctgcagggccgtctgcgcgagtactgctcctccaagcagcccgacgtgtcctacgcgtgccttctggccgacgtggactacttcaagtcggtcaacgaccagttcggccacctggtgggcgacaacctgctcacggcgttcgtcgacaccgcccgcacgcttttccgatcgagcgacatcgtggcgcgcctggggggcgacgagctcatggtgctcatgcgcgacgtgtacgacccgcgcgttgccatggagcgctcggaggccctcatcggcgcgttccgcgccatggcggccgaccgcggtttcccgcatgacgtcagcctcagcgtgggcgtggtggtggagcgggatccgcatccgttctccgagctgtaccgccgggccgacatcgcgctctaccgggcgaaggccgaggggaagaaccgcgccgtttcctacctggagggcatggcgtatccggagggcgggaccttggcgaagccggtgcctccgaaccccccgatgccctcgccgggcgattgacgcagtttttatcgaagccccgcgcgtgctgcgtgccgcgtggtacactttccgcttgacatcgaacccgaaacgcgcagcgccggccccgtgccgcctgcggaaagcgattcccatggcagattacatcgagggcaaacgccccatcatcgaggcgctgcgcacgcaggtgcccatcaagcgcatcctgctggccgacaatgcgaagcgcgacggcctggtggaggacatcctgcgcaaggcgaagcatttcgacgtgaccgtgaccacggtgccgcgtaagacgctggacgacaagtccgagcgcggcagccaccagggcgtcatggcggagaccaagccgcacgcctacgtggacatcaccgagatcgagcgggctgccgaggtttatgccgaggagaacgggggccgcgcgctcgtggtcatcctcgaccacctcaccgacgccggcaacctgggcgccatcgcccgcagcgccgaggccgtgggcgcgtgcggcctggtcattcccaacaagcgcagcgcgaaggtggatgcctccacctacaagagctcggcgggcgccatcgcgcacatgcccgtggcacaggtgccgaacctcgtgcaggtcatggcgcgcctcaaagagcgcggcttctgggtggcgggagccagcgagcaggcagacgacgtgatctggtgctcgaacctgaaaggcaagatcgccctcgtcatggggaacgaatccgagggcctgtcccgcgtggtgaaggagagctgcgacttcctggtgaagctgccccagatgggcgaggtggcctccctgaacgtggcgcaggcctccaccgcctgcatgtacgagtggctcaggcagaactactagagtaccggcggcctgccggccgccggaacgcagccgacatgctgcgccgcgaagcaagtccccgaagggggcggccggccgtggcacccggccttcgcacgatcccggggggctcgcgtaccgaagtacgcttcgcccccgcgatcccgcgaattccgggcaccacggccgccctcgctgacttactgcgccaacctgggcggttcggcaacaggaccagcgcggtaaagttcgcgctccgcgcgaatcggatggaagctaacgggagtcgagagcattgcccaagcaacgcaaaaggctgctgctgttcgatggctgcaattatcgccccctcctattttcaaaccccctgttcagggggctttttcatttttagggcgtggaaacctcgcaaccccatggctcaagttccgacccaaagccgactaaacccatgggcgaaccacggaagggcccccgatcgagttgtgtttttctctccatatggaccgtttatggagaaaagcgccttcgtttgccgttaatcgcgcaacccgcgcgttgaaactccccctcagtgggcataaagacccccaggccgccgcagccggcggcttaacctccgagacggatggcttgggaaggaaggagccggggtttggaaacggtcaacagggtcgtggtatcggggctcgtgttcgggcccgtggagttcacggagccggacaggggacccgcgcacgcgcgcttctgcctgtctcaggagaaggcggcgggctcgcgccgcgtggagcataggttccgctgcgtcgcgttcggcccggtggcgatggccgtggcggcctccctcgcgcccggcgtcgccgtggtgctcgagggggagctggccgaggcgagggcggcgtcctttctcgacggacggccgcgcagggccgaggccggcgggcagagcgagatcaaggtatcgactttcctcaaggtcgacgcgcgctgattcaggcacgggtccaaacggcctgtgcctttttcatcccgcacatcagcatacatacgcatgtacgcatatgcgcatatgcgcaaccgtacattttcgtttttgcgcatttgtgcgattacgcatctgcacatctgggtagatacagacacaggatgcgggcgcaggctcgcgatggatgaccatggagggatggcatatgggaaggaaagattccgccgggaatcaggccggcacggcgaggatgacggtcggcgataggttctgggcgcggcgtatccgcccgatcttcgacgacggcgacctcacgctcgagcagaagtcggtcttctgctgcatcgtggcgcgcgatcccatgtcggtggcgatcgagtgcccggcgcgcgacatcgcggcggccgaggccggcctgccgcgccgcgactacgacgaggcgctggccgcgctcgagcgcggcggctacatcgtcgacatcgtgacgccctacggcgaggaccgggacggggagctctgcatggtcccgatccccgccgaggtcgtgcgggagggggtgcagcgccgtgagtagcgcaaaggagcgcggcatggcggcacagcccgccggccgcacccgcgacgagctcgacgagacgttcgagatcctggaccgcgacggcgcggtcgtcgtcttcggcggcgacctcatggagcgcggcttcggcatcgtctcggccaaggcgaccgaggacacccgcctgtcgtcgtcggccaagggcgtctacgcctacttctgcgcccatgccggcgcgggcacccattcgctgttcccgtccgtggacacgatctgcacccacctcgcgatgtcgcgcaacacctactaccgccaccgccgaaccctggtcgagtgcggctacatcagcgtgcaccagggtcgcgcgcagggccaagggcgctatctctcgaaccgctacgtggtcaatgccgagatccccgaggagcgccgtttcgtgcctgtcgataactcgaaatcgactggggcgggcgctgttgaaaacttgccgggggagggggtcgaaaacgaagttatcaacaacccgcaggattcaccgtgtaccaaaaattggtacacgggcgaccaaactaacgttagtttgcaactagattcaccgtgtaccaaaaattggtacacgggcccaactggggaaacgatttcaccgtgtaccaatttttgcgacactaacaaggatgttgttattgatgttagtgggagagggcgcgcgggcgcgctgccgtctgtcgaaaactcggcggtgtcgaaggccgcgggcgactcggtcacggtcgtgaaggtcgcatcggaggccggccttgggctcgagacggaggtctcggtctccaacgccgaggtgcttgccctcatgcgcatgtccatcggcaaggcggaggtcttcgccgacgtcgccgaggcttatgcccgcgcgctggcggacggctggacgctccctcgcatcggtcgcgcctacgacacataccgccgcgagtacgcggcatcgcacaccgacggccgctacatcatgtcgctgcccaagttcctcgccgccggaaacggcctgaggttctacgacctgagggccgatctcgtcgattccggcgccgtggccgcagccgaggagaaggccgccccgtcgaaggcgccgacccgcgagcaggtccgaaagtacgtgcacgagaagggctacgacgcccccgacccggacaaccccgcctaccgcgtgatcgaccccgatgagttcttcgactactacgaggccaccggctgggtccgcgcgggcggcgtgccgatcgtccgatggaagaacgtcgtgaacacctggcgccgcaagcccgcgccgcgctccgcccgtaagtccggcccgtctggcgcgaagagggccatgagcgtcgccgagcgcgtggccgccgacagcgacttcagcgacttcaacgacgattagctcagacggagggagaaccgagatgaacgacacgcaagcgcaggcgaggccgaaaaggcccgcgctcgaggaagtcgaggcctacgtccgcgggaagggctacgacgaccgcggctccgccaacgccttctacggcaacttcttctacgcataccacgatgcccgcgcctggcggcgcgcggacggcacgccggtgctcgattggagggcggaggcggacgcgtggcacgagatggggccgcattacctcgagccggagcacccggcccccgccgcggcgcccgttcggactccggtgccagcggcgcccgtgcccgaggccccggctgcaacagccgcgccgcttcccgtcggcggcgccctgcctccgctcgagatcgcggacgtggccgccctcgccgcgaccgaccccgcgttccatgaggcggtcgtgcgcaagaccggcatcccgccgcgcttcgcccgccgcatcgccgagggagtggccgccccggagcatgcctacgacgcgcgcctcgcgcgcggcggcgggctgtacatctacggtccgcgcggggtgggcaagaccgagatggcgtgccgtatcgcctacgactacgccggctcgcgcctcgatccccgcttcggcaactgggcgtaccggcccgtcccgaagggcaggcccaagcacggcgtcagattcgtcgtctcggcggacctcatgaccgagctccgctcgaccttcgacaagggcggcgacagcgaggccgacgtaatccgcaggtacgtgaacgtcccggtcctgatcatcgacgacctgggcaaggactcctcgacccagtgggtgctcgcgaagctgttccagatcgtcaacggccgctacgaggccgagcgcgccacgatcgtcaccagccagtacacccaggcgggcctcgccgcggtgctgtcggagtacggccgcaaggaggacgccatggctatcgtctcgcgcctggccgagatgaccgagcgcgtcaagatggacggcccggaccgccgcatggcgccctgcggcgtcgagggagccgggcgatgagccgccgtgccccccaggaggggcgcagctacgagcaggccctctactccgtcgtcctgctggtgccgcgcctcccgcgacccgagcgcaccgggacggtgagggtcctgctcgacttcatcgccgacctctgggagctggaccggtcgcgcgtcgatgcggacttcgcatcgctcgtccgcgggcttcctcgctgatgtccgcatgggtatgcacatgcgcgtccgcacatctgcgcgtttgcgcatgcgcatacccgcacagatacacacatacgaggacgcacggccgcgcgccctccctgagggattggggttttccgtggagaagatcgaggacatgtccgccggtgaggccgaggagcacatcgccgcgctctacggcgacgagctgtacgggctcgagctcgacggcgaggtctcgggcgagggcgccatgcggtgcgcctgctcgccggtccatgacgaggtgaggggcatctgcgatacgctggggctggacttcacccgcgtcgaccggatcgcgaccgggcgcgccgggatgctctgggcgggcgaggggatgccgcaccgcttcgacgcgtgcttcgagatccgggcgcttgcgcggcgcctgcggacggtgcggcccgacggcgcttcccgttcggaaagcgcgggctcgcgcaaacagccccgttattaggccgcgttagcatcttgtgggagtacgcacacgggcctgaagcgccccggcaacggaatggagtttcaagatggacaggcgagagctcgagatcatgctgaacgaggccttcgaccgcggtatcgtttcggtcggccatttggttcacgagaccgtcgaggtcggctttttgaacgaactgggccgaaccgttggcttcacgttgaacgggtggaaggaggctatcgagacgatccccgtggaccttttcgatagctttgacgacggtcgcggaagggagcggttcctgagcgattgcaaggcgctcggaggcaaggttccgcagaacacctatcgcggggaactcgtctcggcgcttgccgatgtgctcatggtcgaggaggccgcccccgccctgggcgccctggaatccgcactggacagcgcgaggcgaaagggctattgcgtcttcgaccgcggcgtccacggcgacgtcccggcggacggcctggtctacctgtgctcgacctatccggctgcggtcggcctgaaggactccctggattccgttcgggctcagggcaacggtcccgatacgcgcacccttggcgtataccgcatggtggacggctactgcatcatgggcggcttggatagcgggtcgcaggctgatgcatatgccgtcgacgccgatctcgccgagggctggggcgtcggcgacgccgccttccgcatcgccgacctgaaggcgaagacgttctcgtatgccgtcgaggccggcgaggcgcaaggagcgtcgacgctcgtctactacaccgatgagggggccgacccggtcctcttccagcagaccgacggcgactggcgcctggtgagcgacaacttcctcgcggagaacgcgatcgtcgaggacttggagcaggcctataccggcgagatctcgccggtatatctcaatcgggatatcgtcgacatggaggagatggccgaggtctacggctgggtgaggccggagaggaccccggcctccatcgccgctgtcgcccggaaggccgccgcgtcctcggcagccgagaagccgtcgcccggcaaggtcgccgacgctgcccgcgaggtctcgaaggactccgcgccccgacactgataccatggggggtgcggatgcgcccgcaggcgctttggcatacacacgcaaacgctcaaccgcgcatccgcacatacccatgcatccgcatccgcatacatgcgtaaaggtggtacgccatgatcaggaacgttctgaaacccgacggcacggcgcatatcgagcagcaggtcggcaacatgcgatacgatctcacgacgaggcaggtggatacggtggtccccggggcaggcgccacgaacctcgtcttcggcgccgacggccgcccgcacgccgagctcacgactggcagcattcgccaggatctgggcaggcccggtttcgatacgctcctgtaggttccgcaatcgcacatacgcatacacgcacacatacgcagttgcgcatacgcacactcgcacaatggaacacatgcacgtcggcatatctacgcacatgcacatagccgcacacgcgcccatcgggctccagcctcggtgggcgccttgtttccggccgtttttcgtatccggcgtttaagccgccggatacggggaataaccacctgaggggaaacggacagcgccgagggagggcgcgccccgaaaaggaatggagaacggaaatgaggatacccgcaagggcggcagggccgctcgtcgccatggccatagccatagcatcgttcggctgcatcgcgcccgcggcttacgccgagaacgcgaccgccgccgtgatctccgacgacggtgatcatgtcgtcgtcgacgtcgacctgaacggaagtgcgcctgtcggcgacgcgaccgaacaagccgatatgaaaagcagtcagggcgaatcggttttcgatgcggaaccagacgaggccttgaaagcattcgaggccctgatgacggccgacgacatcattataagatcagcgttttactacatcttactgccgtctctcttcgcgatggccttgcctctcctcttatacgaattgctggagctacatgatcgccgccgcctttgagtcccgacggttggactgaaccggcgtcgtgccgatcgtgagcccggtccgcccccgacgaagttatctataaccgggcggctctgcccgagccgcccttgaagggaaggaaaccctatgatgcttttcgaatctttgatcttcaacctgctccccgcagccgtcggcatcatggccgtcgtgctggtgttcgagagctgctggcgcaaatgcccgccggataagctcatgatcgtctccggcgccggcaagatgcgctccgtctccggcaagggaaccttcgtgatcccgctcctccagcgcgtggacaccctctcgctcggtgccgtgcaggtgcagctgaccaccgagaacgatatcccgacgcaggacgcaatcctcatccacgcctgcgccgtggcgaacttccagatcggccagacccccgagctgatcgagaccgcgtccaagaactacctgaatttggacaaagaggagatgacccgccaggtcaccgaggtcatgctgggcaagatgcgcgaggtcatcggccagatggacctcaaggagctcatgcgcgaccgtgagagcttcaacgcgaaggtcttcggcggctccaaggatgacctcgccaacctcggcctcgagctgcgcaccttcaatgtgcaggacttctccgactcccagggcatcatccgctccatgggcgccgatcaagcggccgagattaaaaaggaagccgagctggcgcagattaaggcggccgaggaggtcgccatccgccagaaccagctcgacttgaagcaggccgacctcaagaagcaggccgacaaggcgaaggccgaggccgatatggtgaaggccaccgtgacggccgagaagcagcgcgagctctacatcgcccagcaggaggccgagatcgccgcggagaccaagaaggtcgagctcgccgagcgccaggcggacgtgagggagcgcgagctgaacgcgaccgtgaagaagcaggccgaggccgaccgctacgccgcagagcaggcggccgaagccgacctctacaagcgcacgaagcaggccgaggccgcccgcatcgagcgtcagaaccaatccgacgccgagctgtattccgcccagaaggacgccgagggcatccaggcccgcgcgaaggccgaggccgaggccacgcgcctgaagggcgagtccgagggtgtggccgagaaggcccacggcgagggcgtcgcggcgggaatcaaggcccaggccgaggcgtacaacggcatggataacccctacctgctcgccaaccgctacatcgacatcatgcccaaggtagccgagcaggttgcgaagcccctcactgccgtcgattccatcaagatgtacggatcgggcaacgcgcaaaaactcgtaaaggagaccacatcgattgtcgaccaggtcgcatccggcctgaaggacagcacgggaatcgacctgccgtccctgctgaacggtctgatctcgaaccccgatatcgatgccgactccgccgagaactcggtggagtgatggtcgtcccgctgatcgcctcggccttgctgctcgatttcttaggctgcatgatgcccctggcattggtcgaggacaccaaggcatttaaggtcggcgtgttcctgatttgggcggcgctggtgggggattccgtcctgatgggcttgttctatccgagggagctggcgggggtgaatcccctgttggcggcaggtctcgaatcgatatgcctcatctgtgccatgtatcccctgcatgggttcgcatcgaacttggacccctgtggcatccgggtcgatactgccgcggccctcgccttcatagacttcctcgtgaccgctgtgggatgtgtctccctgctcttgggtacgatctggcttatattcttctaggctcgcaggcatatggacctgtcgaccatcaagccgatgcccttccggccccgcaagccggagggttccgaggagtagtaccggggcgggccgcccgcacgtcgcgcagaccgtcgggcggctttttacatcgaaggggagtgtgccccatggaggggaaacgaaaccgcggcgaggtgaccgccgagctttccgagaaggtatgggcgaggctgtgccgcgagaacgccctggtcgcgagcgaggtctgggtcgatgacgcccgccgggtcgatttcgtggcctacaggccgcatcgtccgcgtgaccgatcgtcgaaccatgcgaccgccgccgagctcgagtccggcaccttcacgttcgtcgaggtcaagtcgtgtatggacgatttcacgagcggccacggcaggacgttcgagggcgatgagaattggctggtgtgcccgctcgagctcgccgactcgctggcttccaaaggtatgctgcccaagggggcggccgtgtactcgcccgacgcccgcggcgccctgcggaagcgctacgacacttccgaattccggcaggtgcgcgtcgccccggcaatcgagctgatatgggcgatgctgaggcggaagagctcatgcgagaccggcgccggttttcccgtatagatcaccggcacatctgtccggatgcatatccgcacatcggcatacatacgccgaggcacatacgcgcacacgcatatatacacaccagcaccattgcacatatgcgcgcacgcataaagacatagacgcacagatgaacaggccgcgaccccttacgagatcgcggcctgttctcggaccgaagtcccacccatgaaagaaatccgcgatgcccgcatgggaaagacaagccgttcggctgcgcgggacccacatcattctgaggctatcgtacccgtctgcgcatcggggtatacgggcgcgcggggaaatgcgcggaagcatatccgccccgccttcaaaaacttcctatagtttctgcaaaacccccgttcagcgtatattttttcgcttgcgcgggtatcaattccccgttactggtcgaacggatgacgggatatggaaatggcagacggtgaccgctttacaccggaacaggccgaggcgctgagcgcgctgagggacgggaggaacgtgtttctctcgggcaacgccggcacgggtaagagctacgtgctcaacgccttcatatcggacctgaaggcgcgcaacgtcgatttcctcgccctggcgcccaccggcatcgccgcgctgaacctcacggacggctcgacgatccaccgcacgctgaaaatcgcgccgggggtctgcgcccccgatggccccaaggggtcccgcaaggtgctcgacgccgcgaaggtaatcatcatcgacgagatctcgatgtgccgcatcgacctgttcgaccacgtgatggggatgatctcccagtccatgacgcgcaacggcgcgaagcaggtggtcctcgtcggcgatttcttccagctgccgccggtcgtgaccgaacgcgactccgcgctgctgatgaagttctatcccggaaacctccagggctggtgcttcaagtcgaggtactggaccggcttcgatttcgagccgcacgtcctcaagacggtcgtgcgccaatccgaccccgatttcatcgacaacctgaaccgcgcccgcgtcggcgacgcgtcgtgcctcgattacttcaacgcgcactcgaagagctcccgcgcctacctgccgaaggacacgctggtgctgtgcgccaacaaccgcatcgccgattcgatcaaccgcgagaacgttgacgcgcttgacgcaccgaaggtcgagttcgcggccgccgcgaccggcacggtgtcaaacggcgacaagatggcgccggagaggatcgtcctgtgccgcggcgcccgcgtgatgtcgctcgtgaacagccctcaggagggttacgtcaacggcacgcagggcaccgtcaccgacgcgtccgcggacgccgtgacggtcaagttcgacggggtggacgagaaggtccgcatcgagcggcacagatgggagatcaacaagtccgaggccgtcgtcgagatggacgatgatggcaggcccgtcaacagggtcaagaccgccgtcgtgggtgcctatacccagatcccgctcaagctcgcctacgccatcaccatccacaagtcgcagggcctgacgttcgatgcctgctgcgtccacacgaaggtcttcgccgagggccagctgtacgtcggcctgtcccgcgtgcgctccgccgccggcctcaccgtgttccccaagattgagccgaaccgcctgatcgccagccgcgaggtcgtggagttctacgactccctcgagcacaggatggaggagccggtccaaatcgagtgcccgcgccgctacgagtcgcgggtccgcgcctacatccgagacctcatggacggcagggaccccgacgcccccacgcctcccgccctggaaggcgccctggagaacagcaagggaggtaccccggaaccggggaccgaaaggccggctcgaaccctcgaggagaagatccgggcggatatcgtgactcgggccaccttcgccctcaaggatgcgctctccggcgcgatgtccaaggaccatctggatgccaagatgctccttgccgggtacgtactcgattgggactgcggcccacatgagctctatgtcgtccgcaaggagggcggttatcgtgtccgcacatcggagctcggcatccggcgctccgagattgaggcgaggattgcgaaaaactccggcttcgacttgggctccgctcgtcgtcagccgagcccgtccgactctcgtcctgggaagcggaagggctcggcgaaagagtccgccggtcgcacccgaaatacacgcaaggcgaataagcggtagcgacaacggaaatgggaaggccgaatctcccggcctccccatttcattttcgcgggcggatcgctaccgtctgccggtgagctcccagtcccagatatactcctcgacctgctcggcgagatggagcggggcgggaaggttcaccctcatatcgttcttgtagagctgcaccatgcagccgcgcagggcctcggcgtatttgacgctggcaagcgcctcggcctcgccaccgggcgacagaaggcagtactcgttgatcgtcttctcgcagaacgccgcggtgggcgaatcgtacttcgatccgcgtgcggaccatttgtactgggcgtcgcccggtcgcggggccaacgcgaggaagtagccgtccatcttgaagagtccctgcttgtcgcgcctgttcggcacggtgccgtcgtctgcgccgcccgcggccacctcgtccgtgaaccagtcggggacctcgccgttgagaccggagcgtatacgcaggatgcgcagcttgctgcccgcgaggccaagcggctcctcataaccggtcggtccgtagctcaagggtcccgactcgaggccggagtcgctgatgccgggccaccagtctctctggcggatgcggccgtaggagttgacgaggaggagttccggcctgtcgccggtggcgcggactatgccgtggagcatcctcttcagggccattccgtttgcccgcttgcaggagtccggaaagccctcggaaccgctcagccgggcgaactcgatgagggcgcgccagtacggtaggcttccgtcaggtaggagggggcagtgcacggtgacggcaccgcttctcatgtcctgtcggacgcaataggggaagctcgcccgcgccttgccgttgccggagttgtagaccttcaaccctatcgccgggatcgaggtatcgatgccgcgcgaattgcgtgccggttcgggtacgaaaccgagctggcgcatgaggtcgcggacggcgacgcgcgcgcggatctcgggactgtccttcgagtcctcgggttcgatgaattgggtcaggcgcccggttttcgcgaacgcgatgcgcagggcgcgcttggggtctccgccgtcgtctttgcccttgggcttgtagctctcggcgcccggcaggaccactatgcacgcggtcgggtcggtcgcctcgggaagcgcggcggcgactttgcgccagcggatcttcgcctggctgtcgccggtattctccatgcggttcaggaggtcgttcgccgggatgttatcgatctcgacctcgaagccgtcgacggccccctccccaccgagaaagcgggagatctcggcccttgccatatcgaggagccgggcatcgtcctggttgccgatcagctggaatacggccctgtccctgccggtgcagtgggcgagtctggcgcggttggcccggccccaggtctcctgtctcgctcgtgcgctgacggggtccttgtcccaatccgcctgcctgggttcctctatggacgccttgagatgggtcagttgaagcgagtcgagcgcaccgacgggctccgcgatatctttgagccgagccgcgacggcctcgaagaacatggccttgtcgatgacggatgccccgcttgcgaccgaaggcttcgatgcccaggaggcggtcatcgcgtagggggataggatctgcggctgcgagccgtcgcgggcgtacctgcccatgtcctcaagatactcgcggactgcgggcaatccggtcccgctggcgaactcgtagttcgccagggccgcggggtcccaggccaagtcgcgcttctgtttgtcgtagccgtaggggacgacgcggagcgtgccgccttccgtgcggacgtaggcgttgacatcgtgtttgaggaacgggtcgtcctgccatggcttgccgatgaagcggcggacggcgacatccatgttgagccttgccttgcggccgaccggcagcgtctcgacgtggaatctgagggcgaacgcccacgggtcctccttgtgccagtggatatcggaaatcagctcgtagacgtttccgtttccgcgtgagactctgctgaagttctcgaccatgccgttggcgagttcgagggggatgtcggcgatggcgtcggagacttgcgcggagaatgcggggaaggtgagcctgcccatgggacggccgtcgccgctgaacaggcagatctcttcgccacgcacggcctcttcgaacgtctcggggtgcagcatccccatcaccttgcggtaggcgggggattgggtatcgatgtccttgcgggaggagatccagaccgcgatgacgttgcatagcttcacgagatcaatgggggcgagggcgataagccagctgtcggtatgtacgttggggcgtacgggattcagctcgacggcccggtcgagccagcagcgcaggtcgtccttgaggactttagtgttgaggtagccgccctctttcctcgggggcatgagcgtgaagagggcgtcgcgcaggctgtcgggcaagccgacgacgtgcacggtcgtcttggtgtcggggacgggtgcgaatgacatgaggtacagcttagagtccgacatttccgattcctttcctgaatgactcgtagaacggcccgtagagggctttggcgacctccggctggtcgctatcgtgcatgaggcgttccatgtaggcgccgagctcttccagggtcctgaacgagagcttcccgtcgccgccgcggaaggccgcatcggcgaaatagacatgcggcgcgggcctctccttatcggcaagcctcgccaggcgtccgaatatctggatgatcgtgaccatgagcgtggagatcgcgtcgtctacgaggaattgcctgcccatggtcctccatgcgcccatgggaaggttctcgtcccgctccatggtcttccatgtgcgccaggcggaggccctgacctcggtcgcgaactccccgggattggccgggtagtcgccgacctccctttcgatgaggccgttgagtttgcggtatcgcccgccgaggtcgtgcggtgtgcccatcggccgcaccgagaagatgaggctcgtgaacacggcatggccgccgcggtcgacgatattgaagccgcgctcgatggccatggccggcgccacgagcactttggccggatggtcgcagaacttgtagacttcgctccggggcacgaagtgctccctgtggtcgtggttgttgcgcaccagagccgcgaccttgattgcctggcccttgcgtcggaactcttgctcgatgcggtcgcgtgcgtcctcggcctcccggtagctgttcacgatgaccagggcctttcccgcgccatccgcgtcgagttcgtccttcagcgtggccatggtctgcgataggacgatgccgaggttgccggaacgcatctcggcggcgctgccggacacgttctgctcgataccgaggtccctcacggtcgaggtggagagcttggccgccttccacggctccgcctcgaggaggtagtcgaccggcctgttcacgtggtattgcaggcagccgggctcccagctcgaaccggagagcaggagcacgtgcggccccagcgccgccccggcggggtcggtatcgagccagggcagcgagcacatgaaggcccgcccgaaggcgaactgccggaaaagcctgaggtcgttgccgtcgagcttcatcccgaagatgttgccgatcagcgagttggggagatagtgctgctggcgcgtgtagctgaacttgaggaagttgtacagctcgtcgacggaatcgtccttgaagctgaggacgtcctgcgcggaggcgagttcgcgcagatacgagtcgaaccggatgaccttgagggcgaaggagaacctggtccgcagctcgtcgggaagctccgagcatccgcatgcagcgaggtattcgttcaacgagtagctgtgggtgtcgtcgtcgatgccctcgcaggaggtcgcgaccgcctgcgagagcttgttgagggccgcgccgccgccatcgaggctcttcttggcaatctcgaatctataggggttgatgagtttgtcggcatcctcgtaaacctgtttgggaaggccctgctccaggaggtcgttcagaagcgagagtgacgtgaacgcctcgtccttgacgatgcgccatttcgccacgcggtcgtccctgacggatttgagcagcgccttcgcgacgggctcggatttctggcgcaggtcatagaaaagctcctcgttgaagtccctcatcttgtcgtccgggcgccgcttcatggctacggctgtcgggtcggcggcgttgcggatgagctcctggaagctcatgctcggggcgaagcagccgtcgagctgcgcctgcacgcggtccgcctcatcgaacaggacgacgtcgaactgctgaagagcctcctcgaagaatgccttgcgctcccttccgacgatcatggtggcgaagccggtgggagtcgtgaccacgacgtcggatgtcagggactcgcgggccatggcctgcgatgggcacacgtcccagtacgggcatgagttcgcgccgcccttcttggaccggaggccgcggcatggcgtgctgccgtatccgcaggcctcgggatcggaagaggagagcccgtccatgatgcaggcggtctccaggtatttggatgcggaatggtcgagcagcatggagtcatcgtggtcgaagaactcgtcgagccgttcgatgcgcctgccgcgcgacaccaggggcgaggcgctgattcccgcctcgcgaagcaggacgacgctttccatcacgtccgataccgagttgagcagggataccgcgcgcaggccgcgcttcgcgaggcagacgatgagcatgttggcgaggacggacttgccggcgccgacgaggccgacgaggctcacgacctcatcgaggcgcaggccgtcagcgacggatgtgctgccgccgcgggcccgcttgaggagcccctggtccttgacccttctgagcacggcggcgtagtgggtcttcccggtcttctcaccgacttcgtccgcggtcgagatgagctcgtcgagggtgatatcgatgggcgggcgcctgctcttgcgggggatatcgtcaatcttgcccgtttggggcggcacggcatcgggtatggtcacccaacggatcgatccggttaccgtggtatcgccggtcgcctcgggcttgcatgtgtaggaataccgtcctttgggtctcgcgaccacgtttttatgggagagtttgacatcgccgaggaggcggtctatatagatcggcatgcggtcgatcccggtaagggggtgctcgcgcagggccattccgccgttggcgatatcgaagaaccggtaccgctcatattccgcgcgctcgtagaggcccagcagtcgccgccaggccgtggatgaagccagcgagaacagatgtcggcgcgccatctgcatgaggtggccgtccgcgccgatggtctcgggcctgatgagctggtagttcgataggagcctgtcggcctttcggggatcggcgccgggaccgcatacgcgtaccgtgagcgcgagcagcgactccacattcaggaactcgtcgagggataggtcgctgtcctcgggatagcgcacctcgagattgcgcttcagctggtcgaagccttcctgggctgtatcattcggctcgctcatcgcgtgcctcccttcgcggcggcatcgagtcgtttcgagaagttgcgcagcgtttcgcatgaatagccggtcttgctgcgcaggacggcattgcatagcgcgcgatatccgggatggtcccgttcgacttggtccggcacgacataggccacctcgtccgcgcacatctgggcgatgccggtgtcgtcctctatctcgcgggcaagccgctcggcgcggccgtatgccttggcgtcgacggcaagctgtcggccgtccggcagatggatcaggatgtcgcaggtgtccttgaggggccacatttcgtatttcagaccgaggcccgctgcggcctcggcgatcgccagctcgagctttccgggggaagagatgtagtgcatgacgccgcgggataggcggaaggcgtcgtgcgcgacgctgtccagcttgtcgaaatcgcctgtgacggccttggcgcacgtcgccgatgagcagtggggctgcttgcctcgcatggtcatcgtccagccgcaattcgggcatacttttgcggcgcccgggacgggttcgtaggccatggagacgaattcctgcaaccacaccgggtcgatggtgtcggcttcgccctggtcgagggggtcggggtcgcccagggcgagccccgtcttgatcctgacgtattcgttccaggtgagcagcgggtggcggatgagcatcctgcgtccgtacacgtattgctcctgggtgccggctcggaggaattcatacaccctgcgttcctgatggccgcccaagaggtcgttttccgcaaagcgcagcacctcgtagcattccgacgtcgcggcgaagtagtcgccgtctactgacgccaggggcccgatctcgatggaccggcacccttcgacggcttccctgcactcgtcgcgccaccgggccgtccactcgcgcacgtctgacgctgcgctgttcctgatgaaatcggactcattgaacgtcggcagcagctcttccgcatcgtcggagcactcagcgcacagcgcggcgaggatattcatgccgtgtctgaatgcctggctgtagggatacctatgcgggtcggcctcgtagaggccgtccttctcggcgatgccgtatgcgatgaggaatacggcggtctcgaagcggttggcgatatcgcgggctttgccggcggcttcggccgcggcgatcgggtcggacatggaccacctctttattggaattggcatacacagcagctttgatacccgcccccgccgcgctttacacgcccctaccgaaactcgacggataaaaatgcccctgcaccggctcgaatcgagtgaaagacttcccgcgcacggggtagaaaaagctgggacggcacgcatccgcgcgaagggtttgacatgtctagggtggcttacgggcaaaagggatacatcggcgcctccatgagcgcgaacgcgcgggcggcctacgaggcgggggagatgccccgctcgaaatggaccaaggcggcgatcctcggcgccttgaggggctactgcgatgagatggacctgctctacgaccccgcggtcgagtccgagaccaaggccgcgctcttcgaccggttcatcgcctactcgtcctggcaccacaccggcgcctacgcccgcgagatggagttcttcgccctggacgaggccgccgtggtcggggcgttccgcgagctcgggcccgaggaggcggccgagcgcgaccggatccgggcgcaggctgcggcccgggtgcaggaggcggaacggcatcggagggaagcggaatgcctattcgagtaccgcttctcctgctccccatatagcgccatggcgtacgaggcgttccatcccgagctgtgcgagcgccgcgtgagcaaacgcaggaagcaggagctcgtcgtgtaccggctgccggacggcagcgagccgtcgggctatgcggagatgtccgtcccggcggactatgcggacagcagccatgtggtgccgtcggttttcatatccggcacgggcggggatcgcgcgtggcgcgatatcgacttcgacgaggccgagcggaaattcgcagcggcggcgagaagggccgcggcctttcgcgaggggagaccgaagctcatgcaggacgaggccaggcgcgctgcgatacgtgagactcggcaccgcgtctgcaccgcccccattttgaagagcataaaggagattcacaggtgacggggaagaatgtctatacgatgacggcgatgacgaggcgagcgttcgtgggcctcgcggtcatggcggcgcaggccggactcgcgggctgcgtgaggaacggggcgccggacgccggctcctccgacggcggcgccgggaagtcgggcgatgccggcacctcgtcgccgttcgcgccgcagcagtccgcccaggcgtccgtggacggcatctcgatcgaccgcgtgacgatcgaggaaggcacggggccggacggcaagccgttccgctacatccgggttgcctataccttcgagaacgtcacggactcggacgctgtcgcaccctataccgacatcaacgcataccaggacgggatcaagctcgacaggtcctacaaggtgcaggaccagcgggcgcagaagcagatcgagccgggcgggaaattgaagtcgttcacggcgttcgcccccgattctgagacggttccggtcacggtcaaggtgatggcgcccggcgagaaggagccgaggtcggagcgatgctactgcatcgtgaacccgggcctgcaataggccgccccgctcgcacgtccacacatatttgtatatgcgcgtctatgcgtttacgtacatgcgcatatgggtagactcacatcgagtagagacgaaacgggaggggatggtccgcatggcgccgttcatcagtgaaaatatcgacctggttccttgcatggccatggcattcaacgcggcgattgcgaccatgggttttctgaaaatggttgcatggaccgagcacggcatgtcgtcgaggatgtccagatacatcgacaggttcggcaagatgggcatcgaccgcgagattttggaggtctatgcgcgatcgtatctcgacgagtcgcgtaacgcgctcatctgctggatcgttggcctcgccatcactatggctgtggggattgtcatctgggcccacgacgtcggcgcggcagtcctcctgacatccgtggtcgcggcggcggtatcgatcaggtgcatcgtcatggcagtgagggatgtggcggatatccgcgacgtcctggccgaaaccgatctaggcaccccgaccgcgtgatttgccctggcatccaatcaatagggacaagcagatattcagaagggactcgatatgggtatgcaaagctatatggcgacggtatttgtcagcgagcgtgagattggcgggccttttgtaaacggtgattttcgttcaagcctgaacttcgcgaggcgagagcttcgcggatacctgcgcctggctgagagtatctgacggcaggaagtcatgggtggtcgccgtcatggccttcgttgcgtaaccgccccggcgcttgattttggcatccttaccgagacgaaggatagcgagaccgccaccgtggagtccagctttaccgtgacgtcggcctacacggccgaggatttcgtatcggatacgcgaagcgcgtttcttgcctgcgtcaccgaagatttcggcgagcaggtcgcatcggaggctgcaagtctcgtcgatggtcaaatcgcgtcgatgtcgtggtataggcgcttcgagatatggaacgacctcgcatcctacgacatatgcggcgttgcgaacgccgatcatctcatcgacgggctcgaggagctttccgtcgcgctcgccgatggccgcgcgttcgacgcaaacggtggaaaccccgtcttccatgcttttcaccgggccgagcggcaaagtggcgacagagagttacctgtgcctgccagacgtactcatcgacatcattgagacaggggcttcgggcaaccggggctcttttctaatatgagccggcacctccacggtaccggcccaataacgactgcctacatatcccagatctcgctcagccgctcatcgtccgcggcctcctcctcgaagcggaactcgtaggggatggccaacctggtgagctcaaaggccacctttctggtcatggcgttcgagatccgcgccgcgcgcgcatcctccgcggctaagtcctgctcgcggaagtaggggagcgggtaggggttgccgtccgtctcatcgacaatcttctccaccaggcacccgacctcgcgctcttggatttccgccagattctcgaggtacttccatgccacggcagtggcgcgggctcgcggcaggcgcgggctttcccagttcttgacggtcttcacgtcgacgcccgctgcctccgcgacgtcggactggtagagccccaggctctcgcgcagcaccttgaagcccgccttggtgtggatggtctgcatatccgttcctttcatctagattctcttctcgaagagcccgtgatagacctcatcgatctcgtcctggtattcgcacaggaattcgcagcgtccgaccacgagtgcgacgaaaagctcgtcgacggtggcaatgccgtaatcgtggaaccccgcgggaaggtagagcgtcccgttgtagggcgcatgtccgacccggtagcaagagaagtccccgaaggccgatccttccacgcggtacaggctgtagtagtccccggcacgcttcgcagcgtcgatcgcctccgtgtggccggcgatatggcggatgatcttcccgtccgcacggttcgcggccgcctcgcgcgcgagcgtgcgcagctcgggcatgcggtcgagcgggtcgacggtgtggaccgtatccatgtgttccgtgaacccctcgccgtcgcgcgtgatttcgctcactgtggcgacgaaccgggcgaaaccgcgctggcagaccccgaccctggaggccgccgagaccttatgcgccgcacgcagtgcctcctcccggctgtctccctcgtaatgcagctccgacgaatggagcggccgcacgtcgatatcctcggttcccgtgaacagcatctcgcgcgattccgtcacgaagatcgtttccatatagtcctcccatatgcgcaccgggcggccccataccgcctgctctacctctcttgtaccccctgaggggaaacgtaaacgcacgccgcggaaaaatcgccggaccgggttcgggaaaaggacggggccgaaaacggcccctgtcttgaaatctggatatggaatcaatcaatcatcgccatgtcgaacgcttatatgcgaactcggaatcgatcatcgctgcgcagtccctccgagggcggggccgtcgtgctatctggcggaactagccttatttacccgccgtcgggcgtagcgccaacaggtcattcctgatctcatcgagcagcttcctgcacttgagctccgcggcctccatcgggctgacgtatccatcctcatgcgggtcgaaaatcatatccgggtctggcagccatttgccgtcgtcctcgccgaaggcggtctcggtcatgatgtcgcagaggcccaggagcctgacgaagatatcgctctccccgacatatggggtcgcgcgtcggcacgcgcggaggtacacgtcgagcgtctggaggaacaggtcctcggtgccgatctcccagggaggacgggacttatcgtcttccgggttcaccttgatgtcgtgcagaatcgagtccggcacgcagcgcaggtctgtagtcggccaggcgaaatgatcggtctcctcgcacaggtcgaggaagtcgtaggcctggttccatagcacgcagagcacatccagctggttttcggtgagtttttcgtccatggtcctatctcctgattctatgaggaggtcggcgacgtcgatgtgcgcccagcaggcgatatcctcgaccttctcgaagtcgctcggagcgtgcgtcccgcgccgccagtccttaatcgatgagatcgagacgtgcatcgcgcccgcgagctcccgcatcctggcggcgcctttggcgccgtgtcctagcaacgaatcgaacacggcgggggagaacgcgaacgtcccgtcgccaatcctgtaggtgtctttccgcattgcggcatctctctttctcaatccttgccgacaatgttatctgtggcgcggccgtctacggagacgaacctggacggacctctacccgtccggcttcacggagaaccacagaccgtcgtcgcagatcagcccgcgcgcgacacatcgaccgccgacgtccactaggacgccggtcacggtggcgtccgccttgccgaacatgctggggcagggcagcgtcgcgccgaccctggcgatctcgaagcgccgcccgttgcacacgattgccctcggggtgttgagcccgcactttcggtcggtctcgaccgctatggggacgaccttggcgtcgaacctgctgcatccgcccacgtgccggacctccctcccgctcggtatcgcgcgccacgcgcgcgatacccccgccgtctcccaccctggataccgccctgcgatcccaacggggagggcatccggggcggtaccgcccgcgctgcggtctcaccgcgcagcaggcggcctatggccatgcctattcggccgacccgatgcggttgccgttcgtgtagtcggaataggcccgctcccaagcgtcctgcacgcggcgggagtcgcatatcttgcagaagatacccgtcttgggcgagccgtcgcgcagcatgaacgtgatgaagcagaagtcgccgatatcgggctcctcgtccatcatcatggcgccgcaagtgtccagcacctcgcggttgtcctcctgcgacccgccgaggatatcaatcgtgcaggtggccgtatccgacggcccgacgaggttgtccggcgccgccggcagcgcatccgggtcggttccgtcgatctccccaaggatgcgcgtctcgaacgtcgagtttgccgcgcgcaggcgtccgagtgcgtccgcgtatgcgatcgacgagacgaggcgttcgagctccctggcggcagcctcggcgctgtccgcatatccccgcgggtccttttccatgagcgcgtcggcgagcatggcgacggccgcctcggcaaccctgccggacttgcccatgtcgtcggcgcactcgccggcgagtgccgacagcgcgctcgagtagaaggggatgtcgctgcggcgtccgaacctctcggccgcgcgcccgcaggactccctccatcgttccatcagcgcgagcctcaggttcgccgtctcatcgtgctcgatgggcgacaccgtgtcgtgatccgtagccatgtccatatccttccgtttccgttccatcccgctcccgcggcttccctagagagccgtttaccccgaatcgcccccgctcatgcccgctaaattgagatcggggcggaaggccgcctgtccgtatcttcccgtccgcatcggaatcggctgtttccgatgcgcccgaacggggtatcaactggtaataccgaatgaacgacttgggcaaggagcagccatgtatacggacgatgacgagatcgggcgcgccgtcgctgccgatctggaggaatgctggcagggcgagggctggtaccgaatctgcttcaccgatgggatgggatcgtatccggccacatggtatggaaccgaagcggaccttgccgacgaccttcgcggtgcctacggggatgccggcgagatccatctgccctacgccgaaatctctgtgatcgatcaggcggttgagaaggtctggcagggagagggatggtatcgggtgacgggcggcgacggcgagaaatgggagccggacttctacgttacacgcgaatgcctggtcgccgcactgcgcgacgcctacgacgaggcatccttcagcggcgccatatgcgtcccacgtgtagagccggccccggaccctaaccggcgccgaacgcacgccttctgaaccgcaccgtgattcaaactgggcgagaaccgaaccggaggaaccgctacgcgtttcccacaaccggctgcctacgggacgtatggggtccctccggtcatccggccatggaaaacgccgggctccggtgccagcccaatacatagccgcacaaacgcacatctatgcgcttgcgcatctgagcatctgggtacatacatggcgacgaaggcgggggatcggcccccgtcggaaccgaaaggatagaagccaatgagcatcaaccgagtcaacatcaccggaaacctcacccgcgatcccgagctccgcgccaccgcggccggcacccaggtgctctcgttcggcatcgccgtcaacgatcgccgaaagaacccgcagaccggcgagtgggaggactatcccaattacatcgactgtaccatgttcggcacccgcgccgaggctgtcggccgctatatctccaaggggagcaaggtcgcgatcgagggcaagctgcgctatagctcctgggagcgcgacggccagaagcgcagcaagctcgaggtcatcgtcgacgagatcgagttcatgaactcccgccctgccgcgtctcctgctgccgcggttgatggtggacagcagtatgcggtccccgaggctcccgccgtcgaggttgcggacgaggacatcccgttctagccgacccgtacaaccccatactcaagtgatcgccccaccggagacggcggggctttttcatgccgtagcccgtctccacacgtttcccacacccggctgcctatgggacggatggggtcccgccggtcatccggccatggaaatcgcaggccaggggcctgccgaccggtgtccgggcggcccgctgggcaaattatcgaattacgcagacgcatacgtgcgcatttacgtgtttgtgcgtttacgcatgtgcgcagctgggtacatacataccagcggcaagggaggccgcgaccgcgtcggcgcgggatcgccgaatatcggaaggaggccgtcatggccggttgcaagagggaagtaatggagccgagcggaagggagaaggtcgccgccgccgccgcgctggtcgcggggctcgtcgggatgtggttcatgctcgcatacagctatgtctacatcaactgcgccgtgttcccggtggcgggcgcgctcatcgcgtacgcctacgacgtggcggagaggacggtggcggcacggaaggagtgctgccgcaaggtcgaaacgcgccgcgcgtatcgcgccgcgagggcgtcggaatacggcgcatagcggcgccggcgggcaagaataagtaaacgcgcatccgcacaggtatgcagatgtgcgtttacgcatccgcataactgggtacatatatggcagcggcagggccctagcgccctgccgtcggcggatgcgggaccggtagcgactcgccggccccgtgcccgccgccggcaggcggcagatatccgagagggccgcccggaaatcgggcggcacccgtagaagggaaacgcatgaagacaatcgttttggtcaaccaaaagggcggcgtcggcaagacgacgttcgccgacgagatcgcctggggcctcgagcgccgcgggcgcgaggtcggcttcatcaacctcgacccgcagggcggcgcgagtcacgagcagaagaccgtcgagggcgagaaggccgtcaccgtcgtcgacaccccgggctatctgaacgacaagctcggcggctgcgtggaggtcgccgacatcgcgatcgtccccgtcgagcccagccagcgcggccttcgcgcgatgaagcgcacgatccagctcatcacaggcgtcaaccccgagctcgagatcggcctgatcgtgaaccgctattccgacaagcgaatcatcgaccgcagctttaccgacttcctcaccgccgacgacctgcccatcctgggctgcgtgccgaccgccgaggcgttcaagcgcggcgcgtcgttcaaccgaccggtgtccgaggtgcagccgggcggccgcgcggcggacgcgatcgaggggattctggacaaggtggaggcgatgctgtaatggcgaggactaagaaggcggactccgccatcaacagctttttcacggacacctccaaggagatggtcgagcgccaggagacgatcgtcgagaaggtcgtgaaccccgactccgagccggcagctgagaaaaaggcggcggcctctgagggtccgacgcaccgcctgagcgtgatcgtccccgacgacctctactggcagctcaaggagtacctggtggagcaccgccgcgagggctaccgcagtgcgagcgatctcatgcgctcgctgctcgaggagcatctgcgcaaggaccgctaggccggtcggaacaccatcgaatagaagggaaaacggaaatgacagcattcgagtacagcgcccagggctaccgcgtagcgccctatatcgcggatctcggcaagaaggaggcctagatggatgccgatgccgggcgcgtccgcaccgccctgcgactccaggccgtcgcggcccgcgtccaccacatggactgtgcgggtttcgccgaggaggtgtgcgatgccgtggacgtcgccgggcgtctgggctatctgggctgcttgcacgcggttgtgaggctcgcggcggcccgcgaggcgatgccggacgccgacgggatgacgtgcggcgagctaggctgtctcgccggcctccgccgccaggcgcgcgccaccgacacgctggatgccgacagcttcaccgcccgcatcctcgctgccctggatatcaaggggtggtcggatcgatcttcctaccaaatcgcggcgatgcgcctggccgacctgattgccccggtctcgctgatggcgtccccggagcgcacggagcgcggagaccgcgccctgtattcctacacctgcgggcgatgcggcgcacgcgtgaccgtatcggtgtgcacgcgttgcccgtcctgcggcgcccccatggtcgccgcaggacatggcgctccggtgatgaaaggggcgatccatgtcgactcgtaagctgataaagggcgaccgctaccgcgccgggctgtggaagctggaggagcgctgctatgaggcgcacgtccgcatgccgaacgccaagttcatgatcagaacgtaccgctgtacgcaaggcgaggcggtcgcgaagttcgattcgtgggtggaggcggaaggcctcgacctcgctgaggatggggccagggaagcctgcgagggcagcatcgacgacggtatggggactgcgaggcgcccgttaaaccgcgaggagcgccgtgcgatggaacgccgcgaccgaaagataaagaagcgccaggcgcgaaaggcggcatcggaggccgatgccgcgcgacagtcacaggatatggggaaggaagagacggaaatgcagaaggtatcgaaaacggacgggcagaagacggcggccgcggggacaaaggctccggagacggagccggccaggtgctacacgctcatgtgcacgggcgatctggggacggccccggtgatggtattccgcaacgagggcgacgcgaacgacatgatgcgcgccctggagcaggtcgcgaaggtgacgtcacccgataccgtctacgacgttatggaggccccgttcaaggaggccatttgaagggtgctgaggggccggggagtgcaggccgcacagctgcccgaacctgccgccgtcccagtccagcgccccgcgtctcccgccctggctcccgtactgaggaccatatcgggagagacaccgcactaccgcgcgcgcttcgaggtcgcagcggccgacggcgcggacgcggccgaggccgtgaaggagatcgtcatgggctggctgcacgccaagggcctggacgtaccggagggcgccgcggacatcgcggtgcccgcgggctggacggccgctgacgagcccgacgccgccaaggccgtccgctttctcggcctatccggcgcgcaaggcgcggcatgggcggtcgaggccgatgagctcgacggcgaattctcgcgccgccgctggcacacgaggatcggcctcgcacccgccggagacggcgggtgcatcctcaacgtgcaggtatcgcattacgccgtgaacggctttttcggataccagcgcaacccgctgccgtccgtgccgcgcgtcgtgcgcgatatcctcgcgagcggaaagctagacgtgaggatcggcgcgtcgcgcgtgagcgtcgaggagatataccttgacgcggatgcgctgaagcgcgatttcatgccgagcctgaccgatcgcgcgcgctgcctgccgatcgtcctcatgacgaccgacgacgacggtaagacacctgtgtgggacgctaccgagctcgcatcgaagctcgtcggcatggctacggtatacgtcatcgacatgcgcgacggcgcattggtgcaggcgttccgcgacctgctgcccgaccggacaccggccgggcgctacaggatcgggcgcagcgccgtgatggtgtaccgcccgggaattgacctgtcgaccgaggactcgctgtccgcgtgcacgctcttcacgcgccacagggtcgagcgctatgccgccggcggccgcgacggtttcatcaacgtcctcatgcagggcctcggtcgcggcatcgacgcccgaccgggcgacgtcgccggaatcggcgacgtgctgtggctgcgcagccgagtcgagagcgagcggcagggcgagcgaatcgagcgcctgcgtgcgcggacgaaggcgcccgccgagccggtagccgacatcgacggcctgcgcgcggagatcgcgcgcctgcgatccgacgccgaggcatgggaggagatcgcgacggaccaggagcggagctattccgacgccacggcaaaggtggacgagctcacgaggaccgtccagcgcctcgaaggcgagaagcgcgcgctcgagcgcaaggcggcgcagtgcgcggcgccgtcgcacgacgacggggccgcgagggtggccgaatgcctccaggtgatcccgcgcgacctggcggacctcctgaagctcgcgcgatccatctggcccgaccgcatcgtcgtccttcccgaggcgatggactcggccaaatcatacgacggcaacctcgccgaggagtgggatatcgtccgtggcgccgcgacggcgctctacggactcctgttcgaggacgacgattgcgagggccgggtcgcagacgagttccagcgccgtacgggttacgagctcaccttcagcgagagcagcgccaccagggcgcgcgccgatctgatgaagatgcgcgagaggagctacggcggccgaaccgtcgacatctccgcccacatcaaggggaggagccagaagaacaccttccgccttcacttctacatcgatcgggaaaacgagctgatagtcatagggcatgccggatgccacatgaagaccgccggctcgcaccgtcgcggtttcaagtagcacagatccccgccatcggaaccgatggtggggatcctttttgcgcaacgcgcgaaacaggcggcggaaacggcccgcgcaattgcaggactgcggatacggcggccggcgtttgggaccgggcgcttttgggtagcatcgaatggtaatgccggcgacgtgaccagaggggagggagaatatgttcgataccgatagcgatgtcccgtacgacatcgagccgaccgcgaccgagaagccgaaggcctcgactgcggacggcgcagccgaggctgccaagaagacggccgaggccgagaagcgcgagaagcgccgcgcccgccagaagcgccaagcgttcaccgagcagatgcagaacttgacgatggacgacatcagacgcctgatggagtccagcgtcgacctcggcggcgtcagcgacccgcaggccgagattgagcgccgcatcgagcgcaacggcatggcgtacctgatgaaggacggcgccgtgtatgccgtggtgctctcgagcgacgactacgaacgtctcgcggacaagaaggcgtagacctcgcattggcgagggtcgccgggcgagaggccgccaccggaacacggtggcggcctttttcatgtcgcgacgcaacgcccggaacactgaccggacaacgatggaaagcgagcggaaacgctcgcggcggacacggacggccaggccccgccccgcctcgatgcacgcccgccggagccgggaggtatcgggtcggcgcgcaccgagacgttggacacgcgcccgcgcgcaagactcctgccgcgatcgggcgcgcaggctactcgcaccccgtcataacttcgagtgccacgcggacatgccgacatctctccgcaagcagctcgtagatcggcgccgggtcgtccacgtcatcgccatcggccgcgagcagatcgagcacggcggccaccccctcgatgatacgggaacaatcgtcagcatccatatgaccctccttctcatcgctgaaaataacttatacggccgtgacggtatccgagccgtatcggacttgcaacagatgagcagcgtcccgttcgtcgcgaaagagacgagggacagccgaaacgcggacggtataacggcatcggatgaccggtgcaaaccggtttaaacccaggcaaataggggtaggatactgaaaacttcgcaagagacgcatagttgtacctccatcgtagatgtatgtacaactatgccgccggagtcggtcagatttccgccaccgggcacggcccgccgacggaaacccgtccgccttcggcgcttgccagggctccgcccttggaccggggtcgcgcacgggtgcgcgaggaattggaggaagcgtggcaaaggaagccacctcacagacgaggatggtcagcatcaggttgaccgaggaggagatcggcgcgctcaaggcgaaggcacgtcttgcgggcacgaccgtgacaaacttcatccgcgagacggcggtctacggcaagcatgaattcacgctggcgaagctgcccggcggcgagcgcgtgaacgtgaaggagacactggaggggctgctcgataccgagcaccgcacggtgcagaagcatttcaacgtgacgccctacgaggacacctttatacgcacgggcgcgcggaaagccggcatgacgcagtcgcgcttcatggtcgaccgaatactccacacgcccatgtactacatcggcgaccccgatttcttccagaagtatttctacgaactcaacaagcagggcgtgaacctgaaccagctcgccgccgcggcgaacacgctgctgctcttacaggacatgccggacgtgagccacgagcgccgccgcgaactcgttgagcagatcgagaacttcgtcgcgacgctgaaggacccgtactgcaaggcgctcgcggagacgcgcggcctcatggtgcagctcaggaagcaatcggaggtcgagcgctagcatggcgatgctcaagacgctcgcccggaagttcggcggctgtaggcagatcaaggactaccttgcgcgcaacggccgtgccatgacgttccgctcgagctcgatcgatctcgatagcgccgattgggacgagcagatggacgcgacgcgccagatgttcgagaaggacacgggccgcaagtactaccatttcgtgatctcacccgaccccgaggacggattggatgccaaggcggtcgacacattggcatacgattgggtgagggagcgctacggcggctaccagtgggtgatcgagacgcacgtcgacaacggcatcccgcatgcccacgtcgtcgtcaactccgtcaaccccgtcgacggcaggaagatccacctcgacgacgatgacgtgcaggccgacgcgatggagctccagcgcatctgccgcgactacggctacgccgccttcgacaatttcaagttctcgagggacgaggacggttcctggtacgcgagaacgccgcgccccgaccgtcggcgcgaggtcgtattgcaggaggcgcgaccgccgcgcaggcatcagacggacgcccagcgccgcgcccggtacagcggcaggagactctggaccgacgcgatgcacgacgatatcgaggctgcccttcagggctgccggacatggcccgcgctcgagaggcgcctgacggaaaagggataccgaatcaacatcaaccgccgcggcgtgctgacgttctacccgcccgagggcaaagggcgtcccgtaaagggatacaagctggacgactcctatacggtcgaagggttgcgcgagcgccttgccgtgcgactggaaggacggcgcccgaacgtcaggatgtgcgccgaggacctagtccccgacgtcgtcctgccgcccatgacgttcgaggcggtggcgtcaaacaacctcgagcggtcgaagaggatcgagcgctccgccgcgcgcctcgctgccgccgccgacgcggtgaacatcatccgtgagcgcggctaccgatgctacgcggacatggcggcggacgcgaagcgccttgccgccgaggtcgacgcgctcgacgcgagggctgacgcgctcaagctggaggccgagcagaccgccgaggcgatccgccaagtcgaggtctacacggcctgcgccgcgcagctgaccgcccgcccgaccgacccgggcgtcctggcggcatggcgcgaggacaacgccgtggagctccgcgagatggaggcgatccgcaagtggatggccgagcgcggcatcgggctcaccgatacgacctataccgacctcctcgcgcgccgcgagggcgtcaaggccgacgccgctaacctcgcttccactgcgggcgacatccgcaaccgctcgcgccgcctttccgccgcggtcgatgtcctggcttcctcgcagatgccgatcggccccaccgatgtccgcgggcgcggcgagaggcagaagggcgccgggcgcaacgtgcgcggcgctaaggtcatcaccgccgaccagagcgccgagctgacgcgcgaatacgtccgctacagggaggcctattcgcaggcgatcgctgccggcgcgctgacgccggacaggatcaagcagatcgagcgcgaccacgagcgcgccaaggcgaagatcgtaagcgagcagcgcgaggaggacttgcgcgccgcccgctcggcgtacggcatggccggaagcgaatgggcgcaggacgcccccgtgactgttgcagtgccagacggggacgtcacgaaggcgaaacccggatgggagccgtatctacagcgaccggcgaccgagaggcagatgaaataccttgaagacctcgtggagtccggcgtcgtcgcgcaggccgacgtcgacagcctcggcggcgaaccgacaatcgctgacgtcaacgcgctgctgaactcgcacccgaaggtcaaggagctcgagctcgagaagagggacaagggcaacgcgagggacgcgcgggcatacgcaccgtcccgcgacgatagcggggacgacggctacacaccgacaaaccatacgaggaggagatagacggtgaacatcatcgtgaagatgcacgacagggtccgcgtgatcgagacgacgcgaatggacctgcacagcggcatcatgctcgaggacgacttcctcgacatttccgattaccttaaccagggcgtgctacttgagcgcagcgtgttcatcaccacgagcgacgacatgcagctcctcaagcgcgccgtgacgatcatcgagccggacgagctggaagccgtcgaaggtgtctatgcggacggcaagccgattcttgtgaggaccgaggacggctcgcgtttggctgcgtcggtgttcgaggtgctgttcgacgacagcggcaacttcatgggagaccacggccagggcctctgcatctactatgagtccggcagctacgagacgatcgtgccgaccgttctctcgttcggcgacggcatgctcatggccgacgacctgattgattggagcgacctcgactcgggcatcacatggacccgcggagcctggacgcgcggcgaccggaacctcatggagctccgtcccgagcccacggtcgtggtcgatcccgagcagtacgcgcacatggagctcatgaccttcggcgggcagctcgtcgccatgaagaccgccgagggcatggtgagcggcggtggcaccgtctccgacgattcgcccaccgacgtcgaggcgaccgaaagtgaaccgcagccgtcccatgacgcggcagacggtgacgcgccgacaatcgacgccggagacggcgacgaaaatcaagtctcgatggaagacggccccgataaggattcacccgagccctccacggatactgcgggagacagcacggagaccgatgccggccccgaacccggcggcttggaaatcgagtccgccggtagcgatactgtggctgatgacggttcggacccggccgaagatcccgacgaggaccccaatgaaatcggcagcgatgatgatcctgacgacgatgacgactacggggaggacgattcgatgttcgccgacctcttctagaaagtaagcgaaaggatacccgcgacgacaagcgccaccgcgtgaccgaccgcctgagcgattactaccgcaagttccgcagcctcaccgcccactatcccatcctggaagacgacctgtagcccactcagtgaaaaccaaagccccgccggacaccggcggggctcgcaacgcccatgtgaaggcacccggacaacgggtgcctttttcaatatatgccccgttcagcgaatagattttttcaccaagggtaaaagtctcacgatactggaaagcagagccgagaaggagcactcttatgaccgttattgagtattgccgaacgaagaccgaggtaaacgagcttgtgattatccgcagcggcgggtataggacatgcgcagcatttatcgactatgaggacctgttccgcctgcctcccgatattgcaaatgctgaggttatggatgccggtcacggttttatcgccgttgcggggcccgcgaacacgtcctgcaacacgccgtgtgtctatctggatatcaaatagggagcgcagacagtggttcgagacggtattgcggtcatcattccctgctataacgaggccttgactatcggcaaggtcatcgatgacttccgcagcgagcttcccgaggcgaccgtctacgtctacgacaacaactcgaccgacggcaccgccgagatcgcccgcacgcgaggcgctatcgtcaagtatgagcctcgccagggcaagggcaatgtctgtcggcagatgttccgcgacatcgatgccgactgctacctcatggtcgacggcgacgacacctacccggcggaatcggcgcgatcgctctgcgctcccatcctcgcgggcgaggccgatatggtcgtcggggaccgtctatccaacggtacctatgcgcagcagaacgcccgcgcctttcacggcttcggcaacgacctcgtgcgcgccatgatcagatggatatacggctacggcttcgaggacgtcatgaccggctaccgtgccatgtccaggccgttcgttaagacctttccggtcctgtccgagggcttccagatcgagactgagctatcgatccatgccgtcgatcgccgctggcggatcgccgatgtccccgtggaataccgaaaccgccccgagggctcggtctcgaaattgaacacagtgagagacgggctgaaggtaatcgccatgatcggcaccctgttcaaggactaccgtccgttgaagtttttctcgctggtcgccctgctgttctgcatcggcggcctgtgtgccggcatcccggtcgtgaccgaatacctcgccaccggcctcgtgccccggttcccgaccgcgatcctcgccgtagcgctcatgttcatggctgcgctctcgctcgccacgggtttcatcctggacgccgtggcgaaagtcgagcgcaagcagtgggagctccgcgtataccgccaaacaaagaacggctgacgcgattcgccaacatcccagcccccgccggaaaccggcgggcccaacaacgaacccaagctggcgcccggacaccgggtgccttttcattcgatagaccccccagctcagcaaatagatttcctcccatccgggtacaagtcgggcagtttgctacatcaaccacttaacagaaagaggaaacccaaatggacgcaatggtagaagccctcatgcctttcgtaatgttcgctgctgttctttggggcattgaggctatcgtcacgatgcttatcagggatcacaagaaggcgaaacgaaagcaggcacgtgagaagcgccgcttggaatatcaggaccgccgcatggcaaacgatgcggagcatgccaaggtgactcgcgcgatgcgctacgacgtgctccgtcgcgatgattttcactgcgtccgctgcgggcgcggccgcgaggacggcgtgaagctccacgtcgaccatatcgtccccgtatcgcgcggcggcaagacggtgatgtccaacctccagaccctatgcgaggactgcaactgcggcaagggaaaccgctacctggaataacaggttgaatcatgctgatacaggcacaaaaaagggtccgtcctccctcggtggggaaggcgggccccaatgggcgccggtagattcgggtcattcgcttgcgctgaggtctcttagacgcagcgacggcaaggcgccgcgccacgccttcggctggtacctgcccttgaaggccgactccgtctcatcgaggctcttcgtcaaccagcgcccgtcgccctgtgtggcgaccagcttcctgagcgcgagcacggtgacgcgccgctccttgccgtcctggtcgagcgcgtcgacgaactcgccgaggtcgtcgcccacgatgagccacatcatgccgaactcgtccttgaacacgcgcccggccatcgacttcgtcctgcgcgcggcgctgccgtcgtcgagctcggccaatctcgcatcgaagttgcgcagcacgtgcttcgagaacagccgctgcaggggcgctacgtcgcgggacagcttataggccccgtgctcgaggtcgacgttcaccagccggtcgaggtcgcgcccctcggatttctcgaggacctcaacgccctcgatgctcgccggggccagcgccatcgacggggatggcgcgagcacgccggcgtcgtacctctcgagtgcgacatcgcaccttgttggcgtgtctcccgcctgcaacgcgtacagtgggttcatgtcgatgtgcagctgctcggaatccttcacgtgctcgagcagcttcgggaacgaatcgaacgtgccaacccatccgtactcaggcgaataatagaacactagcgagccgtcggcagggttcaccatgatgtgatgggagaagttcacgtccacgatgaggccgtggatgttccccgagaaaccgagtcgcttcagctcgccagagacctgctcctgcctctcgcgcagcggcgcgagcgcggcgaggtacttggacacgacggtgtcgaagttgtcgtgcgcccacttgatgtcgcggtgcgtgctgaccctcttcgtcttgccgccgttgacgatggacgtcccgttctcgcccacgaggaagaacccgtaatagccgttggacttgatgacgtgcatgtcgttcttctcgcagcgttggcgaatcatcttgcccgtgccagcgtactcgccgatgaaccggtagaagctgaggtactcgtcggccgtcgttgggtagcagccgtcggcgaggtcggcgtagggattcctcgcgcatccggtcgtagccctcttgaatcgcatgtcccacctcgggtcgaagccgcccctcttatggtagccgacctggttgtcggcgtagatgaccgcgttctccgacctgagatacctgttttggtgcgtgtgtcccgagaagtagactgcgtccctgtcgatgcgcccgaggcagtcctccgccgggtagtgggaggcgcagatgaagcatttgcccgcctttcgggcgcgttcgcgtgcggcctcgtagccctccacgaacagcctagtctgctcgacctcgtacgccctcgcgcgggccttagcctccttgagctcggcctcagcgccggggaggccctgcgcggccatcgcgaagagcccgcggtcgaccgtcatcgcgtcgcagcacacgaggttcgtcgcgttgtagcgctcgttgtgcgccgcgaagcccgtgccgccgtagatgacgcacctgtcatcctcgatgcactcgttctgcaagacggcatatcccaggggctcgaggctctccttgtagaacgcgacggcggcgtcgacgtcgggaaagccgacgtactcgtggttgccgaggatcacgatgccgagatagtcgaacgaggggctgtatcgatgcaggtcgaacctgaagtcgcgcagatcgatcggctcctcgagcgcgagcttgtctttgaggttggccttgatgccctccagccggcacagctcctcgttcgcggcagcggcgtccagaatcttcttcctcgcggagcgcggaagattgcgcttcttgtaatagctgctcgcgagatatgccttgataccattgatgccgcccttcggcgcgatgatgcgactgtaactcagatgcttatcaactttggccttcagccgcttgaactcgtccttctgggcgctgatgcacttgtcgatgcttttgacgctgcgcttgatgttcgcttgcctgcgcgccgactccgggctgggccgcgactccatcagccgcgccttgtactccttgtactggcggtatgccactttcagccaataacgtctgtagaactcgacggtcacgtccctgtcggacgcgacgtcgccgaggaaaatcgacttcggcgcaatccagcccgtcttccagttcgtgtaaaacgggtcggcgtgggatgctcggatgttcctcgccgcttcgtcgacggtcttgcggatgtcgccgccgtaatacctcacgtgatggagcagatgcatatccgagatgtactcgatggcggtcttgtccccgttgctgccgctcccgccgtagtacagcaagggctcttgcctctcggtcttcgcgacgaggtcggaccccgcctcgcgcacggccagcccgcgctcctcatccatggccatgccgtcctctcgctactcaggcgcgtcggtacgcaccagcttgccgccctttgccttgtacagtcgtgtttacgccgaagtataggcgaaaggccatctacggccaaatcaggtccgacataggggagatcctgaggaggctctgcgagcacaagggcgtcgagataatcgaggggcacctcatgcccgaccatgtgcacatgctgctggcgataccgccgaagtacagcgtgtcgagcgtgatgggctacctgaagggcaaggcgctggaagacggcgacaagaggctcgccgcgagctacgtgcacctggaggaggccgagcgcatcgcgcggtcgggcaagctgtccgatcgtgaaagcgcgctgctgtcccccgacatcgcgttcatctgcctccatgcgggcgggctcgtcgccgagtgcggctactgcgggtgcctcgtcgacgagcactggggcttctgcgcccgctgcggcgcgcacttcatggaccgcaggtacgtcgacgagttcggcgacctcgacgtttaatgcgcggggcgcgtcgagcaagatcggccgacggctttcgaaggacgagggacggcgagatccgccgcgagatggccttcgaggacgcgttcagcgagcctgacggcgccgttcctagcgtttgcgatatgcggtagacctcgccgagcccgtcttctcgatggtcccgtcatcttggagcttcttgaggacgcgctcgaccgttcgcttgcttatggacgggttcgcatccatgatgtcccgcttcgtcgctgcgccgacgagctgctcgaaatatgcgcgcagcatgccttcgccgcctttggggcccgctgcaatggcgaatctcctgtcaagctccttgtagcaggccgtcatcacgccgagcatgtaggtcacgaacggggtgtagtcgttctcgccgtcctgccacccggcggagcttgcgccgagcgcctcatagtacgtttccttcgatctttcgatttccttttcgatcgatacgtattttccgaccgtgtatccgcatcggtataggaggagcagggtgagcagcctgctcatgcgcccgttcccgtcgttgaacgggtggatgctcacgaaatcgaacacgaacaccagcgacacgaggacgggatcgtacgttccggcttcgatttgcgctcggtattccctgcagatggcgtctaccgccgccggagtcgcggcggcgctcgtgggcctgaaccttgcgaccatctccccgctggccgacctctcggcgatcacgttgtcggaatccttccaccttcctgcgaacgagtcgccagtgaacctgtacaggtcgcgatggagctgcaggatcacgccgggtgtcacgggtacggcatcgtgcctttcgtggatcgtgtcgagcacgaacctgtatccggctatctcgcgctcgtctcggttcttcggctcggccttctcggccatcaggtcgcgaagccttttgtccgaggtcgcgatattctcgattttgtttgacgcgctcgtgctctgtattttcgcgacctcgacgaggctttccagcacgtccggcctcgtcgcctcgtaaagcgcttgtcttccgcggtgctccctcatatcgccgatagacgacatgatttcgggcgacataagggtgctgagcttccttgaatagtcgaattgagccatggggtatcttcgccacattccttgtatcttcgccaaatataaatgatatggcgaagatactccatatgtggcgaagatacaagggtggatgtcttcctgcgcgcaacgctctcggggaggggctttcaggatggccaagaagaagtgggtatgtaaaatacgtgattggacattgatggcctgaatcacgattgaccaaccagttatttaccaacttccaaccacatattttacatacccctaatttgttaccttaagaaagccccaaggtccttttcggtagcacggcagccgaaatagaacccaacgatatctcggtcgcgagcctgcgtctggcacgctcgacatcatttgagataccgagggaggttacgacgcggccgaagcacttctcaacgattgtattgagggcatcgcagtgattatcgaaatcgtgcgtgcggttcaagacggcaggggataggaaacgctgcatctgtccggtaaatgacccgtcggcatagcagacgtgagcgcgttgcatgccgacggcgatcatgctggcaagggaggcggggcagcggtagtcggcgtgcttcgccgctacaagcgcggctacggcagagaagtcgatctcctgcgcacggacgatccaggggatatcccagaggtcgcgatgcctgatatgcgtatcggtggcggagaatgagatgagcttgtcggccagaatctcctcgagcgtctggcaccggatcgtgaggttgtcatacattccatcaagttcgggatagttgaccgcgacccggcgaatcgtggacgtatgcgccggaacggacgcgatctccagcttgatccgctgtttcggcaaatcggggcgcgcgatgttggtattaacggacaccgtccatctccgcatcccgacgccatcgaaatcattgacgaccttgggctccctgacgctcacctcggtatcgtaggacttgagcagatcggagcgcagggtcttggagaaatcatccaggggaagcgaatcgaacttgtcgccggcgacgaaatcgaggtcttcgctatatcgaagcgatccgtagcagaggcggagggaagttccgccttgaaaggtgatgtctcgaagcaggtcgttcctcccaagagaccggataatttcgtaatggacgatttccttttcgatgacgggcgtaagccgggcgccatcgactttgctggcgatattacccgcaagctcctcaaggtcaatcaacatccacttcatcccaatcgataagctccaggctgcgtttcctcgagacgaggtcgtgcaggcagcgctcctcggtcgcgatcggcagccgattcctcggcatacggtcgagtattccccgtttgacgtcgttcgagtcatcgtccgtgtggataaactcgatggcaccgaatcgggtatcgacgaggccttctgcgcccgtggtcacgcaggagatgcgcccgagcgggatttgcgagatgaagccccactgcgatgccgcggactcgaggctttcgtaggtgacctcgccggggcgcaggaacgtcgcgatatggccgagcacatcgcagccgttgggatggaacagaaggtagaggtatgcgtcatgggcgacacgctcgaggatcccgtctgcggcgagcctcttgatggtcgagcggagcgtatcgccggactcaccgaaaagggttcccagctcgcggctgcggaaaagaatccgcccctccaggtcgcagctatgtaggatcttgatcgcctcgacgcttttcacggaaatcctccaatcttcctcccatcaattataccaatatggtctatgtttaaaccacttactctgggaacactggctaatcaaccagatcccccaaagtctccctggaacccaaaaaggcgtccgccatcagagaaacccatgggaaagcaggccccgccggaaaccggcgggccctacgcatgaaaactgaaaccgttcccaaaagacgcaagaaggcgccctcggaaaccgagggcgccttaccgaccgcatcgattataccgcgcgtcggggccgctggccaccgtccgggcgacccgggttccccgcggcggccctagccgcggcagccatctgcatagggctcttaccgcgttcgggcttgatcggcttgaagaactccggagccggcttcggttcgtctccatggtagaaatggagcccggcgacgggcgttccgtagcgaacggcctggctgatggtcgcgggcgatacgtgcagggggcgcgcggcggccgggttgccgtcgaaggtctcgccggtttccaggcagacgatgggcctggtcttagaatgtcgttccctgaagaactccgggcccggtttcggctcgtcgccgtaatagaagtggagcccgttgcgttcgacgcccgtgctggccgatgtgcgcacggccccggcggcgatgccgaacgcgcggcccgcctggaatgccgactcgaacgtctcgccggtgtcgaggcataccaccggacgcggtggcctgttgggaggcaggaagaaccccggcgacggtttcggcgcatcggcgtagtagaaatgcagcccctgggtgcaggtgccgcgctggatggagcggaagatgttgcgcgagtcggcgaagccgagctccttggccgcccgataggcggactcaaaggttaccccggtttccaggcaagtgatgggcctcttgcgtttggcatctcggtcggccatggtgttccccttacagtttgatcccgccgccatcgacaccgtcgcggatggtagcaccggccgcgacactcgcgcggcgtccgaggtcggcgggatcgggcttcgccttcgcggcgatctcgggcttcttctcggaatactcgacacgcccggcaaagggctcggagaacccgaagcaatcctgcggggtatagagatcgatgcggtcggattcccacttcccgcccctgggttccatcatcgtgtacttgatgtcacgcgggtcgatatcgaagtccgtgtcgagttcgatgcccgcggtgccgccgcacccgttgatggggtcgtagatgcccatgattggttcgtatgtgctgggcttgaccgtgaacgttcccgccttctcgcggttgccgcggcagatcatcgagaggctggcgtccaggaacgcatcgagaggcagggttgccaggacggtgagaccgacgagcgagttctgctgcgagttgaagatatcctcgcggaagctgcgctcgaacttggtaacggggtcgttgacgaccttctcgatggtcgtgccctgcgaggcgcacagcttgtcgaagatgctctcggggatgtccgcgggacgcgtgaacggcctgtagtcgtcggtgggctcatactcccacctatcgttctcaccctggccgcccctgtggcagacgcacgggaggtaatccgcctgccagtcgagcgcggaatcgacgacgtcaccctcgaaatacaggctcttgacggacagtatgagcgaggtcttgaaggtgagcccgctgaaatcgatatcgtagaagaacccgaaccgctcggtcaggtcgtcgcgcagcgattcgctgtcgacatagggcccatggccgagcttaccgccgtcgagtcgcgatttgatctcctgagcgagcgtatcggcgatttcggtacggtccacaaggctcgcctcgtagagcccgtcgttgaacttatccgtcagcacgcattccacggcatgggaaaggtcgctgacagtcagcccctcgtgcgtctcgattttctccgcgtcgatgaaaccatcggcccattcgagcgaggtgtcggcgagcagttcgccgcagacgcgagtcgcccactcaagctcctcgtaatcgggccagtaatcgagatggatatcctcgccattcaggatggccctcatgatatcctcccggttgaaccggttgcccgcgacatcggcgagcatcgaggcggcatcgtcggcgccgagcagcttcacgacgtcgtcatagctgtcgatctcgaggtcatcggtagagattgcgctgtcgcttgcattcatatcggccatattcggcacctccagggaaacggttgtccccatcgatgctacccgccggtgacccacacgagaacgccccttcccgaacgggaaggggcgtcatatgccagaccctagtgtttgatgccctcggcctcgctcaagccgaaaccgaccgaacgcactgccgccgcactggcggccttggcgacatttgcgggattgttttcaggctcgaactcgaaaccgatcttatcggaaagcagtttgaaggcgtcaacggtcgattgtatgcaattgcaagatatttcgtggcggagacggtcttccacctggtcgcggagatacatcgagcagagccatttctggaaatcgggctcgttgcactcagaagcatacgcagcaaattccgaaatgcttgagcagtagaagatacccaggaagaaatcgaggtccttggcggggatatcaaaggcgctcgcattcgattcaccgaaatgccatccgttggaatcgagtgcgagcagggcatagtcgaaactcgcgggcatacccgtggaattggggtcggaacgtttgatgaacccgtatacctcatcccaactgttggaagcgttgacaaaatcggaatccagctgcctatatcccgtatcggcgccattgcgtgccgccgcgcccttcacgggatcgagcgtcatggcatccccgtcgagatgcacgtccgtgcgatggaccggctccgaatctagcccgtcatacgtgaacacgtggacaggcgtcgggtagtcatcgcgaagcccttccggtgcggcttcgatgaacgcaagctggccgctgctcttgccgtcgggcaggttgatatcgacgctgatgccgcctgcgaacggcgtggcgacaagctcgccggcatcggtcattacggaaatggactcgttcatcacatacgctccttgaggcccaaatcgccatcagattgattcacgttccgcgcggcagcccaggcggccacggtcgcgtcggggaagtgcccccgcgcgcggctgaaatcgggcgcgacggtctcgcaccagcagaagtcgtagccgcaggtccacaccttctcgccgtcgacctcgacgggcaccgacatgtgaacgggcgtgccgtcgaaagcctcgatcacgcgctccccgtcgaataggatggggaaatcgtccccgtcctcgcacagctgcccgaccacctgctcgatggactcgcgcgggaagtagtagatcgggccgtagttccagccgacccccatcgggtcgcagtaggcgcgcagcccgtccgggttcccggtgcgctccgcgtagatgccgtcgatatcgacatggcatgcgaaaaggcagtcggcgccgcaggtctccccgacgggggcccgatcggcgacctcggtgaagtacgagtccagccacccggcacacgagacacggatccccggatcgcccttcaacacctcgacgatgccgtcgcaggcgaggcagccccggatgatattgcctcgggatgcgccccgggagagcatgaaggcagggccgtccgggccgaagcggcaggcggcctcgtcgccgcgccgctcgagctcgatggctccctgcgcgcgggcgatatagatatcctcgaaggtggggaagtcaggtttacgggagaagtagtccatgcagatcgccttcctagatatggggcccggtgccgccatcggccccgccggcggtcttggccgcggcggccttcgcagtctcatagagatacccggggattacctccctgtgtacccttttgccttccaatcgatacgccttcacggtctggaccgcatcgtcgacgcccttggcggccttctcgctgtacgaggggaagcactcgatccaggcggggcagttcccgatgagggccttgatggattcggcgtcgttcgccacgagcccggcggagagcccgtcggcgtccatgcccgcagcgtcctcgaaccagtcgaggcggttgaggcacgagccgtcccagccgtcgtcgaacccgaaggagggcacgtcgttcagcgtgaccccgccgaagagctcgaagaacttgcccggggccccgccgaaggtaaagtcgacgaacacgttcagcaggtatccgttataggacggatcggggtcgagtgcatccgggcaccagtagtacccgaccggtaggctctcgatatcctcgatgggcccgcgcacgatatacgaagggctctcgaagcgcctaagcgtatcgatgatttcagaggtgttcaatgtcttctcgtcaggaccgcaataggggttgaagcatcgagcccatgcggcgccggtggcggtcgtctcgctcgcgatccagtcgttgagcgccatgtcgtccgcgaaggtgagctccacggtctcctccatcgccatgtccatccaggaccattcaaggtccctgatcgcgaagcgaatggggctgtcgaacccggtcccgagcctcacgtcgtagctgccgtcatcgaggcggctgatcaggatacccggctcgttctggcgccccgagtgcccgaacgggcaccagaggaagccgttctccgcgtccaggtcgcgcagcgtcggcgacccctcgatgagctgataggtctcttccatggctatgcctcccgcctagtgcttgatgccgtcggttccgacggtgtcgggcttgacgctcttggcggcggcctccttggcagccgcggtgatatcggcgggtacatgcgcgggggtctcggcagtcatctgtccatcgagcaccatgtccccgtcgagatgcacgtcggtgcggtgatcgggctcctcgtcgcggccgttgtaggtgaaggcgcgaacgggtgtcgggtagaggtcgtcggcgcccgggtccgcatcgacgaaggcgatatccgcgcatttgccgccggggatgttgatgccgacgctgatgccgtcctccttggcgttggcgatgagctcgcccgcctcggtctggacggagagtccgccggcaccgacccccatgcgctcctcgagggcggtgatgacgtcgctgtatcgtccgatgtgctcatcgtcgataagaccgcatgacaggtcgtagctcgccatcgcggcggccatcaatgcgccggtcatgctggtgctgccctctgcgattcggatatccgccggatcggtatgctcggcggtatagcgcatctcgtcgtatatggccgccttctcctccagctttccgacctggttctcgatttgttccaccttcttgtggagcggttcgttgtagaggcgcttgaggtcgtggttgaaggtcgcgatgcgttcgttcagctcctcgcttggcccatcgatcttcttggcgatctccgcgaaaacgatgccttgcatgagaaccatcgcgatcccggcgcttcgcacctcgtccatgggagtctcgttgacctccatgaacgaatcgaacgtctcggccttgcgctgctcttcggctgcaagcatctcgtcatagtgcacttgctcggaaggggagaccacctcatcgaactgctcccgccagtcgcgatctacggcgcagtccggatggtcgccgaggaagaccagtctgctgcactcgtcttcgtcatgatgaagccaaaggccgtatacggcatcgtaatccacgcccgtgatggcggcgatcttggagaatacgttctcgcgcaccagggagtccccgacgccgagatacttatagatgtcgcctccgtccgccatgcatttcacggcgccggcaaaggtggcgagcgggttgatcctgtaaccgagctcatcggatggaaaggcccggatataccaatcgcggatactagacttgaaattgaaatgcttcttgctcatttcgccagctccaataaagagggtcggccagatacatcgaagatgctacccgcatcgcccattaacgagaacggcccttcccgaacgggaagggccgccatctgaccgcggcaaaactaagaaggcgctagatatgcttgccgctgccggccccatcggccgacacgtcggcgccggccgccttcttggccgccgcaactatgttagttgggctgttcttggcattgcttcgcttctcgatatcggcaacggcctctctggcgacggtaaaacgagggtggctaaatgcaccaaggcaacaagtcgagatgtaacgacgtgaatacggatccgaggtatagacggatccgaaatgaaccctatccgtcgccggaatcgtccagtcgagcgcttgaaaaacgaggtccgcctgtatgaacgccaactggacctggcaggctgcgaacagttcggtggcatggctccgaacggcctcgaggtcgtagtgctcggcgtagcgatcgcaacagagctcattgatggcatcgatagcaatagaatcggtgcgccactcgagatttggtaggactctctcagcgataccgtagagagcagggtcgtcaaaggatggcatgatctcgttcagcatagcgtgatttgcgatgctgaaggccttgccgaaatcgatatcgacagtggtaattcgcctagatctgggttcgatcacgagcttggcggcctcaatgaggcgccgctcgtcctcgccgatgtaatcgctattcatcggcgcctcatgccagacatttgaaacggtctcgtagctctctccggtgatctcggccaatttcgcgaccacgatgttgccgaagatctcgctatcggaaccgataaggttgttcaaatcgacaccgttcgccatgcccacgacgacgtctgcgaacgtgatatcgggacgaatcaccacctggaagctgttccccgggcagaaatccctataccaatcgaggacattcgaaccgagttcgtattgtttcgccgccataaaccatcagctccaaaaacaagtcagccagatacacagaagatgctacccgccctgcccggcaacgaaaacggcccttcccaaaaggaaagggctgccatcaatcgacattgagaacaaacagctctagatacgcttcccgccgccatccacaccagccgaaaccttagccccggcagctttctttgccgacgcggcaatctctgctggactgggtatcttctgggtgaggttcagataggtggccctcaccttaaatggatcatcgacggctacgacgacgaagttctcgtcggtcttctttccgatcatcccgcgcaactcatcggcggtatatccgcaggagaagatcttttcgccgatattgaggtctgatgagcacttatcgcagaaatacacgcgctgggaaacagacggatcgttcttgaagaaaatcaaagcgggggttaccgtgacattgaccgcgtcgagtggcgtagagccatagcgcgccatggggttcttcctgcgttcacgcacatctttcatagcctcctcgacctcgggaatataagggtcgtacagggcgtcgatgcaagagccgatcaaatcaccgctgtctggcaacgaatagattgatggatagaagatatcatccatcttggtgacggcatcgggctcgctgtaggaatagatgatgtagcccgcctggtccaaggcgacagaggcctgacaggagccgaagagctcggttgcatggcttctcagggcttcgataccgaattcctgcgtatctgcgagatagttaagcgcatcgatggcgatggaaggtccatcccagttgagtttgggaaggatatccagggcaaggcggaaggatatatcgtctttaagctcgatttgacgatgcaggcaactcgatgcgatgtcgcgggccctatcgaaatcgatatcgactgcctcgatgggccttgcatgggcaaagcgttcctcggcttccatttcccaatatagggtgttgaacagttcgtcactgatcaggccgtcggccttctccgagaaggtatagaagagttgcaacacggattccttatcggcaagtggggacagcacgagggcttcggattggctgcttccgaacgcctcgtacccgagaataccgacaagctcgtcgctccaaacgtcgagattgcagcccaggaaagatcgcgagtcgtggtaaccgtaatcgcccatgatcttggcgagtgagtcggggctgacgtagtcgacgccgtttcccgcaaggctctcatcgaacgtaaaggagcccatgcaggcaccccaccggctatcatggtcctcgatgggccaggccttcgcgtaatgcgtcacgccgtcaagcgtcgcacagcaaccgataccgtaatcgtcgcgggtgccgcaatcgtgaaaagaagcccccatgtccacatggagacccatggcgttatacaggggatcggtgaaggtttttctgatctcggagaagttgtcgtcaacgaggctgtccatgatgaaccatccaatcaattaaattaaaagcagataaggcaaaccgctctagatatgcttcccgccgccatccacaccagccgaaaccttagccccggccgccttcttagccgccgcggccattgcatcagggccgggcaagctgttgccccgataagcctcaagcgtctcctcgcacgtccgcgaggcctccatgaggaacgaatcgaaggtctcgccggtcagggcgtggaaaacctcggcgatagccgagcgtccgcttgcgtcagacctcgaatagaccccgaagagttcgattgcggcatcggtggaattgttcgccaggggctcgaacaactcggcaagcacggtatcggcgccggcggctgccttggcgtccaggtcaacgacctgctccatgagcccagcgacctgtgcgaccatgccgtcgcgccacgggtcgccctcggaaaccggtccgcctgcacgcaggtcctcgccatcgtccacaccgccatttggcccggcctgggatacatacggttcaatcccttcggccttcttcgcggcgtcaatcatatgcaggatgccttccttgtcaaactggtcgatatcctcgccgctcgcatattcccagaggccgagcgcggtatccaggtcgacatcgcacaggtcggcgatcttggagaggagcgagctggaaccgatgagcgtgtcgccgaggaaatcggaaagggggcaccgatcggcgaggccgataatgacgtctgcgaacgtggcgcagccgtcgatctcattgaggaaatcgtgcgcgatgatgttgtcataggagagcacgctattgaaccaaacccagatcctcgagttgaggtcgaacttctcatcgtccacagatcatcagctccaaaacgaaagccggtcagaatcagagaagatgctacccacaacaccccggcacgaaaacagcccttcccgaatgggaagggctgcaaccggtaaagtaaaccctagatatgcttcccgccgccggtctcgccggacaccatcttggccgccgcggccttcgcggcctcggcctgcgcgctgggttggggtgcgacattcacgcccttggggatcgggagcgcttcgcggcccgtgagccccggcgcttcgatgccgagcctgacgcacgcgcgcgccgccaggcggtcgagcccgatcttctccgcgaactcacgggcctccttgccgtcgagggcccagaagtccggtccgatggtggcgccggaccaggaatcggcgttgaggtcatacccgatggtcgtctcatggcagaagagcttcctgccgtccacatcgggggcatgcgtgatgggggagaagttcaggatgacgtaccgctcgcccgacgggggatcgatgccgatcgcatcgacggaaagcgagtcgggatatttcgtcccccaaccgtagccgaggccggagaaatcgaccctaccgagcccgtggaccgcctgctcttttttcatagggacgaccttcgacgttgcctccgacttctttgtcttgccgaccacggccgtgtcgccgagcccgagttcgcggcggcgcgggaccatcctctcgttgaaggcgagcaccgccgcgcggcactcatcggctcccgcggacgggatgatcggacgcccgtccagcttcgcgatctcctcggagtccatgagcgtaaggttctggaagaacgtcctcgcctcgacctcggaaaagtccgccatcgtgctctcgcagagccagtcgcgggcggtgtcgtggtcggtgaactgatcagcgtcctcgatgatggcaaaacagcgcgaacgcacctcgtcgttgccgagctcgtggtcccagtcgtcggccaggatgcgcgctcccaccgtgaacgcgtcggggaagtacgcctcatggtcgcggcgctccgcgggcgtgtcgtcgtcccagtcgagcagcatgccgtcgaagagcccgcaggtcccggtggggtcgagctccatttcggtatagtcccagcccaactcctcgacgttgccggaagacatcacgttgacggcggtgaagccgttgcagacgaccgccgcccacctgtcgagctcgtatttctcggccatgtccgtatcctttcaaacgcgccttacagcttgatcgcgccggcatccccggcgccgtccccgccggaacacccggcggccttcttcgcggccgaggcggcctcgcccgggacgggcttcttctccttgtcggcgagctcgcgcatggagtaccgatagcaccacgctttcgcctcttcgacggaggcgaaacgggttcccgcatccttgccgacagtctctcccgccgagaccatgaccttatagggcctgtctgtgccgccggtttcacagtagatatcgaacacagtctccccgaagcggtacgactgctgcgccgcgccgtaggcgcgctccgcgaaatgcggcagcgagcacggcccgacaccgggcgcatcgtagaggttgccgaggaggatatggaaatcatctaggtccatcttgccgggagcatagagctcgcctccgagtctgaaccccttgccatcgaacgataccccggagatgagccgcacgtccaggtaggcggtgccgtcatggtgggacgcctcgatgctgaacgtgccgttcgtgtcgacgagtcggtcgatccggcaatccacgagggcgtccgcgctgcccttcccgtcgatgaggtcgcgcagcgagttggccgcgacgaggccgcgggagggaccgtcccagcgcccgaccgaccccatggcgaccacggagatctcagccgggtgctccgggtcctcgccgcgcttcagctcgcggagcatggaatcgaagttggcgatctcgtcgtcgagatagaggtcgatgtccctgtcgagcgcatcgcggacctccttcatgagctcgtcggagtacagcacttcgcccacgtcgatcccgtgctcctcggcgacctcgaaggcgtagtctctctccgcctcatcggagaggtagtaggcccggtcgtagaggacgcgttccgcgggcatgaagagatccatggcgaagtcctttcggttggaaacgaaggcacgggactggtccggtcaccgctatagaccgatagtacccgaccaaatcgccaacagtcatggccacgcaccctctttcccgaacgggaaatcgacaggcctgtcgaggccttgaacgcaaaaggccccggacccgaaaagggccccgggccaaatatcacgccgacgcaagccaattcgctagagacggcgcccggcctcgaccgcgtcaccgcgcccgctgaggcgatcgttcatcgcgagcgcccccgcggcgaacttcgccgccgcggcgttgccgagcgaggcgcggtaggtgagcgtgtcgacgccgtaggcctggaccctgcatcccgttatcgcgctgagcatcgccatggcctcgtcctggctgccgaagtgtctgaccgtatcgggcatcccggcatcgacacggcgcacggcgatatcgcacagcggttcaaggccgcggggggattccccgagataggcgaggacgctgtcgatgccgttggaggccgccgccgcggagacctcgtcgaagccgattttcgagcagtcgagcttgacgccgccgacctcgaagccctgctccccgtcgcgcatgcagtaccacaggcaggggacgggcgcgcccgcatcggcatcaagggtgcgcgacaggaacgccaccccgtcctcgtcttcccagggcgtgagcggcgtgacgtcgcgcggggcatcctgcgcaacatgaagaggcgacatgaacgtgtcgtcggcataggcgccgagcacggtgcccgcgcggctgtactcggtctcgccgaacgcggcctcgatcgcgcgcagcacatcgtccgcatcggtgccggcggcaaagccgcgccagtcgcggaagagcatgccggagcggtcgatgttgtccgcgagctccttatagagtccgtggacggttccgggcaggtcgtaggcgtcctccggggcgatgggccgcccggcgagcatgaaggcctcgccgtcgcggatgtcctggtcgacaagcgtctcggggtgaaggccctcttcggactcgcccgccgcggtcctgtcgacgagcatggccgcgtagcgggcgtccccgccggcaatctcgaggaagtcgccccagcggtaggtcttctcgtcgggcgcatcgccgtccggcacgtactcgcaatcgaggtaggcctttaccgccgcgaagcggtcggggcattcctcaggcaggtggcgggcgatttcgaggatatcgctatcggcgaacccgtatctgcgcgacagctccttggcataatacgagaagtcgagaaggctttgcttcgtatagggaccgacgtggacgctctccactatctcgccgggagagccgagccaaaagtcttcgaagaaattgaggtcgcagccggtggctccctccacggcggcgacggcctcgcgcggttcgagaccgcggctcacgccgggctcgccctcgaacgtcctgccgctgaaataatccataagatcgacggcgaggtcgaaacgcaaggcatcggcagcgggcatatcgaacgacccggcctcgaaacgttcggtatactccccggtggaatcgtcgatgtcgctgcgcaggaaggcgatttggatatagtcctccccgttgtgggacaccggacggaacaacgcgcagccgtcgaacagatcgccgcacccgacgatctcgcaggtgtaggcatattgcgggtcgaacccctcgtactcgccgccgggggaaaccgaatcgatggtatccatggcgctgtagacgtggtcgcccgcgatcacgaggaaatcgtcccagcggtacacgtccgtatagccgtcgggcgtgtactccacatcggtatatctgaaaatatccttgaaattctcttcgtgctcatccatatcgatgcgctccaattcgtgaaagccggcactcttatacccgaaatggtagggccgccgtcccgcgatgcggtccggcggcccgtaaggttcccgaacgggaaccccttacttcctctgccgcttggtcggcgtcagcttgcccgagccggtcttcttgaggatcgacttggcggcatgcgccatctgcggaggcgtcttctcgtagagctttccggcctcgacgtcgtcgacgagccgttcggcctcgcccggcatgagcgtctgggcgcagacctgcctacagctcaggtcctcggactccacggcatccacgacctcgattccctcgcggcggcacggcgccccgaccaggtcgagcggagcgcggacgcgtcccgcctcgatgagcgcggcgaccttctcgcgggcggcctcggcgtccgtggcgagcgcgggatagctgaaggtgacggactcggagaccgtcaccatgtagtattcggcgccggcctcggccgccgcctcgagtctttcaaccatatagaccaatctccttacgacgagcccttgcccgtcggcggtttcttcttctttccgcggtccttcgcggtccgggccgcggcgctcttcgcgtgccccgcggtctcccgcggcgggcggccgtgcggatagtacttctcgggcggcgcctcgggcgcgggcttggcctcgccggcgcgccgccggcgcatcgcatggagctcgggaccgttgccgtccgcgtcctcgccatccatgcggcggtagcgccgcccatgcgggcgcatggtatcgacctctccgccatcgtccgcaccgcgctcggacggccgtccgtgtcgccccaggcgctcccgtcggcgctcacgggcctctgtgcgcgactctgcgggccgcccgacctctctggccggtacggccccgcctgtatctccgactgtttcccgacctgatttcacgtcggggcctccatcgtcggtccctgcggcccgcaacggcacgggaggggcctccgggcaggaagccgtctcgacatccggtcccttacggctcccgacccggtcgccggccacgggggagtcagcggtctcgcccttccgcgcgaagtgtcggccgatagtgccggcatccccggcggtttccgaagagggggaggtcgcaatctccatatccacccgatcgccatccgccctggagtgcctgccgatcgccctcatggccctctcgatgggctcccgcgcgaggttgcccacatcgacgcccgggccgccgcggtcttccttggcttccaccggtgcggggcggccgccgccttcgtcggggcgggattcctgcacgtcccccgccttcgccccggcgccgccgacggcggcatcggggccgttatccctatctgggccgctttcggggatgacgtcgcggcggtgcctctcgaaggccgcgcggtagccgttgcgcatctgcttgatgaggggcgccgcggtcttcacgatctcgttgacgtacatcttgagcgaggaggccttgcccttcacatcgtcgggcggaagcacggggctggcgcacccgggaccctgggcgcggaagtgcgcctcgatgacgaagcgggtgttctggtcgaggtcgacccatgcgaccggcacgcgctcggcatccggggccgcgtcggtgtcgctgtccatgtcggcgacgttgactatgcggtacagcccggcctcggcatcgctccatgacgccgccgcgatatcgaccgagaggtcgagaacgcgggccgcgcccctgagcatcgtgggaggcagtcccacgagaagcgcgggcgggaacagctcgtcgacatagaacagcccgccgcccgagccgcgcggcctggacttgacgcagtagacgcccgtgcacccgtcggcgggcttgatgtccgcgccggggaagagggacttccatgtggcgatgggcaggatctcgcgggatccgtgccaatcggatgcggcgagccccgcacagttcatcgcggacaggttgtagaaggcgttggcgcatcccgtgtgcctggaaagcgtctcgagatagcgccgccatcccgcctcgttcgaggcggcatggaccagatggttttggttttgcgcgtttaccgttcggacggtcggggtggccatggcgcgctagagcttcttgccgccggcatcgccctcggccgtggccgatttggccgcggcggcttgggccttggcgcagatgagctgcgggtcgcgcttctcggtagcgtccttgcagtaggtgcgcacctcgcgcagggcgtaggcgatatcctcctcgtccgcatcctcgacggcgagcgacttgcccaggctggacccgaacaggtacacgtcgccgtccgtacgcaggaagaggcgcacctcctcgggcttctcggtgaaatcgtcgacatggacctcgcgcgtaccgatgtcatcgaggtcggggatcgtgatgggtccatcgccgatcttgccggcgtcgaccttgtagacggccaggtcgcgctctgcgaaagtgacggggcagacggagacgtgcacaccgctgccgtcgaccgcgggccagacgttgacggtgggatagaagtcgccgtcgcactcgaagacctgctcgtagaactccttggcttgtttgctgtgtccgacccccaggtcaaacgagcggacatcgaggcggtcgtggataacgtcccaacccgcctcgtagatcgcatcgtcgatgtggttaccgagctgatccaacgcgcgctcgatattctcatcggtcgcggggatgggcacgccgaagtgaccgaaatcggactcgagcgagtcggcgatgtcctgacgccgccaccggagcgtgatgaactcgtcatcgtagagcttgccgccggtgggcacgtactcgcgtccgcaggccttctcgtagcggagtttggcgcgcgtcacgtcgtcgaagggctcgatcgactcccaggtgcgtgcattcgcgtcgtagccgcgggccaaggcatacggaaggcccgcgccgtccgcgatgaggctgccgtcgccctcggtcatcgcgagcagcgcgttaccgctcgcatcgtcgtattcgagcacgaaatggtccagcttgtcgttcatgttgggtctcctaacggatagggcggcggaagcaggtgtccgccgctggttattggtgcttatacccgcgatgtgccggcagggccgccgcgccgccgaatgcggcgctcgccgccgccgatgccgtctctggcgggtcgatcgggtgcgagatgcgctggcagcgccgcgcggtctgccgcaggtagggcgagatgtcgcgcttttgctccccgaccgaatcgctcggtgccgggatataggcgcaaaggggttcgacgaaggcgcggacggcgggcgatgagctggcgaaggcgcggaccttctcgatgtcctgatcgatgctatccacgcaaagctcgattttcccgcccaatcggtcgatcttctcgaaggtgacggtttcgttgccgatggccgcggccgggatcgttcggacggtgagcccgaacgaggggccgtctcccaggcggcaatgggacacatgcaccgcgctgccgtcgcccgacggccagaacatcgaattatggtgcgcggtcacgtcgtagacgcccctgtagaagttatccgcctgggagctgccgagaccgaggtcgagacgttcctcgcggatggaatcgacgatctccctccatccatcctcgatgaggcggtcctgcacatgcgcgatctgcccgatagcggtatcgatgttctccttcgtcgcggggatgggatagtcaagcgactcctccaggaccccggcgatatcgccacggcgccagcggcaggcgatgacctcgtcgtcgtggagcctgccttcgttgggggcgtagtcgcggccgacacggtgctcgaagacgaccttggcgcgcgtgatgtcgccgaacggtgttgccctggcccaggtgcgcgatccgcggtggtagccgctcgtaacgagatagggcatgtcggtgccgtcgcgcactgccgagtgggcgtcgtcggtcagcgcgaccagcgcgcaatcgctccatttgccatactctaggacgacatgcgggacggtctccatttcgatactccaatcatattgccgcgggcggtgtggcggtcctattgtttcttgccgcctcgtccgagctcgaccccgtcgcgtttcagcgcggccttggcggctgctgcggccatggcttgcggctcgcgtggaccttccctctgtccgagatctatcgatgcgtggagcctgcggtccttctcgagcctcaggtccgcgtgccttttccgggcggcgtagtatgcggcgctgtcgtcctcgccgccgccgaggccgtggacatgcgccatatgggcatcgacatgctcgaccatcgcggcgcccgccttctcgatttcgattgcgagctccgcatcggtgagcgcgcggatatccaacgtgtcggaatcgtcccggcgcatggccacgtcaagcgggtattcccgcccgcgcaatccctcgtaggcgagtttcgccttcacgatgtcgtcgaacagcgtgcagtcctcccagttgcgggtcggatggtcgtatcccatggcgacgatgtagggcgtgttgtgcccgtcgatggcaggcacgaccccgtcgacggcaccggcgatgagggcgcacccggcgacgtcgtcgtgctcgaggacgatgaaatcgatggttccatccatgttgaaactcccaaacgaaaagcgccgcggcaggaaccgcccgccgcggcaaagtgaactcagtgcttgttgccgacgtgctcgacggcggtcttcgcgccgccctcggcggccgacagcgcggccgcggcgatggcctgcgggtcgcggggctgctgcacggccgtgcgggcaccctcggtcaccttgcgcagcgtcggggcgagatcgggcaactcgccgtacaggttgttgaccccgaaacgctcatcgaacctatcgaccgcgacgcggttggcgaagttgcggatggcctcgatgccgtcgaagccgtgcttgtacacgcacagctcgcgtttgccgcccagtcgctcgatatcgtcgatggtgatctcgtcgtccccgatgaggcaggcatcgatcttgtagacagcaaggtcgccgtcctcgctgtcggcgggtaccgccatgacgaacgcggcgtcaccctcgctgctcggccagacgatggcctcggtggagttccagtgcccgaaggcatccctgtagaagtccacgccctgttttgtcgagagaccaaggtcgagcgcatcctcgtcgatgatggcgctgatggtctcccagccgtcctcgatggagcggtcctggaagctgccgtgcgccatgagctgaccgaccacgtcatcgatattctttttggtggcggggatggggtaggagaggtattcggagagcgcggtggcgacatcctcgcggcaccagcggatcgtgcagaactcgtcatcgcgcagcctgccctccgctagaggataggaatggcggcacgagcgctcgtagtcgatcttggccgcggcgatatcggtgaagtagtgcccggctccccaggaacgggactcgaaatcgtatccgtcggcgacgatgtagggcgaggcgtgcccgctcaggacgggctcgcgtttgttggacgtggcgacgacgagcgcggtgcgcgtgctctcgtcatattcgaggacgatgtgctccatggcgcagctccttaaggggagccgccgcggagaagcggcggcggagtggatattgccctgatgatagggtcgggccgctgtcatgtgaacgcttgttcccgaacgggaagcgccggctctagagcgccggcccgcgcccggcggcaccgtcccgcgcgctcgagcccgcggccctcttggcgccgcgggcctgcgtgcccgggtcggtgagcgagcgggagcgctcgcgcgactcggcggcgaggcgcgccacgaggcacgggtcggccgtgttgggcgacagcgtggcgcatgatgcggccagggccgcatcggcgagccgcttgaagccgtcggcgccgtccgggacctcgcgcatgtagtctctcgagtcctctgcggtgtccacgaacccgaagaacgcgcgctccttcccgccgtccgcgatgggataggcggcgccctcgatcaggacgcccccgtcactgcgcgcgtcgacgcagttgacgccgatctcggctgtatcgatcccgccgatgccgatcgtggcggagaacagtccctcggaggtgccgatcgcttccgggacctctccgccgaaccgccgggccgtcgagatcgccgtctcggcggccatgagcgctgtggcgtacagctccgggctcgacagcccgcgcacgagcgcggcgcggcagcacccggcgagcgtgtaggagttcgcggcgggcgcgatgcctcctgggaacacggggatgcccggcgtgttggccgtgagggagggggaggccgccgcgagctgttcgagctcgaagcgggtcggcgtctcatccagcaggtcggcgagcgcgtcggccaccgcgtcgagcgggtcgccggcgatgcggcaccaggtcgggacgtcgacggcgatgcacgcggcgtgccccgtcaggccgccgatttcccggtcgatttcgcttcccccgaccctgttgagcgtgtatccgcccgccccgctcgtgacggggcaggttaggatgctggagttctcgcgggagatgatcgtgtagtgcgcgccgtcgcagaatacggcggagtcgatttcgagcggctgcatggcgtgtcctttcggttttaaaggggacagggggccggaaaccggccccctgtcggacgtgtccttaatggcgtataccctaaaagcgccccggcttacatgccggccttgtgcttctcgccgccatcgcgctcctcgcggacggatgccgccgccgagcagcgcgccgcctcggcgacatcgtccggacagccggacgcgatgccgcaggccgtggccgtcgccgcggcgtgtgcggctgagtcctcgcagatgagcccctggcggcgcagctccgccacgcggccgcgctcgcgcgcctcgtcgtcggccacggccgcgcgctcgtgcttgcgctcggcctcgcgctcatcttcgacgccctcctcgatcgcggcggcctcggcctcggcgcgctgcgcctgctcgcgctgtcgctgcgcctcggcctcgatgcgctcctgctcgaggacggcgaggcgctgttcggcctcgtcgagctcggtctgcttggggaacggctccttggccgccttctgcgcgtcggcgagcgcgtgctgcgcttcgcgcagcttcagctcgatctccgcggggcccttcgcgtctcgggcgatgatgcggtccatctgggtaagcacggtgaatgctcctttctctccggaagggaagaccctgtccgacatgtggacgtgtttggcggcatcgaccgccaggccgatatagggcagccagtcgtcgtcgaggacgtgctggcggcgacacacgaccgaaaggccgcggtaggttccgatgatctcctcgcagccgggtcggacgccgtaggcggcgcggcgcagcgcccggatggcctcctccctgtcggcgatgtgtacgccgccgacggtgaggaagctgtccttggagccgagcgtctgctggcggacaaggtccgcctccgcgaacgggatctcgtcgtcggcgagcatgtcgcgctgggcggtcagcgcctcgacgagtggccggtactgcgtctcgatcttgtgctggacgtcggccaggccctccaggtgcgatgccatcatgagcttgagctggccgatcttgttctcgacgtccatgcgctcggccacggtggggtcgccctcggcgatctgcttcatctgggcgagagacagcacggtctcgtccaggtcgtccatcgttcgcacgggcgacttgttcgtgaagacctggctgatgaagcgctgcttgcgctcgacgatggagtataggtagctgtcgaacgtgccggtcgacacgtagcggaagtcgtggacgcggtcgaagccgttgccctggcgcacgatgcgccccaatcgctgctcgaggtcggacgggcgccacgggcagtcgaggtcgtggatcgcggccaggcgcgtctgcacgttcgttccggtgcccagcgtcgtggtcgagcccagcaggatgcggatatcgccgctgcgcaccttctcgtacagcgcctccttcagcttcgacttgcccttggcgtcggtgacgcaggcgatctcggactcggggacgccggcctcgatgaggcggcggcgcacgtcgtcctggatgttccagcgcccggaggcgggcgtggaggagtcgacgaacacgagctgggcgccgcgctcgccctcggtgcggtcgcggatgtcgaggatgttgcgcacgcactcgtcgaccttgccgcccgaaaggggctccatgtcggggtcgtcctcgaggtagagcagcttcgggtcgagggcgaccttcctgccgtcgccggtgatcttgagcatgttgtcctcgctcgggtcgcacccgttgtggaccttctctccgcgcttcaccagcgccttgacctccgcgagctgttcgggggtggcaggcaccgcgaccgcgtggctctcgagctcggggaggtccaggtcgaggtcgtcggcggtcatgatgtcgctgtagcagtggaacgagctcatgagctcggggaggttctggaacctcgcgaagcgtcgcttgatatccaggccgccgccctcgggcttgggctccagggtctcggtgacctcgccgaaggtcttggcccacgcgctgaagttcgagaccccctggctgtccagcaggttcggcgagaggtagcgctgcatgttgtagagctcggccatcgtgttcgtgacgggcgtgcccgtggcgaacacgatgttgttgccgcgtccgttatcgcgcaggtactcgcacttcatcagaaggtcctcgcacttggcggcgtcgctcgtctgcatgccgggcaccgatccgcccgacaccgcgaggttcttgaagtagtgggcctcgtcgacgaagatcgcgtcgcagccgacctcctcgaacgtcgcgccctcgagcgtcttggacgcgtttcgcttctcgagcgactggagcttgctcttgaacttgtcgcgcacgccctcgatctgcttgaccgagaagtccttctccccggcgccgtcctccagctccatgagtctggattcctcgagctcgtcgatgcgcgccgtgagcgccgccttctgcgcaccgtatgacatctggagtttttcgaagcggctgaatccgacgatgacggcgtcccagtcgcccgatgccgcctgcccccagaaccggcgcaccgagtcggggcttttcgccgcggcgtcggtgaggacgagcagctttgcgtcggggtagagcttgaggtaatcggcggcccactgctcggtgaggttgttcggcacgacgatcatcggcttgcgggctcgcccaaggcgcttgagctcgtgcatggcggtgatgccggtgaaggtcttgccggcgccgaccgtgtgcgcgatcagcgtgccctcgccgtcctggatgatgcgcgccaccgcgtcgcgctggtgcttcctgagctggatgtcgggcgacatccccggcagcgagaggtagtcgccgctgtacgcgcgcggggcgacgcggttgagctttcggttgtagatgtcggcgagcatggccgcgcggtcctcgtccttccagacccactcgcggaaggccttctcgagctcgcggcgcttggcgttggcggcggccgttgccaccgggtcggggatcttcttcttggacttttctgcgaccgggttgtagtcggggttgtccttctcgatctggatgaggccgccgttgagtgcggcggtgaggatcatgaagcagttgtaggagcccacgccccacttcttcgcgaccgactcgtccatgccgccgctggcggacgtaacgctccacctgccggacacctcggagtagcggacctcgaggccgcgcgcctgggcggcggtctggtagctgccgcgcaccctgctctcgtgcccgtagccgattttgaaggtctcgagcgcgaagtcgcggatcaccgacgcggggacccaggagcttccgagctggcaggcgatctgcccggggacgagcttgaccggctggacggcctcgaggcgcgattccaggcgctcgagggccgcgacgcggtccggatctacgggcgggacggcgagcttggcggcctccatgaagcgcgccttgtgctcgcggaagcgctccagcccctcctcggtggcgaggtcggacagctttgccggctcgccggaatagtagtcgaccaggtaggaggggcggccgtcgcggcggagcagatcggctttcgtgacacggtcctcggagcgctgcttccgctcgatgcggtacaggtactcgacggcgtcgggcgccgccctgagggcgcgggccagacgcatgccgttctcgatacgcgcctccctcacggagacctccccgtaggacgagcggacgggcggctcgatctcgacgccggcgaccgcgcggaaggtctcgaaatactccgacctgttgaggatgcccgagccgcccgcggcgaagaaggcgcccagctcctcatcggataggccgctgtcgcagacgaggtacttgattgcgtgcgagggcgtcttcgcaatgtcgatgttgatttggcccgaatagaagtcgccgaggccgcgggccagcaggtcgatcagtgggttgccggtggacaccgatgcgcggtcgtcaccgtcttgaacagcgatcgggcgcggcccgtcgtatgcctcgagcgcgagggggatgagcggcggccagcaatcccagctgatgcggcgggcgccgtggtcgaggccttcggcatgcgcgaagccgtccaccgcgaagcgcgaggtggtggggttcaggctgctctcccataagtgcgtcttgcgcagctgcgcgagcgcgttgcggacgtcgacgggcaggccgtcggcatcgacggagaacccaaggtgttcgttccaggcctgacgggtctggcgctccgcgcgcccgcgctcggcgtccagcagcgcgcggacgtgctcgagcttgccgcccacgtcgccggaaaggtactcgtcggcggtcattacgtgcgtcgcgtcgtcggggtcggtgaccacgaggtcgcccaggcgctcgagcgcggtctgcacgtcggtctccatgaggtcggcgaggaagtccatatcgaccccgccgcgcgcgtcgaccgtgacggcgagggcgtcggccgggttgccgacgtgctcgggagtgggcgcctcgggggtgacgaggcgcttcttgaggatgtccgccttgccggtcacctcgccgttggaatccaccttctcgaggctcaggagattgagtgctagcgagtggtccgtgaaccccttggaggggaacacggcgaggttcttcttggagttgatgcggccgtagcgctcgaaaaacgagtcgtattcggcggagagcctggcgatggcctcctcgacctcgtcgtcgtctgcgccggggtcgcgctcgagggcgagcagcgcacgggcgccgtcgcggagcgacagcattgcgcgggcgcgttcggggccggtcttgccgccgccgggagtgaagggctccacggcgtcttccgtgccgtaccagatcgtgccgtccgcggcgacggagaactcgaacttcgtgggcgcggtcgggacgaccgagatgccggcgggctccgctaccgcggccatctcgacggcgccgccccggtcgacgctgtcgcgcagcaggtcggacacgcggtcgccgagcgcgtcggcgccgcccttgaagctgacgccgagcgtgggccccatgggcccgctgacgatcgacatgtcgccgacggcgcggccgggatgctcgttgaagtatcggttgatgttgacggtgtcctcgaagggagaggtctcgacccactcgggaagctcgtcatcggcaagcgcgatgggctcggggcggcggcgcagcagcaggatgtcgctcagcgcctcggttcccgcctggcgcttgaacgtctcggccggcaggcgcaccgcgcccaggagctcggcctgctcggccagcgcgcggcgggtcgcggtcgagttcttgtcgagcgtgtagcggctggtgagcaccgcgacgacgccgccggggcgcaccgcctcgacgctcttcttgatgaagtagtcgtggatcggcatgccgtcgatcttgatatcgccgctgtagggcacgttgccgatggcggcgtcgaaggacgcgggggagacccggcactcctcgaggccggcggcggtgatgtgcgcctcggggcagagcgcctgcgcgatgcgcgccgagatcgggtcgagctccacgccgtggaagtccagggcgaggtcggcgggcgcgaggcgcatgaagttgccggtgccgcagcccggctcgagaatcgccgcgggcgtgtcgccatggccgatgccggcctcgcgcagcgcgtcgtagatggcgccgatcacgggtgccggcgtgtagaacgcggtgaggacggtatggcgctgggatgcgaactcgtcgtcgctgagcagttccttgagcctgtcgcggatctcgccccactcgccctcggcattctctgagaaggctttctgggcgccgccccagccggaataggcctccatggcggcgatctcctcggcggtggcgctgccgcgctcctcggcggcggcaagcgcctccagggccgccaggttcttcctggctcgcgtgatggggctgcccgcgcactgcgagtccacgcctgcggcggcgtcgatggactcggcgccatccgcggcttccgccacggcggcggcctctacatggcctcgatgatctccttgatcgcgatctcggtcgccatcgcctcggcggagttcgccttcttgatgaagctcggcaggtcgttcgagcggagttccgtcgtcgccccgcacgacttcatgcagcccggcgtgagctcgctgatccggttgcgatacgccgtctcgatctgctcgagataggattccgtctccccggatgccttcagctcggctacctgctccggcaggttgtccagcatgaactggtacctcatgccgcggactccggtgtacggttgcttcaggacggccatcttcgtctcccttccgagatgcgtcggcgggcgcctcgcccgcgatttggcttacataagaccgcgactcggcggctttgtcaacggcattctccgtgttttctgtcacggcgaacaggaagtcgtccgtcatggcgaaaagggagagctgtccttctgcctgtagacttttgcgggagcggcgcgccatcggtgcctcgccttcatggtcggttgtgcgttatcccggataccgtatccccatgggccgcgcacgccaacgcaccttcccgaacgggaagcgccggcccgggagaaccccgtccggcgccgtcttttcatatgtcgtcccgggcatccggatattgacggttggcatttggaagaatcaataacggacctgaaattaactggatgccgtgggtagattgcgaatatcgacagctagtatcttggtcggggttgattggaagatgatcagaagcgtattcatcgcaaggaaccggagcacaggattccattcgctgatcgaggtggtcggatccggcgatccggtgcccgccgcggcgcctatgggctccgagctggccgaacgcctgctacgctggggcacgctcgacgagctcgtcgaggccatatcggaatcgggtccgcttgtcgaccgcggcatctatagggaggagggaagaagactttccatctccgaggccatcgagatcgtcgatgggtccattagcggcgagcgcggcttcgaacgttgcaatgagaagtttctttaccttcagttgtgccttgaggggacgtctgcgacgggcagcgcttcgtcgctttatccgtcccgggcctccgtctcgcgcgacgtcaagaggcacggccttatcgagtctggcggcatcgacgagctgaggaggtggcgggaggccgatcccgggtgtaccgtcgtggtcgagcccctggaggatatcgtgctatgccgaaacctcgggtcgttggtgctgagactgatggcgaacatcgccgccgggtacgatgacgttctcgagagaagcggtttcaggcatttcgacgaaatgcgccgctgtcagatcgccaggaagcccaagggctcctattgggccatacccttcaaacacgacccttctatcgacatgaccctcaactactcgacgaggcgttttgggaaggtcttcgcctatatggtcgtcaacccgcttgagacgcgcatcttcgaccgcaggccgaagggggacggggatttctccggttcgctcggcaatgcggttctgatgtccgcgcgagatggggccggcgaacctgcgtcattcttcgatgtctcttggaagccggaggtcgagcggacccagctgtatctgggcatcgacgataccggctcccagggggacggggcggtcgtcttcgtggagtccgtcgcagagatgctggcagggctgacgacggttggaggcaatccgctagggtggtctgtggacgcgccttcgattttcgatgacgagccggcgcccatataccgtttccactcgacggccgccgcgatgttcggtgccgtcttctatcgctacggctacatcctcgcaacgtgcaagtattgcgggaacggcatcttggtaaagaccaaggggaagaggcgcgagttctgttccccgtcgtgcagaacgcggcactcgcaccgaacggcgagactctagagggacatcctcacagcatcgcgctgcggcttccgccctcattgccgcaggccccgcgcttcgccgcggcggccgcctccttggcgacgatatacggtgcgcggatcttgccgggatcgatctcaaggaccgggcatttcatctcgtcggaggccttggtttccgtatggggcgcgggcatctccagctgcgcgggcggtccgacatggatgttggcccccgtgatgacgtcgcactcctcgctaagcgaggcgatttcatccctgaagataccgattaggaacgtggagtcctcgagcctgccggcgagcttttcgcccagcggcgcgggcatatcgaagacgacctcggcgatactcccggcaccgggaaaccacctgtcgccgtcgtggatgtcgcctttctcgacattgaagatggcggtcgtgataccggcatcgggcgcctcgccccgggccgaggcgaaaagcagcccgggtccctcgcagaagacggcggtgccgtcctcgcccaacgccgccgcggccgccacggccggcttcttcaccgcgtacatgaacatggaaaacctccgaaaatcagtggcggacgagatgcgtggccgcgtcttccatctgcacgcggctgcgccgcgcggcgcacgcggcgcgatgtgccaggtcggcggggctcgccgtatcggctgccgggcgtttcccggcaatgggggtcccgtcctggttatctacccgtgaggcgtgccgtttgccctttagatcgagcaggtacgcttcatcatattcagagaagaccatgcaggttccgccttcggcgaaacgcttacggtagtactcgagggatgccgagggcgtggcattctcgtcggagaaggtctggaactccgtgacgagatttgcgccggacggccaacggcactcgaagacgatgtccgatacatattcgggcggatcgggccacgtgcactcagcatcggccacgctcaaaatgaccgtctggctcgtcgtgaccggctcctcgaggtcatattgcgaggtcacgatcatgaggtccaattgcggcgagaagatcgccacgtcatcttcgccgattagcttcgcggcatcgtcagccggggtctcgaaaacggaaatcatatctgagacggactttacttccaggatatctagatcggggaggctcatcccgcacacctctttctacctgtgtaccttgatgtctgcgcttccggtctcaccggcatgcgctgccgccttggcggcagccgctatggccgcggggctcatgcccttcgcaggcgcctgcgcgagggcatcgacggccgcgccgaccttcgcctcgatctcgtcgcagcgcgcggaaaccctctcgcactcctccttgacgtacttgagcgccgccgggacggggacgccgagctcgcgcatggcggtctccgcctcggcggagagtgccgcgaggtcgaagtcgcgggtgagcctcgcgctcggcatgtcgtggcggatggagaccgcggagcccccgaacgagaggggggaggactggaagccgtgccagccgaggcgcctcgagctgaaggtgaggatggtgcccgcctgcggtcgcgcggtcgcgcagaacccgtcggcaagcgtgcaggagatctcgatatcgcgcccgtggatcgtgacggtgccgagctcgcgggacctgtcgcggccgagcgtgcggacgacgttgaaatcatcggtcatcagccggtcgaacagctcgacatcgacagacgatgcacgaagctcctccatgccgtccaggaacgccaggatgccctcgtgcgcctgggcgcccatgccctcgatgagggggcgggagcggtcgagcctggcgatatctacgagcgtgaggtcctgcatgaggcggcgcgcgtccacctcgctgatcgaggtcttgaagttctcgccgatccactgcgatgcggcgaacgggtgtcccgcgaaatcgatcatcgaggcgccggcaccgccgatctcgatgcagttgcggcgcaccgattccgccacggacttcgccgcggcatcgatcgcgtgcgcatcccggccgttggcgtagccctcggcggcgcggtcaagcgcgagcaggcgggcgccggcgaagatctcggcggtggggtagatcgccgcatcggcgacgccctcgcccaggccctccaacgtgccgtcgttgcagatgagcgcacccgagacgcggtcgatggcggcctcgctgcaatcgaagccgccgtgttctgattggaaggcgaggcagatgccctcaccgtccgtcatggttgcgtgttttctggtcatgcttactccggggatctagtgcttgggtccgcgcgcctgcgcgggctcctcttcggctggcttggcctccgggaccgtcttggcgatttcccgggcgacggcccacatatcgatgccctccgtggcgcgcatgcggaagtcctcgtcgaagtactcggcgtctgcgcgtgcatgctcaagtgcggcttcggcgagcatggtgccgattgccgcgaaggggttctcgtagatgtcggactcgtcgacgtagccgtattcgatcatctcgtcgatgccttccaggagggacggccgatctcgtcggccatgtcgtggtagtcagcgaggtaggatgaggcggtgtcgtgataatacatgccgtcgccgtggccgccctccttccactccaggagcttccccttggcctcggcgaaggcggcctccatgggattgatggcatccggcagctcgggcatgtcctcgaatttcctgtccgcgagcaggcgtccgatcgcgcgctggttctgctcggtggcgacggcgagcgccccgaggagcaccggcatgtcccggtccttgagcttttcgtagaacgcgagcttgtcgagcgcgatagagctgtcctcggcgcggcggcacgcctccagcgcctcgcggtacgggtcgaggtctgccagctcctcgcgcacgcggtcgcggaccacccccagggcgagctcggatgccttgcagatgggggaggtgatcaggaagaagcccgtttcgtcggagagctggaaggacagcgacttgcgcccgtccctgtattcctggatcccggcggtccatcgaccgccggacatgttggcgacaagcgtggccatgcgtttgactgactgggtgagctgatcgtccagctcattacactcgtccaggtaaagggacccggaaagccagagctcggccgcctcgcgattcgagaaggtttcgcacgtccaggtgtccgggtcgaagtcgtacgcctcccaggtggcgacgccgagttcgttgccgcagcgtcggacgaggttgcggccggtctcgacttccattccgggctcgacggcacgcgtgaagtcctcgccgtagagcgaggccatgcgctccgcttcttctttgtcgctgacgtcgtagttccacaacatggcggtcggtcctttcatcgggcgccgtccggcggcgcgggtatattcgccatcgatgctatccgcgctggaccccgaccgcccccgcgcccgtccatgtttcccgaacgggaagcactcactcgcaccccagacgccctggaacgcgaaagggaagagccgccgcccgatgggcgacggctccggggcctcgcatatggttcctcattgcccgttggggcaacgcagcgtgcgcatctacccgaaaagctcgatgagcttttcggcctggcgctgcccgatgcccgcgatgcggcgggactccgcgatgccgattgcggtcatggcgctttgcgtcttcgccgagccgatacccggcagggccatgagcagacgcttcgccttgatgcgcccgacgacgggattatccttgccctcggccagggcggtcgcgatggtcacttcgcccgatttgacgcgggcaaggtactcggcgcgcgcggcgcgcatctcggcggcgcgcttcagtgcggcggcccgctgttcggggctgaagttgttcccgaaggcggccttcttctcggtcatggtcgtttcctttcagtcctgcggaatcgcggtcgcgacccgcctagagccattcgactacggtatcgccggaatggaccgaggcgaaatcgacgcacagggtccggcggcgtcccggctgcgtgtgcctgccgtcgttcacggtgaagatagcgaagctgtcgaacacttgcgcgagcgtgcagcgcaccttcgcgaggttcgccgcggtgccgcgtttcgagcccatgtgccccgagatggtcgcccgatggcccaccttgcccaaaaactgttcgcggtattcggcgatcgtgagccgcccgtccctcgcgggatcgcactcccaaccgaacaactataccgccgccatgcagagcatatgggcgccgtgttcgccggcagggtcgatgatcgacttcatagatactcacgccttccagagatctttcagattcggcaggaggtataccccgcaactgcctaaaagatgcgctcagaccgcaaaaaccctacatcctcgaccggatatggagaaatggggccgccagatggaacgccgcgccacaaggtagaatcgatagcaagcggaacccgttccttatgctgtcacaccttgggaacgcgggcaacgcaggtgcgcgccccggggccgggcgaaaacggcccctctcccttctctcaaaacatatctccgattgcaagcggcgccctgccgaaaccgacagggcgttcgccctgttcatccgcaggagacccaagggcgatatgtacccggacgccatgcccacgggctaccgtcaatcgtcccaacggatcatcgtcaatcgtcccaacgcagcaggtagacgcccatattagattggctggaattgaagggcgacgcaccccgcgagcaggcgggcggcggggttgtcgcagaaaaaggccgggagtgcagcccggcctttaaacctgaaatccgcatcgcccgcgtaactggctagcaacctgcgcagggtccgcttcgttcacctgtgattatacccggtggaccggagttgatacgcagatgcccggggtggagcccgggcatctaaccaaagctgaaaactaggccgcccgcgctccttgttgctcacacggggacgcatcgtcttctacggccatcttacccaactccggcaaggtatagacgcgccctcagattctatatttgagcatatcgacctcggccgtccgccgatctccctagcgcttcgcaagtgcggcgataagctcggcgcgctgcgcttccgtgagactgtccgcattgcgggctacgtggtgcacggcgtcatccagctcctgatcgcaggaggttccgatgatgtccgacggttcgaccccgagggcgcgcgacatcgcggcgatcgtggcaggccacggcagccgctcgccgttgacgtacctgctcaccgaggccggtgtgaggcctgccgcctcggcaagctccttttgactcataccccgttccgccgaagccggccgcgaggcgtttcccacatccggcggccctacgggacggatggggtccctccatgccgccacccatggaaaacgcgaaggcaaaccgggcgcgatacccaaaagccgcctgcctacacaggcagacggcggcattgcggccgaaatcgcctatttcctcttcttcggccgcgcgatctcggccggcctgtccgcggggtcgaacgacccggcgcggaactccacgcagccggtggcgccgcgcggcgcggcgaagaaccgccagggcttgagcgcgacatcgagcgataccgcatcgagctcgccgggctcgccctcgcgcacccagacgacgtcgatgggcacccgcatcatgcaggtgtggatcgaccggcagccagggaagtacaggccgcaggcctcgggtacctcgcgcttgagcatgagcccgcagaagcgctcgataaagcccttgcaggtatgggtgaggatcgggaccctcttgcccgagaccgtgacggccacggcctcgtcgagatatctgtcgttcatatcggatggctccttggttggggattagaagaactcgccgagctgtaggaccatcggtgcgagcatgagcatgatgatcgagggcagcatgagcagaagcatggggaagagcatcttggtggacagcttgttggtcatgtcgtcgaccctcaggcggcgctcggtgcgcacggactgggcctgcatgcggatgatgtccaccagcgacgatcccgcgcgctcggcctgcacgagcgacgccgtgaagaaggtgatcgagttcacctgggcgcgctcggccagtcccagcagggcctccgaacggctcgagtaagccgcctccttggcgacgcgggcgaaggcctcggcgatcgccccgtccatgcgggtgccgaccgatgccagtgcgccctcgaacgacgatccagcagagatgcagatggccatgaggtccagtgcgtcaggcagctggcggtcgagctcgtcgcgccattcggcgcggcgggcgagcagccacgcctgcggcgcggcgagcccggcgacggtgagcgcgcccgccgcggcgagcccctgcacgcctccgacgagaggcatggcgacaaggcccgcggcggcgccggcggaaaacgatgccacgcggatggcccagaacgacgcggcgggcatggtgacgcccgatcgcgagagcatgtcgcgcgtggcgtcggcgaccttctcgctcatgggcacgtatcgcgtgacgctgtaggtgagcgtgtccaggcgggtctcgccgcgatggcggcggctcggtcgcttgaccgggccggactcgatgccgccgagccgcctgaggcccacgaaggacagcaggccggcgatcgtcgcggcgcacagcgacagcgcgacgccgcgcaggatttcgatgttcacggtgcttccaatctatccggcgcctagtcgagcttgacgtcgcccatcttcctcatcatgaggtaggcaagcgcgtccagaacgacggccagcgcgataagtgcccagccggagggctggctgtagaactcgcggtgggagggcgagatcgcgagcagtgccgccatcatgaagacgggcaggccgaccatgatctgcgactcgatgcggttgagcgaggtcttcgacttgatggtcttgcgtgcctcgacgcgggcgcggacggtctgcccgacgttctcggtgatgtcggcgagcgagccgccggtctgctgcgagatatcgacggccgtggcgaacaggcgcaggtcgcggctgccggtgcggtcggcgaccttgtccagcgcctcgggcaccggagtgccggcgcggatgtcggaggccaggcgcctgaactcggacttgatggggtcgctcatgttctcggcgaccgggccgatggcctgggcgaccgacgagcccgcgcgcaggttcgacgcgatgagcggcatcgcctggcccagctgctcctcgaacttcttcttgccggagtcgcggcgggccttgaggtagacggggaagccggccgcgctgaccggcaggagcagcagcgacagcgggcccacgccgagcgcgagggcggtgagcgccggcagcgtcgccgtcgcggcccacacgatttcggcctcctggaccgacagctgcggggacgcctgctcgcagacggagacgagcgccgcggcgagctttccgctcggccgctcgctcgcggtctcggccccggcccgctcgcgggcgatgcgcccgcggcgcgcgatgacgagcatcgcgatgccgagcgcgaggccgggaagcgccggcagcaggttgacgaggttggattgcgcgccgcccatcctagaacaccgcctgggggttgaaccagtcgtcatcgacgaagacgccctcgtttgccatcttctcgatatggcggcgcatgaagcgctcgccggtcgggacgaaccagccggagtgctcggggtcgttcgggtcgtgctcgaagcggacgatcggggcgatcgtgacgacgtcgccctgcatgccctggacctccgcgatctcggtcacgcggcgcacgccgtgggagcgctccgtgtagatgatgaagtcgatggcctggctgatgtactcaaggatctcgcgcgacgacatgccggtgttcgcctgctggacgagcgtgcgcaggcgcgtgggcacctcgcggcagttgtcggcgtggatcgtggtgagcgagccgtcgtggccggtggtcatggcctggagcatgtcgaaggccgccgcgtcgcggcactcgccgacgatgatccggtcggggcgctggcgcagcgcgttggtcacgaggtcgcggtagtcgatgcggcccttgccctccacgttggcgtcgcgcgtctccatgcgggcgacgtgcggctggttcaggcgcagctcgggcgtgtcctcgatggtgatgatgcgctcctcgggcgggatgtagagcgagattgcgttgagcagcgtcgtcttgcccgatccggtgccgccggccacgatggtggacatgcggccctgcacgatggcgcgcatgatctcgagcatgcggccgtcgaacgacccgttggccatcagggcctcgggggtgagcgcgtccttgcggaacttgcggatgttgatgaggtggtggtcgaccgcgacgcccttgagcaccgcgttgacgcgcgagccgttgaagggcatgccggggcggacgatggtgcagtcgcacagcggcgaggcctcgtcgcagcggcggttcatgcccgcggcgatgcggtcgatggtgaacttcacgtggtcgtcgtcctcgaagtgcacgtcggtgagcatgagcctgccggagcgctcgatccacaccgagtcgggcccgttgaccatgatctcggaaagcgattcgtcgtacagcaggtcctcgagcggaccgaagtagtacaggtcgttgatggccgcgcgcagcacctcctggtaggcgtcgtcggcgatgcggccggtctggtcgatgaagcgctcgggcacgaggtggtagaacgccgggtcgtcgatgatggggccgatgaccgcggccgcgtcgcggtcgcgtcgtgccgcgtcgccgtcgggctgctcggtctggttgtcggatgagagctgttcacgcgcggcgcggtatacggcgcgctcgagcgcgatgaggtcgctattcagcatcgcttgccccctcggcggtctgcgggatggccgtgagcgtcacgttcgggttcgccacgatggccgcggcctggtcctcggtgacgtcgagcgtcacgagcgagtacccggcgtcaggcgagccggacagggcggaatcgagggcgatgatcttgacgttggcgcacacggtctcggcgctcgatgtcgttccgtcggagacgacggccatgacgttgacgcggtcgccgacgcgcagcagcggcgacaggctcttcgaggaatcgagcgacagggcgatggccacgtgtccctcctcgatggccgacgtgatgtgcgccggcgagctagatgcctggagggaggacagcgagatggaggtcccggcggtctgcgtggtgagcgaggtgtggttggcgacatccgagaccttggtcgcggcgtcggtcgggcagtacgccttggggacggcctgcgtctcgaggtcggcttcggtgatggtctcgccggcggcgacgtcgcggttggtcacgacgacgttgacggtgttcgcctcgttcttggcgatgatcgccgaggactccgcgacccgcatgccggagaacacggtggctcccaccgacacggcgatggccgcggcggccaccaccgtgagcgcgcgcgtgcccttcgaggggccggcgggggcgggcttgggcgctgcgcggcgcggcgcggtcgagggatcgcgcccctcggcgggcttggcgtccttcttgccctcggccttgccgaagcgcccgcggcgcttctcctcgcgcttctcctcgcggctaccgccgcgctcctcggcagcggcctcggttttcgcaccgcggtcatcgccggcgtaggccgggcggcttggttcggggcggtatgcgctctcctgcgcgggctcgtggcggtatgtattctcctgctggcgaacgtcggcctccatgcggcgggcgtcgcgcgcctcgcggcggggtgcaggggctccctgcggcgcggacggggacgcgggctgcggcgtcggtgccgattggcgcggcgcggggccgtgctggtcctcgtaggcggggcggccctgcgcgggtcgctcgtcgcggcgctgcgggaagggcgccccctgcggtgcggacggggcgcttgccgatgccgcgggcatgcccgtgatggggtcgatggtaccgcccgcggcggactcgaggcgcgcgaggtcggcgccgatcgcgtcggcgcggccgaagtcgccgcgattgatagcctcggccctcatggcgcgaagtcgctggatctcgtctcggttatcgttcatgtagcttggttcctttctcggggacggccgccggccgtctcagtctccgctttccccgctgcctgggtttcccttggccgccgccacgccgcgcacggcgtcgagcagcgcgcccggggcgtcggcgagccgggccgccgtctccttgcggccggtcacggtgccgtcctcgaacgtggcctcgaggctcccgttgccgacgtccgccggccggtacacgttgccggtcgagtagggatggatggtccagacggccgtggaccttgcagtcagcttgtcgcggccggcgagtttgaggaaggtggtctccgtatcgttggaaagcctcacgtagacgcccgcgtagcggtcgttggcgcccgactccgactcgggcagctccgcataccagatctcggcggtgccggtgtatccgttgcccgaaagcagctcgacgacctcctcgcgcgcctcgcgcccggggttctccgagtacttgacggcgttcgacatgcccagcgacgactgccggacggcctcgagcacggcttcctggccggtcttggccgaataggccgtgctgacatccacgccgaggcccaccgcgatgagcaggcagctgatggccacgacgaagatgacggcgacctggccgggaaggccgcgggcgcgcagcggttttcgcgatgccatcacagcacctcccagtccgtataggtcgtgtagctgtgcgagacgtggcgcgtgaggatcgtcttgcgcccgagcgagagcgggtcgttgtactcgtaggcgatatcggcctcgacggcgacgcggcgcgtctcggtcctgagcgtcgaggccccaaggtcgctcgcgatggagtcgccgtcgttgacggccccgctggtttcggtcttgacgctcgcgttggtcaccgtgagcctgctcttgtcgaggtcggtgccgccgcagacgaggtcgcggacgagctcgtttcggtcttgctgctgccatccggcggggagcgcgtcggcgagcgtcgccagcgagtgctggatcacggtgttctggtaggagagcatcgcgaacgacccgatggcgaagaggaacgtgagcagcaccggcatgaccaggatgaactcgaccgagccctggccggggaggtgcacatgcttgcgtgtcgttggaaaggctgccatgtcacgacctctctatctctgacctgatggacgacgtctcggaatggacctgccagccgtcgtcggtggcgcccttcacgccgagcgacttgagcgggaagatgcagctgacgtcctcgacgaccttgacggtgaccttctctcgcgcatagcgcgcggtgaccgacttgtcgccgctcttgagcgtgacgggcttcgacggcgcatcggccgaggtgacggtgacgctcgcggtgtcgccgagggcgcatgcctcgcggacgtaggcggccacggcgtcgtcggaggcggtggggttggccgcggcgtagcgcgccccctccgagctcgcggtctgcacgttcgccgtttcgcgcgcgaggtgcgtgtagtccgcgacggcgcagagcatgatcatgagaaggggaaggaccaggatgaactccaaggtcccctgtccgcggcgtccgcgtgccctggcggcggtcatgagatcgcccccgcggccaatgaggcgatcagggcgagcgagatgacgggcgcgagcggcatggcgctggtcttgactccgatctggtgcgagcacgcgatgaagaggagcgatgcggcgccgagcgccggcacgagcgtcagcacggtcggcgtttcggcggtggcgctgagcacgcatccgagcatgagggagtcgccgtctccccattcgccgccgacgcggcgcacgccggcgccgatggcccaggtgagggccatgccggccgccgtgatcgcggcgcccgccggcgtcgggcagaatgccagtacgcaggaggcggcgagggcggcgaggtgggggatcggcacgatgcggaagcggatgtcgctcgccgcgatggcgagcgacgacaccgccgcgacggcggccgcgggcgacattgcggcgccggcgaggccggcggcgaggtatgcggggacccagtgggcctcgccggcgagcgtcgggttgtagcggcgggcgtaggccccggccgcgcgggcgggcagcaggcccgcatcgatatcgcccgatgcggcgagcgcgtcgatcgtggagggcgcgacggcctggatgctgatctgcggcgcgatggcggcaagccagctgcggcgctgctcggggtccgcgcccggtgcgagcatggccgcgtcctcgcgctcgtaggacgagtagcgcatgtgctggtaggcgtgctgcaggagccacccggcgatgccggtccctgctgctatcgagagtgttccgagcatatggctcccttccgccgcgataagtggtgggcgccggcgtaaacggtgcgccctgctgcgccaccgggcggtggcggtacggctgctaactatgtacccaagcgcgggacgattcagccccccgcccaaaaatgggaagggggctgaatcgtcccagctcagcggccatttattcatatgtaggaattatggtgccgtcggctcgggaatctatccgacgtgcctagatgccggcatgggagccgttgacgttagtgttcttgagcgtgttcgcgacggtgttgatcttgttgttcatctcgccggacaggaacaccagggcggcgatcattgcgacggcgatgcagacgacgatcacgacccattcgatggagccctgcgcgcgcagggcctccttggcgcggcgcttcatgttgaagacgccgcatgtggcgatggccaggggcttggcgatgagctcgttcacgggagcctctttctctcgatggcggcgcggtgggcgcgacgccggcgttccccccgcgctcgggggcggtacggcataaaagatggacccggcggccgggaaagtcatccggtttcccaaaaatgggatggattgggcgtttaccccgctcacggccttgttcggaatgtgcaggctctatggaaccggcctgtcggcgtatgccgcgaaacatccgtcgtcatatatgtcggcatagccgagcccggtgagcgccttctcgagcgccgggtacgcccccgagggaaagaccgcgaaatcggcaccggtctcgccgatggctgccgcgtctccggtaagaacggaccgcgcctgccccaggcgtcggttccgccgttgagctcggggcagaagagctcggcgcgcgtgtcgagcagcggtcggtatcccgcgagctccagctcgctgccgacgtcgatatcgcagatcacggcatcgcccggcttcgcccccgcggcggcgagggaggacagcgcccccgcggccgattcctcgattgccgtcttggccggcacggtcgcggccaggcatccgatggcggcgaggagcgccgccgtgcacagcgacgcaagggccaacggcctccgcgcccgcggccccgccacctcgccctggatatcggacagggcgagcgccatggaggtcatcaggaagagttcgtttctcacgttggccagcgcgagcatgagcgttccgagcacgaggaggtcgcctgcctcgagcagggcccgcccgccgccgcggcagcgcacgcggaggcggtacagcacgagcgcggagacgagcgtgcacgcggcggccgcctgggccggcgccgcctcggtccacggtgcgagctcgccgatgcctacggatttcagcgaattcgcgctcatggtggcaaacggcaccatgagcagcctcgccccgtaggggttgagcatgcaggcggcagccgtcgacatggccgccgtgagcgccttgagcctgccgtgcctgtcgagcctgccgtcaagtatgaggcagcacgggaccatgagggcgacggtccacagcgccccgtggagctgggccatggcgaaccccgcggcgggaaaggcggcaagcagggagtcccgcccgccgcgtgcccatttcctgcccgccgcatagcaggcgcaaagcgccatgacatcgatcccgcgcggcgtcgagttgcacagcacggctatggcggcgccgcatgccgcagatgccgccatgtggacggcgccggtcctgccgcggtcgagggtgcaggcccaaagggtcgccgtcgcggcgatgtcgagcgcggcggccgcgcacctgatgccggcctcgccgaacgcgtcgaagatggcggccgcggcgatgcacaggggccactgctggcagatgtaggcaaggccctcgtggagagtgagggggtctgaggtcgggagctcgccgttctcgacaatccaccggccgatggcgaccatgtagcgggtgtcgggctggaacagcgaccagccggtaagggacaccgccgccagcgtcgcggcgcatgcggcgagcgcggccgagagcgacgcccatcgcaggatgcgcgcccggcgcatggtgtccgtgcggtccacgctattcaccgccttccggcagctcgaacagggtgtagccgccgccgtgcgcgagctcatcgaagtgcccgccggatcgcagggcgtcggcctcatcgtccctgacgaggaacagctcccagccccagtcctcggtactctcttccagcgaggtcgacccctggaggacgtcgacgatctcgcggtaggcggactccgccccggcgccggcgatgccctcgccccagatctcggggcgcatgtcgcagggcaccttgaagccctcccactcgagctggttgtacaccgagacgtcgctggagaacaccagcgcatcggatccggcgtcgtatatcgccgagaagatgggggacatctccgattcggtcacggatagcatgcccgcctcgccgcccgattgcggcgccagcgataccgcgagccccgagaccgcggcgatcagggccatggcggcgcctgccgcggcggccgcgcgccccgggtgcgccacgggctccccgagcgcccctgcgagtccgaacgcgcagcacaggccgcagaacaggccggcgatccacatgcagcgcgagtgcaggactcccgcggcgataccggcgagaagcattgccgcggcgccggccgggactctcgccccgcttcgccggcacagcgcgatcggtcccagcgccatcgtcgcgacgggaacggcgaaaagggggccgagctggacccataggggctgcatctcgacgatggcgccgccataggcggcctcgccgagcgatttcaagacatagagggacccgtcggcgccatatgggttgagaagcgacgccgcgcacatcgccgccagggcggcgcagatggggagcgcccgcgcggaccacgcgcggcgggccgcagggtcggcgagctcatgcgggttcggcagggcgaacgccgcggcgcacgcggcgagaagcggccaatgggccgcctggaggttgacgccggcgacggcgacggcggggagccacagcagcaccaggcgcctgccgtccctgaggtaactgagcataatcctggccgtgagcgtgcacagcagcgcggtccagagcgtcgggcgcaccgatatgtacatgcagatgcatacagaggggatggcgaggctaaacgccagccccgcgcgcgagagctttccgccggcggcgtcgagcatgaggcgggacagctgccagaagaggagcccggcgggcacgcaggcggacacggccactgcggtatagccgccgcgcgtgtaccacgcccagagccagacgtcatggagccattgctggacgacgatgccctgtccgggccagatggagaacgggttggtgcgggggatgccgttgcgggcgatctcgcggccggtcgcgaggaggaaccagacgtcggagtcgagcgttccggctcccgtcagggcgcgggcgagggtcgggcccgcgatgaggagggcacatagggcaaagatggcgccgtgcgtgcgcccgccatgtttgggtgctatcaaggtgactccaaggggtagatattcgaccgggagcatacgccttcgcggcgaaaagaagaaccccgctcccaaaagtgggaacggggcaccgaaaacgcagatagcgtgcggtgggaatatccgcaaaaggatggcggccggtgagggccggccgccgatggggagaatgacggcatataggggagtccgccattgcatatggggccgactggatcggatggtgggtcggccgggtcgccgtgacatagtttatcggaaggagtgacggcgttgctttgactataccccttggcggaacatcgtagacacttcgtaagtggaaatgtgttcccatcgtgtacgcggccgctccgcacggcatggtcagcgctcagcccttgctactcgcgacgccctcggccttcgcctcggtccacttgatgtagagcgtgacgtcgcgcttggcggtgaccgaggaaaccttctcggtgccgtctgccgaggtcatccagcattccgggacgtatctgcgccatgtctcgtcggcgatcatggcaaacacctcgccgggtttcaccggcgtgacgctctcgccccagtagagcgccttgtgcccctgcccgtcgtcgccgatggccgcgagcgccaggccgtcgagcctgtgcttttccggcgactgcgagaaatcgggcaactcgaaactggagcgggcatcgggcttgtacgcgagcggcgcggtgcggtagatgccgccgtcctcgggcctgagcgacccctcggcgtactcgatgcgcacggtgcagcggttgcgtccgtagagcttgagcgtctggtccttgacgatggtgacgcccgccgcgggctgggtgagctcggggtcgaggaaccagcccgagaagcccgtcgaggggttctgtccgtattgcccgttgaggttgcaggtgtccttcagggccttctgcgtcgcgatgtcgacgggggtgtagacgtctccgccctcgacgtcgaggtcgcggtacaccatgtccttctgctcgacgccgtcggcgtagtactcgacgcacgtcgtgaccaccggcacgccgcgggagacgagggtgccgagatagcggtcggtccagacgtagcggtccgttttgccgacggtccggatgccgagcatggcggcgacggagaggtatcccggtccccaggacgcgtctacggtcaggtcctcgctctttgagaactccctgacgacgcggccgccctgcggcttgcgcacgagatggatattcatgccgcagatcttgttgccgtcggcgccgtccggctcgatgccgacggcgggggcggagccgatgtcgagcggcgaggaggcggagcagttgacgtagaccgggtcggaccactcgccgctcccgttgagcagcttggtcctgatctcgaggtcgtagtggtccgcgatctcgccggtcagccagacctttaccctgcccaggatatccgactcggagtcgaggatgcgcgcgccgtcggcgccctcgacccactcgccgccgctgtagcgctgcgccgcgtagcggatcgatcccgggaaggcggagccttcgagcctgagggcgaggccgtagatagagtggccgccatgggggtagccgatatggcggtgcgcgagcgattcctgctgccatccccatgtggccacgccgcactgggcgaagatggcggcatcgtcctcgggaaggtcgtcggcgacgtcggacatgtagagcctgaagatcggcctgaccggcaggtccgattcgttcttgcatcccaagacccagccggcgggcttgattcccgcatccgggtcgtccgggtccgtgttgtgccacccgcagatcttcgccttgtcgccgatcttgagcatgccctcgtcgcaatggaccgagaccttgccctcaatgcgcgcctcgacgaggttccactgggcattcttctggatggcccagcgcccggggcacgccgcagactggaccgagacgctgacgcccgagttcgaggtgaccccgtctgtgtcgaggcgcaggccgtcggcatccgaggtgatgaagtagcaggagtggtcggtctcgttggagtcgtcgggctcgtggtggacccaccaggccttgctccggccgtcagagtcgttgatgtcccagatgtcggcatggctgttctggacgactccgtggtcgaccacgggcgccgcatggccgctgttgttcagcatgtgcgtcaggttcgggcccaccatgttggcgatggcgaacgtgaaggtgtcgacgccgtcgttggtgtacggcttgagcatccaggtctggttgacgccgcggtagtcctcccagaggcccacggaggcgccgttgccgtactgcgcgagcggcttgccgccgctgtactggccctggacgaggtcgagctggatgtccggcgccatgacgggcctgatgtagaagatgccgccgtagagggccacgtcgttgcggatgtagatcttctcgaccctgaaatcgcgggaaggggtggtctggctcaggaaccagtagttcggggcgtcggattctttgatgacgttctcgtataccccgaagtgattgtaatccacgttgtagacctggagcttgctccacacgctgtggcgcgcctcgcccttttgcctcttgacccagaaggacgggcgggtggacccccagtacgtggacccctggaagtcgttgaagtcgtagaagccgtatgagatccagtcgtaataggggtagccgatctggttcctgaggtcgccggcgaaacgggagcctgcgagctcggcgccgtcgaggtagacgtagcccttgttgtcgccgccctcggagatggtatcgacccaaaggccactgcctttctgcaggtccttgctggagcaccatgcgaacggcctgaccaccacgagggtgtagagctcgttggcgtagttgcactcgaagacgcacgcgaaggcgtacctcagccattgcccgtaatgatttatatagtagctggtgttggcgggggcggcgcagagccattcatggtagctgttggcgaagccgaagtacatgtccccctcgccctggcgtgggtcaaggtggacgagcatcgagtcgttggcggctccgaaccagccctggccgaggttgaagttcataccggcgagggcttcggccttccgggcgggcccgagcagggccaacccggccgcgcaggcgagggcggcgaagacgccgcgacgcgtgatcggcacctggaggggcccggtcttctcgtcattcccgtttcgacccgggacgatgttggttcgtggcgaggtgttcaaagcgatctactcctccttgagcccggcgagggcgaaacaggcgaaagcgatggcgaggtagccgatggaatacgcgtcgaggaggatggcgctgcgcaccgagagggcgaggaggaccgcggcgatgccgaggtcgagcaggcgcctctgggccttgcaggcgatggtggcggcgaccagcagtgcgatcgggacccaaacggcgcccaggcacccccgggtcagaaaccatgctgccgacgccggcgagtagtagcctgtcgggcaggacaggacgaccgacgcggcgctttgcagctggaagatggcggacggtaacgcggtcaggatggcaccaaacgcgatacgcctcagctcatacggttcgatgtctgagcgtttgatcatatcgatgggattcaattgtcctcctacagtcccaaaaaccaggacacgctcgtgtcctcgaaatatctggcggtctcgatcaggatggaggtggacatgagcgtctgcttgttgaggatgcgcgagagcgtcgagctcgatatgccgacggcgcggcagtagtcctctttcgaggtgccggtcctcgacagcgtgaacgccaggcgcgacgcgcacagctccttggcgtagtcgcggtcgcgctgtcgctgcatctcggtcctgtcgcgccgttcgttgtcggagcctcgctgcatacggtcccccctgcgatgtcctgttttctccacttgccgcgcccgcaccagcgtatgccggcatcgggcgccccttctggcgaatgcggtggcggggcggtcgaaactcggatggcgatccggattttgccgccttctcccgcatatcaggccgcggcgatgcgtttgggtgatgattggatagccggcagcggcctgattgcaaaattgatacccttgcaaacccgaatctatacatccgcgccgcgccgggcccgatttttttttcagatgcgtttaccgcccgcgccgccgtcgtctcccggcttcgcggcgagctgcgatgccagcgcggcgatgtcggaaggcgttcgtcccgcctgctcgatctgctcgccgaggccgcgccgaacttccctcatgaactcggcggacgcctggaacgggcccgttgaggggtcggcgaagcgcgtcttggcgctctcgatcgcccacttgggaaggtcgacgacctcgccgtccccgtcggtcgcgatgacgaggaagccgccgcggacgatttcggtcgccccgccgcgcgcccacgcccggttcggcttgagctcgctgccctccgcatcggcggcgcggaccagcgacacggtgacgcccccgtactccgccagggtctcggtttcgggatcctcgaggccgatggaggccgccgcgcgggccatgtcgggaaagaccgtcgtctctcgcggcaggtcgcccacgggcacgtagaccgccgagaccttggcgccggcggcgcgtccgccgccctgcgcgaggcaccgcgcgatatccgcgtcggcgccgtcgatctcgaagtcgcatgcggcgacgtatgccctcacggccttcgcgagggcgtcttgcacatcggccacggtatcggccgagagggccaggcgcggcatgtcctggagcaggatgccgcggcccaggtggtcggcgagcagcgttttcatgtagtagcggccgatgaggtagggcgcgggctccatgtccttgacgttgcgcgtcgcatcggggcggtcgtcgccgcggtggaggtagaactcgaccatgggcagcccgcccgaggatttcagggaccgccccggcagcgtatcgaacgggtcgtagatgactttgtcgtccttgccgtagcgcgccccgggaagtaccgggtgcatccagaccgactcgccgtccccggcgccctcgcagtcgacgcggatatcgtcggcgagtgccaggacggaatcggatgcgatgccctcgcgcaggtgtgccagcaggttctcgatatcctgctctttataggtgctcatggtcgctccaatgggtcgggatctatagtcgtgcgggcccgcctcggcgcgggcccggaaaaaccggtcacagccggttaccggccgcggcggccaccccgtgggttgttgccttcgtggccgccttggcggccgcggcgacgcgcgcggggttgtcgggcgccaggtccgtggctatatcgaccccgagcaaggcgcacgtctcggcgacgctctcggcgttgccgagcgtccaccctgccagttcggggctgcatccggctccgaacgccgtgaggacgctggactcgatatcgcacagcgcccaatcggccgaggtgaggaacttttcatcatcgaccgcaccggcagggtcgaaatatccgaccgcggcgtcctcggtggtctcgctgatgggatcgaggccgtagtcgcagacatccggcgagagcgggtcgatatcgtcctcgaggatggccgagaggggggtatgggtgacatggaacccgaagaactcgccgtccggtgccttgtccgggatgaaggcggtgccgctgtagacgttgtagaggaaatcgtcgaggtcgagcgcccggctcatgatctcggccgcgtccctgcgaaagttcgagtgctggcagagcgccgtcgcggcatcatgcccgaacagcatcgcgacgctctccggcgtttcgaggagggccgtgtggccggacagctcgacctcgacgcagccctcatgctcgctcgagaagaaggcgccgggcgtatcgatcccgtagaggtcgagcacgtccagcgcatccgcggcgttcaacggctcgatatagcttttcatattccatcacatccaaagacagggaagggcgcccgcggtacggtgcgcgggcgcccttctggtacgggttgtggaggccgcgggcgcgggctagagcttggcggcctgcgcgacgtcgccgccctgctcggcggtgccgtgggcggcggcgactgctgcggcggcctgggactgcgggttgggcgcctcggcgttcatcttggccttgtaggcctcgcgcgcggccttgacggcctttgacagctcgaacgggtcggcatcgagggtcttgagctggtcgttctcgtcgtacttgaacagatggacgggcatgtccttcttgacggtgaccgtggtgcccttgccgttggcgatatcggactcggtccagggcttgcggaaagtcttgaacttgtagccggagatgtcgatgccgttcatgtccgtaccagtcgggatggtgcagaggacggcaggccaggtctcggtcttcttgccgttctcgatcacgatgtccttgccctgcgcgtcggtgacacggcaccacttcgcggggaacttgatgctgacctcgttgtcgtacttttcctggtccatggcggtacctttcttcctgcccgtcgcacggtaggcggcggggcgttgatttgccacgactgtaccctcgggtacggtgtgcgtatagatggtttcccgaacgggaagcggctcgagtccgccgcggcggcgcagctcgtccaccgtctcgcgcagcctcgagatgtcgccgatgacgggcgcggcgagctgttctttggggacgaacccgtcgagcgcgaggatcgccaccgcgccgggcagggcgagcatcccggtgagttccgcgctcgcgtccgagtagtagaagtggatcgggtacttcagcacgacggcggcctccggaacgttgattccgagctcgtccaccgcgcggcgtatggcggttctgacctggtaggagagctcggagggcaggccgtcggtggcgatggagggcttgccggcgtcgtacttggtcgcgaacaggttgaagtcggtgagctcgccgttgccgtcggggtaggccgagcgcgccatcgtggaggactggttgatatccctgaacatcatggccgcggtcctccctacagcttcggcgccgtctggtttgcggacgccgcgatgacggcgctcgtcgccgccgcggcgctggcggagcgggcgaggtcggtcggcgtgacgggtttctcgacgacgccctcggcgatgtgcgcgcgccactcggccacggtttcgtccctgatctcctcgaacgagtactcgtcgagcgccggccagtcggcgcgcttgtcgacatagcaggtctcgcacaggtcgacgtagccgttgttcacggcgatctcgccgtagcggttgaagtcgaagcagtagaggagttcgccgtttccgcggttcatgagggcccagaactcggaatcgccgtcgaggacggtgtatgcgtagttttcctccggcgtcgagcgctcgagacaggtctcgtgccactggtcctcgacatgcatttcgtcatactcgtagtcgtatacgggcagatcgtccgcctgcgccacgaggttcatgagctcgtcgaggcggttcagcggctcgccgtattcgacggcggcatcgatatgctcgagcgccccgtcgggaaggagcgcaagctgcatggcgaggacgttcagctcgtcaaggtgggcgtattcatcgaacacctccgggcacctgaacggcagcgcatcgtagtccgagatatatatctcctcgtgctcctcatcgaaaaggccatgggagcgcagccacggctcgatcttatcggggtccatggggaggcgcatccaggtatcgtgaagctcgccctcgttgtaatacccgtagttgcccacgcagacgtcgaagccgtcgcggaaatcatgttcatgcttagccatacagatcagctccaggaggcagatggcggataggtgcttctccgacgatgctacccgcaccgctagggcggcaccacggtgtttcccgaacgggaagaccgccgtgccgcgagccgatagaaaagcgcttcccggacgggaagcgctgaaatagccgggcccccaatgggtatgagtctcgagactttgctacacgaggatgggggctgcgatggttgacgccgcgggatatcgccattggacggacgccgagctcgaattgctcgccgacaggtcgcttgccgccgcggatgtggccgccgcgacggggcggaccgagatggccgtaagggcggcgcgctcgcgccgaggcatctgccggaccaggtggacggcggaagagatcggccggctgcgagactacgccgcatcgccgaagcagatcgcggccgagaccggccgctcgctttcggccgtgtacgcgaaacgctccgagatgggcctgcccaccccggcagcgatgcgcgcggccgcccgagaggcggctgccgcgacggccagccgagcggcatcggggagaatcgggcttcatccctgacgcccccggggatgcgtcaatgcctgatgccgccgccctgcttcacgctttcggcgggcgcatgctcatcggagtagtcgtagaggaattcggtaaatccgtccatggcgtgcccgtcgttccagtccgtcacggcttgcgacgcgatctcgcggcactggatgaaatcgaggtccgggcggccgtgttcgatcatgttggcatagtcgtcgatatcgtcatcggtgaatacgagcgcatcgacgtcgcggctgtagcatccggcatgcttgccttcgagcgcggcatcgagcgcggcgcccgttttacgccccatcgcgccgacaaaggccctcgcgatctcgccgatgtcaaggcggccctcggagatctggcgcgagatgagcttggtgttgtcgcgctccatctcctcgaaccccgagatgaggaggttgtgcgcgagcgtgtggtcggacacgtcgccggcgcgctcgtcggtcgcgcggatcagggcgatggcgcgggagagggaggcgaacgcctcgtcgggcgagtcttccctcatcgacttggctgtctggacgagcagggcccgctgcgcgacggcgaggccgttccagttgtcgagcagcccgcagagcgcgctgtcgcgatagtagtgctccgccgagacgaggaggttgcgggccatgtcgtgggtgagcgtgccaccgtgaacgatggagacgtcgatcttatagggtgagggtattgcctcgatcgacgcggatgcgctcaggggcagcgccaggattccggcgcggatcgcctcggccgccctcgtcttcgcgcaatcgtccagggggcggcgtacctcccaatcgaatggaataccgtcgtcgagttcgccctggacccgagcgaagacggcgccgccggggagcaccatgtccgcgacatagtcggcacggcagatatcgccagccccgccccattcgccctcgatgagcctgccggtctcctcgctgaacgatatggttctccagaaaaaccaatatccggacggatagtccaggttgtccgtgatgctcgcctcgaggaatttgacaggctcgccctcctccttgacggcccacagggcgtaggcgctctcgcacttttccgggtcgaaatcgggatcgcacggcgtgagccacggttcatagtcgtccatacgctggactcctttctatggttgtcgtttatgcttccctctactgtgcgcggcggggacggtaatgcgcgccgctaggtcgcgccgtgcgcgcggcggcgtccttggcgcggtcgatggcctgcgcgcgctcgagcgcggcggcccgctgtgcgggctccctcttctcggcctcgcaggtgatcgtccagaacggatgcgtgacggatgccgggccgttcatgtcgatgacggtcgcgacgttgcatcccgcgcaccaggcctcctgcttgcggtcgtagaccgcggcgccctcatagccctcgacgtcgaccagcctcttggccgccctcatggcctcgcccagggtctcgaagtcgcccttctcgtcgtcgccgcatgagcagtcggtcgagacgaccgagaagcgcaaggcctcggcgccgccgaccttcacgcgctcgccgaggccttgcgtcttgaggtacatgctgatgtagtcgttgcggtagaactcggggcaggcgtcgatgccggcctcgtcggcctcgtcggtgagcatatcgaccgccgcgagcacggtgtcgcgcgcgcggtagcgctcgcccttgtcctggctccagctcgtcgggatgtcatacgggttgagcccgtcgcatcgcaccgcgcagctgaacttattggggtaggccgctatcagctcgtcggccgcgccgtagtcccagaggatatcgctgtagaaatcgtcgagcgtgccgtcctcgtcgatgcggaaggcgtcgacggcgaagccgaggcccgacggcgagagcgcatcgtcgaacagccgcgagtagaagaagccgatgggcttgccgggctccttgacgacccaggtggccgaatcgcaaaggcagtggacccagttgaagtccgggtcgctacaggtcttgaacattatggcctcccgggccgttgtctcgtctgaaatgtctagcccatgtgcgcgccgtgcgaggccttggggagatggcgcgtgggcacgttcgccgtggcgtcggcgcagtgcttggcggccgccgccaccgagcgcgggtccttggcggccgccgccttgatctcctcatagcccttgcccatgagctcggcggcgtcgcgcacggcgtccgagatgccctgcgccgcggcggacagcacgaacggcacgcacttcaccttgtcggcgaacgcccgtccgcgcgccgagatgttctgggccgcgcgggtgcatgcggcctggacggccttgatgtcgcgggacatgaactcgaggcaggtctgcaccttcgcggctccggcggcggccagctcgctgaacttgtagcggatgccggtgcggtcgagctcgcggctgaactcggcgacctcctcgctgttctcctcgatcgtgccgtccatgaggggcacgcacatgtcgaactcctcctcggcggcgggcacgggggcgtacgggccgtgttcatcggccaggcccacggcggcgcggttgagctgcttgtggaacagcttgctgttcgttcgcgcctggacgagcgcctggtggttggcgaggtcgacgacgtactgcttgacgtaggccttggccgcggccgggtcgccggtgatgatgtcggtcttgtccgggaagtgctcgacgagcgacgccgccaggcggctcgtcatctcgtcggccgagatcccgtccacggcgagcgtgcccgcggtcgagcccgcctgcgcctgggtgacggacgagaagttgcccgagccgtccgggttgaccccgaagtatgcggcggcctcgcggcacgcctccgtccagacgcccataagggcgagcttgcagttaagggtctcgttctggttcatgcggaggtcatcattgtccggcatggcttcccctttcgacggaaagttgatattccaggcaatcgtatcggcgggcgtcgtcttttgggtatgcgaaagcccccgtttcccgaacgggaagcgggggctgacggaaaggagatgctacctgaggttgagcgagtagttcctgacgggcgccgcggcgctcgcgcatgcagcgcccgccgccgcggcgacgcgcgccggggggacggccggaacgcgcgagtcgatcgccgcgctgcgctccctctcgcgctcggcgtcgcgcggcttgaactcgacgatgttgtcggccgtggccggctcgtcgatctcgtcgagggcgaccttggcgtgggcggcgtggcgcccgcgcgtgcctgccgggagtccggacctgagcgaggtgccgatgccgttgatgaggtctcgcaggcgctcgtcgtccgccgcggccgccggcttcgccgccgcatgcttcggtgcgggcgctgcctcggccggctcgactgcggactcgagcccggcctcgcgcggcaccggagccgccgccgttgccggggcgggcgccggggacgcctggcgcggttcggccgtggccttcgcgggtttggggacggcgcgcaggcggcgcatcagctcgcccagggcctgggcgatgcgcttgcgcccggcggcgagaacttcggagaccttgaggccgtggagcgaggagatcgtcttggcggcctgctcgcgtgagagctccccgatgtagtccgagatgcgcgattgcgcatcgaaatcggcgggcacggggctcccgagctcggcaagggcgcgcttcgcgagcaggtcgacgcactcgcgccggaagtcggcgctgctcttgtagatggaggcgttggcggccgcgaaggcgtcgaacgcggagttgaaggtgttcttctggtcgggcgatgccgtcatgcccatcgatgccgtcagggcgtcgatggtgccctcgaactcggcgtccagcgcgcggcggtattcctcgagcccgccgcgcgcggtcgagacggcgaggttgcccctcaccgtctcgaccgcgcgctcgcgggcggcgccgaccgccgccatgagctccgcgtcgttttccatagcagctgccacgagtcgatacgcctcctcgatatcgatgccgtcaccgagcccggatccgattgctccgatatcgagcgtgaccgagcgttgtcccgacgctgcggggggtgcgtccgccatgagtcgaccctgcctttccagaggttcagatgggcctagtagccctgcttgtaggtgctgccgtaggcgtcctggccataggggccgtactgcccgcggatgtcgccatgggtctcgggtcgggcatatcccgctccctctccctggtaggcgtcctggtaatcgtcctgtcggtacgtctcgggctggaccggggccgacgtcgcctcgtccgggcgggcggggtgatcggtatcagggcgcgcgatgatgccggttgcatccgcgtcgaggccctgcgccgcatcgaccgcgtcctcgaactcggcatcggtctcgtcggtgtataccgggcggagcgcgtcgtcgaagtggtcgacggttttgtgctcgaaggccgcctgggtcacggcgaacttgacggacgcctcggggacgctgggcgtcgaggtcgcggccttgacgttctcgatcgcgatgcaggcgtcgttcaggtggatgaagctgtcgggggtcgtgacgttgtcgttgatgaacttgtcggcgaactcgacggacgcgtccgtgtcgagcttgaacccgcggacgctgttcatggcctgctggtaggccatcttcgagattccctcggccacgtagagctggcaggggacgggcatgtcggcggcgtagccgtcgaactcgaggcaggcgtttcgcgccaggaactcgcagaagccgtcgacgatctggggtgcggcgccgtagaggtcgcagatgttggccgcgaaggcgtcgaccgcggacttgaaggtgttgttgccgtccttggagaagccgaagcggcacgcggcgtccttgcaagcctcgccgaacaccgggatgaaggagtccttgaagctcttgatgcgctcggcccagacggtgagcacggcttcgccgaacgccgcctcctgcgcctcggcgaatgccgcggcgagctcttcgttgccctcgagctcggcatccatgacggcgtagagcctggggaggtcggaggggttgatcttgcagttgaccttcttggagcggacgcgctcgaccagggcgtcgtagccgtcgagctcgaaggtgacgtccgcgccgtcgaatttcatatttcccattgagaggccctttcggtgagaagcggtgaggggtattcgaccacggtatggccgcgggccgaagtttgtaaccctttttcccaatcgggaagcgtttcataccgatatgcgggcacgatgctcgatttttgggaattacagatggagccccgtccgcttcgccgccccggtcgcgcaaacggcgcccatgtcgggaaccatgaacccgcgcccgccgctgatctcatgggcgtgcctggtcagcatcatggcgcgcaggtcgatcgcttccctgattttgtcgattctgccgcgctcgttggcgatgaacgggttgccgaggaggatgtcgcaggcctcctccgagaagcccttgagcccggacgggtcgaaccaggacaggttgcggcaatatctgccgagttgttcgtcgatcttgcgggcgaagggacgcatcatgccggcccgcggggtcgtgtagccgtcgaagggctgggagagctcgcggtcgcaccagagggcttcgccggtgtcgaacaccggcgccgcgcggagccattccctgctctcgctgtcgatgagcacgccgaagttgttccagtgcctatcgaagttcgccatgaggtagtcgacgacgagcatcttctccacgtcctcgcgcacgtcgagcccgtgggcggcgcaggcggacacgtagaaatcgtgcagcccgaggtccgaggggcgtttcgacgagcagagcagcgcccaggccggcacgaactcggtgacctggtcggtcatgggtttgcagcgggaggtccacttcatgaagccgccgtcctcgagctcgtaggcgacgtagtcgccctcgtcgagcagccgcgagcacaggacgctggcgatcttctcgttgaacggttcctggaacctgccggaggatcgcccggacttgaccagcatccgctgcccgccctcgatcgtccagcgtttcggcaggttgccgttcagggccgcatcgggcgatgaggcgaggaggtcggcgttgcccctgatcttctcgatgagggaggggaccgacgaggcgtcgtgcggaagaagcagctcgccgagctcttcgctgaaatcgttctcgaagcagtttacgtcgcgccatgtggatgcggatccggcggggcggatccaatattggtcggacagcgatgcgccgaaaccagaggccatgagggaggcggccgacgggtagccgacggcgcgaaggcggtccgcggcatcggggcggaaatcggggatgcccctgttcttgaaccagctcgagagcctgtcgcgcgtgatgttgcccgatgggtcggtcgccataaggggggcatgcgccgcatcgaggacgtgggtcttgccggtcacggcctggcggtcatggttccaggtgaactcggcgacctcgtggtcgctgcacatgagggtgagccgcgagagctcgggctgcctgctgtccatcatctggctccgatcgttgcttaattgactatggcgttgccgtcattttatcgcacggcgggcgccggcgcgcgaaccgttacgaagacccgtctactcccagtgcccggccacatccacgacccagtgcctaccggtcgcctgctgctcgtaatgtccctggtcctcgcttgtggtatatgagtcgtcggtgtagccatcatggttctgaccttgagcatacatcgcgtcgctatgggcatagaatccgttcttcgagtcgaaggtcgcgccgcaggcgttgcagatgaagcggccgtggcgcacgtacacgacgttcgggacccagacctggccgtagtcggtctcccagtgcccctgctcggggacccacttcttctgggattgcgcggagccggatgccgacgagctcgaggacgagccgccggacgcctgcgtcgccgcgttgcccttcgagtcgttcttcttggtatcggacttggtgtccgccttggcgccggaatcgtcggccttcgcgctgccgtcctcggccgtctcggacttgtcgccctcgtctgccttgggggcggctccggcctcgatcttgccgccggccgaatcggtcaccgttcccgcgttctgttcgtagccggcgtcatgcacgccgtcggagttccagacgccgtcggatatcacatgcccgcccgagccgttgacgacctccgcggtggtgccgccggagggcgctgcggcgggcgagttcgtgacggcgacctggacgttgccgccctcgtcgaccgcggcccaggtgacggtctcgatcgtcttgccgccggtctcgcatccgtcgagcgagcgggcgagcgcggcgctgcggcgggcggtggagtccacggtcgcggcggcatcgtcgccggcgcgctgcgtcacgaagacgcggcccttgccggtcgtgacggtgacctcgtcggcgggggcgccgacgtcctgcccgtcgagcgtgagcgtcgggcatatcttggcgatgtcggcgggggcgacggattcggcgccggccttctctacggccgaaggcgtgctgtcgatcggctctggtcggttggatgcgatggcgattccggcgccgccgacggcgagcgcggcggcgagtccggcgcagatcgccgctttgcggcgcgcctcgggctccgccaggaggtcgcggatcttttcaatcgggttgttcttcatggcatggtcctttcaagatatatgcttgttcggtttttcgtttggccggttccctccggtgcggtcctagcgcaccgaggaatattccgggagcatgggggcgcggtcgctgttcgccgccgtcggcggcacggtgtcgtccttcttcgttcccgcgtgtcggcggcaggccgagatgagatggaaggcaccctgcccgatgagggcgacggcgccgatcgcgcatgaggcgacgagcaggacaagcgaccccgcaagcttgatgagttcatagcccagcctgatgaagggccacaggattgcgagcgcgagcgctccgatgatgatggtgggcagcatgggtcgatcctttccctcgggttttactatgtgctcagtcctcggtatcgggaggatcgagcggcgcgatggcgacgtagtcctcgttgcgccggcggagcacgaacgtgatccggtggtcgtgggcgttccggcagaacgtgaacaggcggcgcagcaccctcgtgtattggttgcaggcgtattttcccattgtcctgtatcccgggtccacggggacgatggcgacgtatgcccggccctgcttgagcacggtgcagggcaccgacgtgtcgtgcacccgcttcgcgatcgaggcgaagttgttcttgagttcggttatgcccaccggcgcgggcggcggcagtttggcgcttccatccatttcggcacctccttccgatagtgcgtttatcgagatgggaagcggttttatcgctttcttaccttttttatacccgtttttatcccctcttttgtgcctcttttccatggtgtgacatgtttgtcggaaaaatcagccgacgaataccgtgagggtcctcgcgcggccgcccgcgaagttggccgagcaggtcacgagggtgacgacgcgcttggcgcctgcgcaaagcgcgtcgcagccgtccgccttcgccgtggcctgcgccgagagggccgagagccaggcgcgcagctccgcggtcccgttgaagtcgaacatctgtatgtcggcgaagctcttgtcgacggacatcgagaacgccgggtggaggctcacggtgccctcggcgggcgtcgaccagcgcatgtcgccgagggtatcgaacttctcctgccgccaggcgtcgcgcaggtaggtgaacatctcgccgtcgaagttgaggtggtggccgtagacaagcgcatggcgcccgtccgccccgcagcgcgggtcgaggtaggggcacccggaaaacgaccagttgcggtcgaagtcatggctcagatagaaccccttggggtcgccttcccggggcgagaccaccgggaaatccaccggggtgccctcgacggatacccatgcggcgatgtccgggttgcgcgcgcgcaggccgtcccagtcgatgccgtcgccggcatccgcctcgacatcgatggagagttccctatagacggcgtcctgatggaagatcgtccatccgatgagggcggcggctgtgagcgacacggcgcatatggcggcaagaaggatgtcgagcggtttaatccggcgtcgctgtcggcatttcatgggcgtctccttggggatgtcaagcgaaggggcccggcgcggatatgcgtcgggccccggtcgagggctatctatcgggccctgttctcagtagcggtcgcggtagctgtcccggtatccgtcatcgtacccataggggtcgcggtcgtaaccgtcggtatagcggtcgtcgcggtattcgcgctcgcgcgcgtcttcctcatatccgtcatcctcgccgtctgcgggagcggggtccggataggcgtggcagcggcggtagatgagcgccgcggctgccgccgccgcggcggcgagggtcgcggcgaggccgatgatgacgttgcggccggtctggtcgaggttggtcgggggcgccgtgacggccttcgccgtctgggtcacctggtcctcgtcatggtcctcgaggccgtcgccgccgccgttgcgggtgaggtccacgcgggcgtagttgtcgagcgaggtgccggcggtgtagccgtcggtggccttcatgcgcacgatggcgggcgcataggccgtcccggtccccgtgccggaatcgtcggtatgggagccgttttcggcggcggtgtcctcggcgctggcgatgtcgtcatggacgtccttgatgccctcgcggtcccagccgccgtcacgggtggtgaagccctgctccacgcggccgtactcgaagcggatcgcggtgacgtgctcgccctcctcgaggccgaggtctgccacggcgagctcggtggcctcggtcgtgggcacgtcggcgcgccagagcttccacccggtgaagtcgacggctcggccgtcctcaccaagggtggaggcggtggcctcgtcggacagccaggggttctcatggccgtcggtgagggttgcgttggcactcgactcgtcgacgtggtcatcgggcgtcttgtcggtcctgtaccagacgttcatcttgccgtcgtagtcctcgagggcctgcggcgtggtgatcgatgtgagctgagcacggccgtcgacggcggcggtcaggtcgtcctcgaccgtgaactcgtcggtccaggtgttcgacgtcgagcggaagtcgatggtgtaggcataggagccgtcgtcggatgccttggtctcggcggtgttcaggccgtcgccgttggcatcggtgtccttggcggtggggtcggcgatctcctgtcgcttgtcgatctcgccgctgatggagatgggcgagtcgtacatcgtgacgatctggacctcgccggtcttcctcacctcgaactcgatgctctcggcctggtcgtaggcggtcggcgtgcgctgttcggtgagcgtgtacttgccgggtgcgagcgcatcgatctcgtgatcctcggtggtcgaggtccatgagtcgatggtcgtgccctcggaatcggtgacggtgagcttggcgccctcgatctcggactcgtcggtgatgtcgcgcttggagatgcggaccttggtgtagtcgtcctcgaaggccgcctggccggagtcccggccatcgattcggccgtcggcgccgacggtgaaggtcttgatccccggcgcctcgacgtatccggcgggcgcctcgatctcggcgacgcggtacgtgccgggcgcgaggtgcaggaagtcagtcgagccgtcggcgccggtcacgccctctgtggcgctcttgccctccttgagcaggacgggcacccggcgggcgcggccgccgctgaccaagatgtaggtcggcccgtccccgtcgatctcgacctgtccggcggctttgccggcgacggtcaggtcgtatgtgccgagcccgaggtcgagggccacgtatgccgaattggcctcggaccaggcgagcttgatggcgggcatggcgtaaccgtcgtcggaaaggacggcatgattgccgagcaggccgcccgcgaccttggcggtataggccttgccggcctcgatctcgacttccgctccctcgagcgtcttgccgtcctgggtggcggtcagggtgtacgtaccgggtttcatatcgatggcatcgggcccgagctgggtttccaggccgtcggcggatttgaggacgagggaggttccgtcatcggcctcggatttgacgtttgcggtggatacggccttcctgatggagacctcgcttccggcctcggcgcgcacggcgaggttgccggcggcgctgccgatcgagatctcgtcgtcggtgttccaggcctggaacttcgctccgggaagcggcgtgtcggcgcccatgacggtcttatcgacctcgaacttcaccgcagcgtcggactggtcggatgcggctttcacctcggcggtggcgccgtccttgtaggagagggtgaacgccacgggcgtctcgtcgatcacatggcccgaggggggcttggtctcgatgaaggcgtaggccaccgagccgctgccgaggtagagttccttggtggtggcgcggccgtcctgcccggtcttcacatggtcgacgacgtctccggccgcggcgcgcacggtgccgtcgggggacacgatgtcttgctgcgccacgacgtcgtactctgcgccctgaagagcctcgccgtcatgcgagcatgtcttcgtgatggtcgccttgcccttcgcctgcttgtctgagaccttgatgacggtcacgggggaggccttcttgtagtccttggggacctcgaagccgactgcatcgccgttgacggtgtagggcgccacggcggagacctccttgatggagtacttgccggacttgaggcgctgcgggatcgtgacctgcccggcgtcgtcggtcgtgaaggtgtcgacggtgccgttgacgtcgtaggggtcggcgaagctcatggtctcgccgttcgagtcgagcacttggaacttgaagccggagaggggcacggtgttcccggtctcggcatcggtcttgacgatctggatgcggctgttgagcgtcttgtcgatgacggagtagtatttcgtggtgccgtccacgaggtcgtcggccgagatcgtccagtcgtccacatggtcgaagccctcgggcaccgtggaatcgacctcgcggatcgtatagcccgccgcgtcatagggcacggcgccggagatgccggcgttgcgcttgccagagccgaaccacgggcgcgccgggtcgtcggtcttggcctcggagacggagatctcgtcgcaggtggccgcgtccttggtggacgcgaagccggcatcgttggtcgtcagggttccgacgacctcattggtggtattcgagatgatctggaattggacgcccgtcgcggcatttccctggccgtcgtcggattcccagctgtcgtcctcgccgcccttggtcttggcgatctcgatatcgaacgaaatcgggttctcggagaagtcgttctcaggctcgagctcaaatatgccttctgcgcgagggtcatcgcgactaatcgtatatttatgaacagtagtgtccagcttgtagccggcaggtgctttggtttcggttacagtcagctctccaaggggaacatcgcgaataaccgcataaccgttttcgtcggttgtgacggtcacgggtccccatgagggcgatgacagggatgcaatcgagtactcggcacccttgagcgaagcgccggattgtgccccgccgagcgtagccgagtccttcttattgattttgatgcgcaccgtgccagggtcgtccttcagctgctcggtcccggcggagttgccggtcctgaaggcgatatgccccttgtggagcgtatagcccgcgggcgccttggtctcgacggcgtaataggcctggttgggctcgaggtcgagtgcggcattgccagatgcgtcggtgacgatatgcgacacgagcgcgttgtcggaggagcggtagatgtcgtactcggcgccctcgacggagtactcggagttgccgtcggtgatggagacgtttgccgagcacttggagaaggtgtagcggaccttgttgagtttccacttgatcttgaagaagccggcgccggcctgcgtgaaggtggtcgggacggtgacgccgatgatggcctcgtcgccgttgacggcggcgatgcgcacggtctggccgtagtcgtcgtcggtgtggatggcctggttgtaggaggcgtcgagctggccggaggggttcacgccgacgtgtccgcaggtgaggtcgacgctcgttgcgttggggatggtcacgccggagaccgtctgcgcggcgatcgtgcaggagcgctcgatggaccaggctccggactggagggcggagacgtcgacgttctgcgtgccgagcgcctggtagatcgtcttggcctcgtagcgcccgccggacgggttctcgaccgccggcagggtggcgccggtgcgggcgccggtgtacttgttgtggccggcggtatggaaggacatgccggcccagggcgcggactggaactcccaggttccgatgttgttcacgttgccggcgaaggcctcggtggcgagggaggagagccacgatccgacgttcttctcggcatcgttggcgagcttgatgtcgacgctgcgcacgccggctgcggcgatgaggatgtcgagcgtgccggtgtccttgtcataggtccacatatcgaggtcgcgcgtgtactcgatgccgttgacggtgaccgactcgatcgtggcgtcggagatcgacttgcgggcggccttgtcgcgggcgagcgcgatctgggtgtcgggggacgagacgtcgaccgaggcggttccggatttggctgcgcggccgtccacgttctcggcctcgaccttcacggggaaggtgttcaccgcgcccttgtcggacgtggcgtagaggagctggatgcgggaggacgcgaccttgtactcgccggcagagttcttgaccgtgtacttcttgggcacgtacacgagccccgtggccgcgtcgaacttgaagccgcggcgcatggcggcgtcggcgttgttctccgaggcgccccagtcggccagcgtcgcgcccgagatgtcggagccggcgcggcccacgaggtagtcggacgagtcgtcgaggtcgtacagcacggcatggctcacggcgttggatttcagcgcgtcgctgtagtcgcccatgccgtcgccgtccgcgtcggcccacaggccgtcgagcgtcggcgatgcggccttggcggaatcgatcgtggtggtggtgacggtcagcacgtcgcggcgctcgaacttgtcgaggcccgagagcgattcgtccaggttggccttgatgtaggccttgtccgaggcctccttggccagtttggccgaagcctcggtggcgacggcctcgagtgccgccgagccgttggagccgtcttcgtagaacgcgcacgtcacggtggtgtcggtctcggccttgaaggtggcgcgcccgttcacgacgtcgaccttggaggccgccgagccgtccgtcccgaaggtcgtgatcgagtcggcgaaccagccgtcgtcggccgtgacctcgacggtgacgttcgaccccttgtcgacctggaccgtgtcgctctcggcgtcctcgccggcgatggcgagccggccgtgatcgcctgcggcgagggtcacggtgacggtctcgggttctgccgccgcctccgcccatgcgctcggcacggcgggagcgaccaggccgagcacctggctcagggcgaagacgatggacagagcgcccatgccgaggcgcccgagcgccgcacgggcggtatggcttccgctgcctgcctgcttcatctcagcatcatcctttccatgtccttggcgccggccgggaggtcccggcgcggcgcccgtaatctgagatatgttacccagccggttgccggtctacaccggtgaccgcccggactttccgaacgggaagcgcacctccccttgctcctacgcccccgcgccgccctgggatgcgtcccggtagtcgccctggggcgaggccttgaggccgagcaggtagtcggccgacacgttgagcgtcagcgagaggcgcacgatcgcgtcgagcgtgggcgtgcgctggccgtggagcgtcctcgagatgaccgcctcggacacgccggagaactccgcgagcttcctggcggtcatggcgcgcccctcgagcgccgcggcgagccggcgctggcaggtcgcgcgcagcgccgggttgatgtcgagctcggcgaggggtacgcagccgtccccgtcgcgcgtgacggcggccatggcctaccgcttcccgccgcgacgccgcgagcccgtgcggccggcgctcccgcccggcttctcgctccggcagaactcgacgaacccggtatagggcgccgctccgagcttcgcgtcggtgtcgaacgtgtcgctgccgtccttcttcgacaggccggtgaggtggaccgtccctcccgacaggatcgacttggcctgcgacttggtgagcttcctgccgttctggacgatgttgagcttcacgccgcagccctggagcagccgccagccctcctccttgccggcccatttcgacgacgagcactgccactgcctgccgctgcgcgacagcacgatcggcgctccgcaggccgggcaccggcacagctcctcgcggccggagacggccgcggcctgcgcggggtcgaagccgcgctcgaggtcggacacgaccgcggccgtgtagccctcgatgccggagaggaagtcggacagcgacccctctccccgctcgacgtgcgacagggacagctcccacttcgcggtgagctcgggggtcttgagcgaatcgcacacgatgtcgatcagcgtctcgccgcgctcggtggcggagagggtcttgccgcggcggcggatgtacttcgcctcgatcagcttctcgatcatgcgggcgcgggtggctggcgttcccaggccgcccgagtgcatcgaatcgtcctcgatggcagccttcagctcgcggtcctcgatggaccggccggcgtgctccatggccgacagcagcgtcgcgtccgtgtagggcttcggcggggtcgtcttgccgtccttcacgcgaacgtcgccatcggcgacggtgaaggagtcgccctgctcgatgtcggcggggatgtcctgcgcctcgtcgtcctcgtcctcggcggccttgccgccgcccgcaagcgcgtcacggcacgcctcgtccacggcgatccaggaagcgtccgtgacggtgcttcccgaggccgtgtaggcgtctccgttgatctcgccctcgaccttggtcttgagcttcgtcgcggggtccatggtggcggccatgaggcggcagcagatgaggatggccacggagcgctctgcgccatcgagcttggccatctccttggcgtcgagcagcgccgtgggcaggatcgcgccgtggccgtggaccttcgagtcgtcggccacgcgggcgacgtcggagcgcgacgcgtcgaacccggccgcggcggcctcgccgacgattcccggcaccgcgatggctgagagcacgcgggtcgtctcggggatgtcggactcgccgatgtagcggctctcggtcctgggatatgtcgccagcttcttctcgtacagcgtttgcagcgcgttcagcgtttcctccgcggtgaggcccgcgcgcgtcgatgcgtcgcgttgcagcccggtgaggtcgtagagcttgggcgcgcggcacttctcctgcctgcgctcgaccttcaggatcgcgcactgcgacccgacggccgcatgggcgcggcgctcggcctcctgacgggtcttcagcttctcgccggcgaggcgcacgtgcgccgtcctgccgaccgagcactccacctggaagaaggggaccgatttgaagccgcggatcgcgcgggtccgctcgacgaccagcgccagcgtcggggtctggacgcggccggcggacaggcgcgagccttcgtagaggcacgatagggcgcgcgaggcgttgaggcccacgagccagtccgccttggccctgccctcggcggcgtcggcgaggccgtcgtagtcggagaggggcttggcgtgggcgaggtcggtccgcacctgctctggcacgagcgaggtggaccagaagcggcggacgggcttcttgcagccggaatgggtccagacgcgccggaagatgccctcgccctcgcggtcggcgtcgcaagcgttcacgacgagctccacgtcggcgcggtcgagcagccctttcaggaccttgtactgctcgggcgcggtgacgctccacctccaccgctccgggatcatgggcagctgcgacatcgaccagtggccggaccactgcgggtagttctgggggaagtcgaggtcgatgatgtggccgcggcaccagctgatgaggtagccgccgccctcgatatagccgtcgcggcgctcgtgggcgccgacggcgtcggcgatgccgcgcgcgacggacggcttctcggcgatgatgagtgtaggcatgccgctcccccctactcggagaaggagaccgagccggcggccatgtcggccacgcctcggtaggtcttctggctcgagggcatccagacggtgaacgtgaccgtgccgtcgtcgttgtgcgtcacatggtcgtgggagaacagcgcggaatcggcatcggcgccgccctccttctccgcggcgaacgcgcgccatgcgtccatgagcgcgccggcgcaggagtcgccgatatacttggcggcctgctcggtgtcggtgatggcgaaggtcttcttgggcgccgcggcgctctgctcggtggcgtcggcgtcggccgccgtgtcggcgcgcgagtcgatctggtcctgcgcgaggtcgtcgttcacgccgtccacgcgctcgagcagggggaagacggtccaggtgccgtcggcgtaatgcgccgagtagcagtcgccggtgcccttcacgcgcatgaacacgacggtgccgttatcggtggcctggggcttcttcttgatcgagaccgtgatctcgtcgagcccgtagccgttggcgcgcatggtcgaggccacggcgtcgcagaagctctcgcgcttggtcgcggtcatgcccgagagcttgtcgaagccctcgaaccgaacgccggaggtctcggacgggtccggcgacgcctcgactttcttctcgtcgcccgcctccttcccgtcctgctcgtcgcccccggcggcgctgccgccatcgaccgcctcggtggcgtcctgcttgccgccctcgtcgcccgcggtgcccgtgcgggagcacgaggcggcgtcgaggccgaagcccagcgcgatcacgcacgccagcgcgatcaggccgtaggccagcttcctcttggggtcgttctcgttggccgggttgaacctgtcggtcatgttcatgttcgttttccctttcgttcattcgatgggctagaggatgctgccgctgttgactgacgagcagacgcgcttgccgccccattcggccttccagctcgagctgccggggttgccgctcctgtagaagcgcgacctctccacctcgaactcgatgacgttctggccgttcgagtgcccccacttgttgcatccctggtcgttggggttcttcgcgtcggcgatgacgcacttgatcacggtgccgtccgacagcgtgaagtcgaccttgtcgccgacgcgcccgtacgtcgtcgtgcaggcgatcaggtagcggccgttgtaggtcgcgatatcgtcgtcgtacttcgccccggcgagcgaccacttggagtggaccgccgcctgcgacgtccctgccgcccacgcggtgtcacggccgttgacgtagcagccgcgcggggtgtagaaggtgacggagtacccgccgttgccgtactgctcggggatggtgacgcccgcccctccggtgggacgcaggatcgtgtcccaggcgtcgttccagtaagaccccagcgatacctcgtctcccgacgagtcgccgtcggcgccgtcgaggtcttcgtgcgcgccgtagtccttgccgtcgccggcatagatctccgtgtgctgcttggtgttgatgaggatgtcgccgcgttgcagggagtccatcttcccgtcccactcgaccttctcgaagcccgccttgagcagaggttccgccatggtggaggtggaaaacgggtacgtacccagctgctcggtcgtgcagtagcccgaatcgacgaggcagtagtagacgaacgacgagcagtccatgttggggttgtggcaacgcgtggactgcgagtacccgatggagtcatcgtcgacgtatcgctgcgcctgggccaggtagccctcggcgctgccgccggaagaagatgtggcgacgccgccgatgactgcgctgagcagcgacatcccgactaggcagataaccgcggtgccgcccaccgcggcgcccgccgcggccacgccgcgccagccgaagacggtgttcgtgacggtcgccttggtgcggcgcagctgcatgagcttgccgcggatgccggaggtgttcgtcccggcgagccggcccgccttggcgccgagccgtcccgccttgttctcgagccgcttctgcctgaggttgacccagcgcccgagcagggacttgtctgacatcccggcgcgtcgcatggtgtcggcgcgcttcctcttgtgctccagctggtcgagcaccttgtcctgcttggcgagggccttcttcgatttcgcgtcccagcgggccatgcgcctgcgggcccgtcccgccggcagcctgtcggcgacggcctttccctcgcggtacaggttgcgcgggtcggcctgggtcatcgccgcgttggcgacggtgtcggcggcgcgcgccccctcgtcggcgacctgggcgttgccgtcggaaagcccgatggccgcgctcatctccagcgccgcgcgggggctgtgcaggacgcccttcgcggctccattggccgcgcccctcgccgccccctcggcggctcccttcgccgcgccgagggcgttgccgacggactcgctgacgcggtccttgaacacggaccttgcggcctccccgcgcgtgagctcggggagggccgattccttgtagggcgcgacggcccgctgcctgtacgcggggccgtcgtgctgcacggcatactcgagggaggagtgcttgaccttctccatctcgagcgggctcgccttgtcggtgacggtgggcttctcgtctgccatggctcgggtcacgctacccgcggcgggcgccgtcgccgcgcccgtcctcgttggagtactggatcaggtcgtcgagcttggtggtcaccatgcggtagatggccgagtccgtcgggatgcggttctcgaacgggatgatcttgccgccggcgaccagcaggccctctccgggcccggcgttgcgcatcatcgcgacctggcgctcggagagcttgatgacctcgcccagcgccgcggcgtccgatgcggactggccgagcagcaccaggaagtcggagttcgccagcatcaggcggctcttctcgttgttgatgatgcgctcgatgttctgcgtgatgccggtcgggatggcgccgtacttgcgcgagcgggtccagagctggtcgaagtacgagatcgcgtagtcgttctcgaagagcagctgcatctcgtcgatgaacacccaggtgcggacgtggcgctcgcggttgcgcacgatgcggttccacgtctggtcgagcaggatcagcagcgccaggcccttcatgttgtcggcgcagtcgcggatgtcgtagacgacgaagcgcttgtgcgtgttcacgttggtcgggtggttgaacagcgaggcctggccggtgacgtagcgctcgatggtgacggcgagcatgcgtccctcgggctcgggctgctggttgagcatgttgtagaagtcgatcagcgtggggatgtcgcgctggtcgtgggtggcgaagtagcggtcgtagatgcgcgagacgcagcggtccacgagggtcttctgcatcggcgagaggttcttggccatcatctcgaccatcgacatgatggcgtcgaccttcatcgcgagcggctgttcgccctccacgagctcgagatcgaacgggttgatataggtatgcgagtctccggagatctggacgacctcgccgtccatctcgcgcgcgacgttgatgtactcgcgctcggggtcgagcacgatgacctcggcggtggggtcggtgagaagcgtccacaggatcgtgttcttggccgtcaccgacttgccgcggcccggcttgcccaggatgaagccgttgggcgcgacggcgtcgcggcggttgtagaagatgaagttcttggacgtctggttctggcccatccacatgccgccgcgctccatgagctcgaccgacgtgaacggcacgagcgccgcgagcggggcggtcgtgaggttgcgtacgtaggggatgtcgcagcggcccgtgggcagcatcgcggcgaaaccctgtcgctggagcttcacgaggggcactgcgcggcaggtgaatcggcggaacacgtcctggatggccccggagttctcgtcgcagtcctcgagcgagtccgcccaggtcatggtggtgcaggtgagcgaccacatcttctggtcgcggctcacgaggtcgtcgcgcaggtcgcgggcgttctccatggcgtcctggaggttggtcggcagcatctcgtcggtgatgtacatggtctgggagtgcttgagcacgtagtcggacttctgcaccttgagatcggtgttcatcgactcgatggtctcgatggcgcgcgactgctcccagctcgtcatgtcgagcgtgatcacctggttgatgggcagctccgccaggctcgagatcatgtcggagcgcaccgagcccgcccatttctggaggtagagcgcctggcccgtgacgccgttccatgagatatgggtgtcgtcgatcttggtgaggtcggcgggcgcgacgaggtccttggtggtgtagccgagctggatggcgctcacgccgtgctcgtcggtgaccttcaggtcgtcgaacgagacgaagccgcgcgggtcgcgcgggttggtgatcgagtcgatgatgcgcagaagctcgtttccgcggacctcctccgagttgacccccatgttcttgagcgagcgcatgacctgctcggtcgcgcgggcgagcagcggggacgcctgctcgcgggtcggcgcctcgacggtcacgatgaacagtcggcgcctctcgacgttctgctgcgtctcggcgaccttgctctcgatgatttggttgatgtcgcggcggaagcggttgccggcgtagtcgccctcgacgggcggcaggaaggtgtcctcgcggaacgcgtctcggtcgatgacgcggcacaggatcttgacctggaggtgcacggtgttgtcgaacgtgttgagaagttcggaccagttctcgtagatctcgcgctgctcggactcgcgcgccgcctggaagctggcgtcctggaattccacgacgcggctgtagacgccctgctggagcttgacggtgccgtcctcgcacagaagctcatagccgagcgcgtcctgcgtgcacttgtccgcgcgcaggacgagggtgccagggtagtcctcggtcggcagaaggcgcttcatgcccttcttctttcccgccttctccgcggcgcgctcgcggcgctttcgggctttcgcggccttcgcgttgagcttctgctggcggcgggcgtcgcggccctcggcgcggacgtcctcgcggctctcctcgcgctgcccgcgctgtccgcggccgtccgcgtcatctgcgcggcccgcgtcgcggtagtcattgtaggggtcgcgggccggctggggcgcaggctcgcggtatgacggtgcgctcgggcgcgccggggtctggctctggcggtagtagtcctcgtaggggtcgcgcgaggtgtccgcatatgcgttcttcccgtaggcgtaggcgtcggactcgccggatgcggcgggctccccgtaggggtcgcgggcggcagggccctgcccgccacggcccggggtggagcggtagtagtcctcatatgggtcgcgggccggttggggcgcaggctcgcggtatgcctgcgcgctcgggcgtgccggggcctggcggtagtagtcctcgtaggggtcgcgggcgggggatgccggggattcggcggcctcctcgcggccgtatgcgaacggcggctccgggctctgtgagacctgtgagacctgctcgtgggccccgcgggcggccggctgcggggccgcggacacggggatgtcctcagctcggtatgccggcgagggcgcaggcgccgcgggcggcgcggactggatggcgggcatggtcgcggtggcggtggcagacggcgcgggcgcggccaagggcgtgccgcagtaggggcacaccgcggtgccgtccacgagctcgcagttgcagttggggcagatcatgtgaatttctccgttttctctatgcctcggcctcggcgtcggcctccagcgccgccgccttctccgctttggtctccttcttgggcctcttgccggctttcgccttggcggaggcgcggtcgccgtgcggcgagagcgtcggcgcggcgaacagggcgaccttcggccagtcgcggtcggccttccagatggcgaaccactgctcgaacttgaggtcgtggatgcgcccgaggccgacgagcccgatcgcgccgcagacggacatgatcagcatcagccacagcgtgttgatctcggtgaacgacgagatcgccagccccatgcccgcggcggtgatcgcgatggccgctccggtcgcgacctggcggtacgtgaagccgaacagcggcctggcctcgtagtcctggatgtccttgcgcaggatgatctctaccatcagcccatcgcccccatgatcgtgtccgctatatgcttggattgcccgcacagcgccgagaagccgaagcatccggccatggacgcgagcagagagacgatggtccagaccgagtcatcgatgccggcattcggcttggtcgccagaagcgacccggcggccgagaagcagatcccggcgaaggcgatgatcgttatgaggatcgccgcctgaaggcacacgccggcgaacttcttgaagtacccgatgccggacggcctggtctcgcgcgtcgtgagcatcacgagcgggaagccggcgaaggccgtcatcaggtagatctcgaacatgcgggtgatggtgagcgtgaggaccttgatcaggcacaggccggtcgagacgaggatgaccatcgacacgagcgcgtagccgaccgaccacgcgaactggctgtacctgatctccatcatggagagcatgaaggagttgaagccgacgccgccgatctgtccggccgccagcgtgtcggagaccttgttggcgacccacaggaagacctcgtacacgccgccgcacagctgcacggtatggctgatgaggaccatgacgagcgagaacttgacgatgatccagacgtagttgccggccatcgagaagtggtcgccgcggttggtcgagacctccttggagaactcgagaagggcccacacgcacgcgaggccgagaaagcccacgcagatcggctggatcaccttgaccgagacgtcggcggccgccgagtacatcttggcgaaatcggacccctcgccggtgaagtcgagcttgagcagccccgacgacgagatgcattgcagcatcgcctcgccgcagtcgacgcagaagctcgcgatgccctcggcggtgctgtagacgaaataggagacccagggccctgcgtttacgacatcgaaacccggatactccccgcaggcgcccatcatgaggtcgtcgtcggtccacatggtgttcgtggtgatgctggagtctttcttgcggtccttgatcgcctggtggtagtcgtccttgtatttcgcctcgaagctctccttggaggtctccacggccagggccggcgatgggcaggccagtgcggccagggccggcgcgacgagcgcgagcgccagcacggccgcgagcgcggcgcgcaagggggcagagggccccgccgcgcgcctatcttttcccgttagagcagtcatatggagttccctccgtcgtccctacatcgtggggaaggtgaggtagctgccgccgaccaggccgatggccgccatggcgccgccgagggcgatgacccagaccgcgccctcctgggcctgcgcgtcgtgggccttgccgccggagacccagcggaagacgcccacggcggcggtgattccgccgacgaaggtgaggatctgccacagatagttcaggagctggttgaagaaagccatatggggttttcccttctgattcgcggcgccgcccgtgtggccttggcgccctgtttgacccgccgcggcgggtgagatatgacgaccggcggggtctcccccgccgggggcctcctacatgaagaactcggggtcgaagaacgaacgggcctcctcgatgcgccagcgcatctcctcgacctcggcgcggtgcgcgcgctcgcgctcgcacttgcggtcccagttccagtcgtccaggttgaactcgccgacctcgcgcagctcgtggtagcgcgggtggtcgatcgtgcggtacttcttgtcgaggaacgggaaggcgttcttcacgaagacgatgcagtcgtcgccgccgaacttctcggggttgttgccgaggtcggcggcggccatgagctccttgccgatcttgttctcgctctcggaccacgatccctgccgcccgtgcgactcgctgcggttgcggacggtggcggtgaacttgcccaggcgctcggagatcttcttgttggtctcgaggtcgcagcggcccaggaacagcgtcgtgtcgcagttgccctcgatgatgtcggcgttgtccttgtacatcttcttgagctgcgtgaccgattgcaggatggccgtgatgtagatccaacgcgagcgcagggtcgcgatcttgacgtcgaggtcggggatgcggccgatgttggcgagctcgtcgaggatgcagttgatcgggatcttgcagtgcgagccggggttcctgtcggcgatggcagtgttgacgtcgaacagctggtagagcagcatcgccaggatgaagttgaacgtcttgtcggtgtcggacatgaccaggaagaacgccgtgcgctcctcgccgatcatctcgagctccagctcgtcctcgctgaagaactcgcggaccgcggagacggcgaacggcgccaggcggacgttgcacgacgcgatgaccgaggcctcggtctccggcgatccggaggtcgacttgaagcccttgtactgcttgatgacgaagtactcctcggaggcctgcgcggccgcctcgtcgccgccgtggttggcgacgatccattcctcgaagccctggaagccgtcctcggcggtcgtgccgagcatgatgatgtccagcggggtcttggtctggctagggttgtccttgccggcgagctggagcaggtcgagcatctgcgggaacgtctggtactgcggctggtccgcgtagaagtagaagaggtagcccatgagcgccatgtacagctgcctctcggccttgacgaagaagtcctccttctcggcctccgcgttgcccgacgtgttctccaccagcaggttgacgatctgcatgatcgacgtggagtcctggaggtagagcagcgggttgtagtgcatcgattggttgatctggtcgggcttggtgttgacgaccttgagcttgtagccgtggcgcaggaagaagttgccgtactgcttgagcgtgtcgcccttggggtcggtcgtcacgatcgagctgttgagctggagcaggttggggccgacgaagttgaaggtcttgcccgagccggagccgccgagcacgtagacgtgcttgttgcgctcgagcgccgggtcggggatcttcgacatctggagctcggcgcgctcggacaggatgatgttgtcgtcctcgatcttctcgacgtagtcgggcttggggttggcgaccttgttggtcatgccgagcttggccttgatgaagtccttcgggttgttgcgggcgaagcgcatcgcgtcggcggagcgctgcgggatgcggatgggcacgcgcttcacggtcgaggtgtgcgcgaactgctgcatctcgtcgtcgcgcgcccagcgctggttgccgtactcctcgccgcgcagcttcttctgctcctcgcgctcgccggtccagtcgtattttgtcatggccaccagcgcgatggcgccgaaggccaggaagaagaacggcatcgtgcgggagtcgaggtagaacgggtcttgcaggatcacggcccactcggcgacggtgtggttggagccgacggtgagcgggttgtcgatgaaccatgcggcgattcggttgaacatccagccgcagagcgtgccgccgaggatgaggtacagaaatcccttgagggtgcgcatggactactcctcctccgcggtctcgccgccgtcgggcgccgcggcgcggtggtagtgcttgccgccctcggcctcgtcgccgtcctgcccgcccgcggcctcagccatgggcatcgacagggcgaagaacgtcttgaggcgcatcgaggcgctgtcgagcacgcggtccgcgatggccctccgctcggagcgggcgggcgggaacatggcgaggaacccgtcgagctcggcgatggggtaggaccagcgcgaggccgacaatttcatgtagtcgtagtccatgttggccatggcgcggtcgaggtagctttgctcgccgtccacgtatttgttgcccttgatggcggcctcgagcgccgcgcatccgtgcgggtcggacggggcggtgcgggcgcatagcaggacctcgtggacgtcgagcgggttgacgcggaagccgtcatggccctcgccgccgtcgcggatggatgcgagctcgccgtcgagcgcgcagtacccgatgacgcaggcgagcagccggcgctccgcctgctcgaggtattccctcgtgtagccgtattcgcgggcggtctcggggtattcgctgcggtaggcggacgaggagatcggcgagtagtattcggggctgtcgccgaactcgaggatgccggcggcgtcgtatctgaacgtgtcggagctgccgtgcgcgacgatctcgtcggccatcgtcgcgcacgaggcggccagggtctcaaggtcgatcatcggtgcatcccctcgttgcgtgcgggcatggagggctgcatcttgctctcggcgatcttcttggccgccttcgtctgtccgacgggggactcaggcgaggcggcccgggagtttcccaaggcctcgctgagcagtgcggcgtttttctcggcggccgcggcctgcttcgggtcgatcttcttcttgttctcggagatgaagcagccgcggtcgatggcggcctcgagcaccatgccgggcgcggccgcgaacgcggccccctcggccttcatctcgttgtagaactccttggctccgtccgagccggtcttccagagctcgggtccctgggtggcgtcgacttcggcgctggcgacggggcggccgttgcgggtgcattcgaaggaggccttgttctcgtcgtccgggtcgagggtcacgcggtactgctctcgggagtggccgccggccgacccgacccagctgttgcggccgtcgccggtgcgctcgaactcccagttgatgccgttgcgcttgaaggcgcggggatagcggttctggtcgtcgcgctcgatgccgcgcgcgcactcctcgagctccttgcggtccatgccgaaggactcgacgccgatgttgatgagcgcctgggtcatgatgtccatgtcccggccctggatgccgatggagaccgcgggacttccgtccatggggttgacggtgtcgaatacggagaacttcactccgtggttcatgagttcgcgcttgagctcctggatgtcctcgcgattgtcggcgaccgccccggggaataccatggcctcgcggtactggtccgggttctgggcgcgcacggtctcggcggagacgatgcccttctcgccgtggccgtcgatcgcgttcgcggccccgtgcgtgagggcgcgggcgaatctcgccggtatgcggtcgttcctgttgccggccgcgcgggctcgccgcgcctgggccaggccctcgagcaggtacttgatgatttctgaggctgattgcacggctgccgtgccggtcctgaacgcgagctgtaccgcctcgtcttctgctgccatttcttctgaccccttctgtagagcaggtgtggatatgggcctgctggggtcaggtggcgtggccggggtcggcggaaggtcaggtggtgaggtcgatgcagtcggcaggccggaccatcgacggtggcattataaccaattgtctgagtttctattcagtcgatttccgcctgttcgggatgcaggcgggatcgaccccgacgagcctggcgacggagtcgcgcgttatcttgcggtgcccccgctcgggggtccattgcctgaggtcccccgacttgacgaacctcttgacggtcgacgcgctgacgcccaggaaggcgcacgtctccttgacggtcaggaatctcggcagagccgccaggtcctcgatgactgagctcattgcccctcctcggcatccatgacggcggacagcgggagctccgcgtagaggcagagctggacgatctcgagcccgtcgagcgcgggcgcggcgcgcgacgccgtggagagcccgagcagcctcaggaccttgggcagcggaatccccgtgccgcggacgatatcgagagccgtgtcgccggtttccgcgagcgccgcggcgagggcgtccatgtgtatgccgtcttgtctgttcatgtcggaagccttcccgttccgtgttccgataccgaaagtatccgggtcgttacgacccccgacgggaacagtataggaacggggagatggcgcgcggtgcgatactgggccgcacggggtagaaaggccccgcgcgtttcgacacggaaggaagtgatgcgttcgatgaggtcgagggttccggagaagtccgagctggcggcgcagctcaagcgctaccgctacgatgcggggctgaagggcgatgaggcgggagcggtcatcggcaagaaggccacgacggtgtacaagtacgaggccgggaccctgtgggtgtcgccgggggatctgcgggcgctgctcaacgagtacggcgtgaacatggtcacggccttcaccgaggtcggcgacccgagggcgggcggcaggaagaaggacgagtcggccctgcgctggcgcaagatgcgcgcctactatgacatgatgggcccggccaagcagaggaccctgctcgacgtcgcgagggcgatggccgaggacttctgagccgtgcgcgtgcgcacatcagcacaccggcatatatgcgcatgcgcatatatctatagctgcgcatctgcgcgaatcagcccttgcgcgggagcgcgcgggcgcacgacggcgcctccgcctgcacaggctcgtcctcggcgatggacggcgccctcatggcatgggcgtcggtgtcgatccaatgctccccggtctcggggtcgtcgtgctcggcgaagcggtgggcggcatgcccgacgtcctcgaacgggctgcgggtgctgacgaggtagcggcggcgcgcctgggtgcctatatgccccatgggcgactcgatgtcgaaccagggctggaacatcttcggcatcgtgacgcagcacacgttgtcctgcgggtcgtagaggtggagccggccgtcctgcccgagcgcgacggaatatccctcgggcacggcgacgtagttcacgacgctgcaatgcgtgcgcgacgtgtcgacctcgtccatggtgtagccgagctggtggggcgggatgaacgcgttgtacgtgacgtattcggggtgctcgcggatctgctcgggcgtgaagcacatctcgacggcgccgggcacgtcgacgtcgccggtcatgtagaaggtgtcgtagagcgtgccgactacggcgatctccgcggtgtagccctcctcgaccacatgggtcgaggcctcgtgtgcgttgtagaggtccgaccagcgcctcatgaggtcgctggacttgacgagctcggggtcgaagtacctgtccccggggcggtagatctcctcgtcggggatgtcgcgcttcgatttgaaaaggcccatggtggtcgctccttggatgatggcgcggcggtatgccgcggcctgccgattatccgcccgcgccgcgccgtgcgcaatgcggccttcccgcacgggaagccgggcgcggttcagattcatatatacatatatacccgaacgcgtacatgcgcatacgcgcattcgcgcattttctcatttacgcatatatgctcagacgcgggaacgcgcctgcgcatctgcccgcgccacggcctagccgcacgcgagcgattcccaggagatgatcttcaccgtccgcatcgcctcggcatcgggtaggggctcttcttccggctccttcttttcctggccccggatgcgcgccggcagctcggagccctgcccgtcgtagccttccggcagcgccatgacctcgttgacggtgtcgacgctcgcgcgcaggttctccgggctggagctcacgtagatcctcagcgtgaaggaggggtccgtgtgcccgagccagttggacacggtcttcgggttgaccccggacatgatgagctcggtggcgaaggtgtgccgcaggcggtgcaggccgcacttcccgccgcctatgccgaacgtccggacgaacgtcctgaacagctggttggcgtatctcggcaccatgaacgcgccgtcgatgtcgccgacgacgaagatgtcgtccgtgaacgggacgccggcgtcgcggcagcgggcctcctgctccgcccgtcggcgctccagcccctccatgagcccgtccgcgatgggcagcgccctcacgccggccgggctcttcggccccttgaggtagccgttggaggagggcagggtgccgatggcgctggtgatgcgcaccatgcggcggttgagatcgacgttcgcccagcgcagggcgcagatctccccgcatctgaggcccgcgaacagggcgagccgcactatcgcgtcgagcgggccgcggatgcacgggagggcggcaagcagcgcgttcttctcttcggcggagagcgcgcggggaagcgggcggtcgtgcttgggcgcgcggatcctgcgcaggtcgagcgggggccggagcattcggaagctggcgagctccagggtgtccctgaccgtccagagcatatggttcacggtctcggggcagtacccgtcctcgacgagcgagtcgacgtagagctgcacgtcctgggcggtgaccctgtccacgggaatctcccccaggtcgcccaggagcttgacgtggcggcaatagccggcatgcgtcgacttctcgatggcgccgacggcgagcgcatggtcgatgtcgtcccgcctgagctcgccgaccgtgggcatgcggccctccgtcgcctcgatggcttcggcccgccgctcgtcttccgggtcgcgggggaggttgtagaggtattcggccgctaggtgctcggcttccgcgcggctcgccgccgccccgatcgtggcccacttgcgatcgcccttgcgctcggcatcgtagaccgcgcggtagctcatcctccatgaaccgccgcggcgggcgagggagaccctttcgtaatgcatattcctcaatcctcctcttcatcatgggcgagcctgagcccgtagagcgtgcatccggcgccaacgatgcgcagcagctcgttcgtgtcgctcctgaggtgttccacgtcgcggcggcggccgttcttctcgagcagcagcctggatccggccgaggcggcccaggagcgcggcgcgtcgccgagccatgccggcagccgcgtcacggagggctcgggatatgcgacgaagaagttcggctcgccgatgctctcccgccagattccgcggacggtgacggtcatgcgctccgcatcgaggtcgtcggcgagtatcccgcagatctcgccgggcttgaggccgcatccgagggcgagcccgatggccgcggcggaatgcccggatcccgatgcggcgagcgcccgcgcggccttgaggcccgccggggggatcgggcgcttcttcctgggcggccggggaacgtcgaacgggacctcggagaacgggttggaggcgcacagcccttcggcgagcgcatgtctgcccgcggcggcgcagatggtcttgagccggtagcagcgaacgcgcgatatgccgcgggattcggccgactcgagcgcctgcgcggccgaggcggggcttatcgagtcgacggcgaggcccgctatcgccccgagggccctgcattcctttcgatagttcgcgacggtcttcctggcggcccccttggccgccaggatctcgaagtagcggtccagcgcctcggcgagcgtgcacgccttcggccccggcagggacgcgagcgccgccgcgcgcgccccgtccgcgctttccgcccggaacctccttcgcagcctcttgcgcgacgcgtcgatgatgtcaacctcccacacgccgcatctgagctccctgaccgatcttatccttgattccggcaacgtgccgcctcccttcgcatgatgtggaaacgtgcctcccggatggctcgagatggctccgggggcggttatttcgatggagacagggtaattcgacctatcgccaacatgaacggcaatttatgcttctagcagcgcagatgtcggaatgtgtttgatgatttgatacgggatggtgacgagatgaccggaaatggaaccgcaggacgtcagcaactgctgatcgtggacggatacaacgtgctgcggtcggggagccgctaccgcgagatcacggggcccgactacaccgatgacgcgttcaacacggcgcgcgagcgcctcatcaacgacgtggtgaactacgccggccgcgactggcgcgccatcatcgtgttcgacggcggccgcaacgagttctccacgggcgaggccgagagcgtgggcggcgtgcgcatcatgttcagcccgtccggccagtcggccgacaaggtcatcgagaagctcgcgcacgacgcgcgcgagcgccaggtggagacgctcgtggtcacgagcgacgccaccatccaggacaccgtgttcggcttcggcgtggaccgcatgagcgcgaacggcttcagcctggaggtcgaccgctactacgacgacgcccgcctcgacgagaccccgaaggtggccgagaagaacaccgtggcctcccgcatcgacccgtccaccctggcgaagctcaaggccctgcgcgacagcacccgctgaggcgtcctgcctctcccgcatgagcgccccatgacaaatgtcatgggtttcggcgcgctttgtcacaaaatcccctttcacacagggaggcaaccggcggttgcgtaaaatggttaccagagatgctggtgcaaccagccacgctaccgcacactggagggcgagaaagaggttcgcatgacgccaacgccgagaaagggatcgttcatgaacgtcgaaatcgcccaacgcctagccgagatgaggcgcgagaagggcttcagccaggaagagctggctgcgcggctggggttgtcgcgccaggccgtgtcgaagtgggagcgcgccgagtcgtcgcccgacacgggcaacctcatcgcgctcgccgacctgtacggcgtcacgctcgacgagctcgtgcgcgtggaggcggacatcgccgacgacgtgacgttcgagtcgtccgaccgtgccgcctccgccgaggtcgaggcgcgcgaggctgccacggctgccgcagcagccgccgcgactgccgccgccgcggctgctgcggcccaggcggcagcccgtccggaaacccggcaatcgacgcaaccggccacgtcgcaaacggcgtccgcgccggcccagcagccggctcctgcatctgctccgcggcagtcggcggcatcgacggcggcctgccagcccggctctcccttccacgaggcgggtgcccgcccggcagccccatcccagccggacgccgcgtcggcggcagcggggtcgaccggccccgccccgcatccctgcaccggcgcgcccgtgccgcctccgccgcacggctacgcgccggtgcagcaacccggctacggcgcctccgtcccgccgcagcagccggcgggctcctacgacgcgccggacggacgccgtcgccacagcccgtggatgacgttcccttatcccgtgctgtgcgtcatcctgttcctgctcgtcgggttcctcttcggggcctggcatcctgcctgggtgatcttcctcaccatccctctgtactactggatagcccgcatcatcgagaacgacccgaactatcgggccgggcgccggtaagggcgggtggtgaacatgacaaggctcacccggtcgtcgtatgtcaagatagcgctcatcgtcttgttggccctgctgctgtttgccgtggcgggcgtggggtcgatgcgcggatgctcgcagggaatctacttcggagggggtacggaaatgggcaatgcaagcgtggacgcgaacggcgtgaagaacctgtccgtcagctgggcggccggctcggtggacatctcggtggtcgacgacggggcaggcgacgttatcgagctcgtggaaacggcccccaccggtcttacgaaggcgcagcagatgcgctggagcgtgtccggcggcacgctcaaggtggattacggcagctggtggtcgtgtttcgcgctggggcagaagcgcctcgaggtgcgcatccccgagcgttacgcgaaaagcctcggcaccgtgaccgtcgacggcgcgtcgggctactaccgagtggccggcatcggctgcgacacgctccggttcaagctggcgtcgggcgagatcgacgcagacggcctcgccgccgcctcgctcgacgtggacgtggccagcggccaggtgcgcgccgagggctcgttctccgaacgcgtgagcacgaagacggcgtcgggccagctggacgtcgtctgccagggcgtggccccgaggcaggtggactcggatctggccagcggtcaggtgagcgtggccctgcctgccgacacgggcttcacggccaaggtcagcaaggcgtcgggcagcttctccagcgccttcgagaccatgcagcaaggcggctcgtacgtgcacggcgacggctccaccgccataaaggtgcatctggccagcggcgacttcaaggtggagaaggcatagcaaggcgggtgccggacgcatcgcctggccctccggggccttgcgctgcggctggcatcccaccagcccgtccctcaggccgggtctgggccggccacgcacggcgaggcgccctcgcgcttggcgcggtagagcgcctcgtcgctcttcctgatgagggcgtcgatgggcagcgctgggtcgtcggtggcggctatgccggcgctcgccgtgaccgcccaggcgttcccgtctgccgcggactcgtgcgcgagctccgcgagcagcgcgcgcacggtcgcctccgtccgctcggtcgaccgctctcccatgagcgctaccacgaactcgtcgccgccccagcgcaccacgaacccgtcgggaaacgcctcccgcagcatcttcgccgtcatgccgagtgccgcgtcgccggccgcatggccgtagcggtcgttgatgttcttgaaatcgtccaggtcgaacgtgatgagcgtgaccggctggttgccgcgatgctcctccacgtgctcgtagaagtagcgccggttgtacagcccggtcaggtagtcggtgcgtgcggcggctatcacgcgctgctcgagtttccgctcgttcgtcacgtcgcggtagatgcgcagcacccctgtcgcgttgccgaacacgtcgaggatggcgcgctcgttgacctcgaacgtcttcgactccccgcggatggatgccgtgaagaaggacgaatcctcgaaatcgttcgcgtccaccacggcatcgcccagcacgatgcgccgccagcggtcgaagttgccgcctaccacgcgctcgcgtcttacgtcgaaatagtcctcggcgcgctcgttgatgttgacgatggcgccctcgttgtcgagcaccacgacggcgtagggcatcgagtcgatgaatatctccagctcggtcctgatgtttcccaggtccgtcacatcgtgggccacgccgacggtgcccatgacggagccgtcgtagtctatgagcggcgtcttgtacgtcttgaactggcgcatgccgcctctcgtcttcacctgctcgtcgaacaggagcgtcgtgttcgagcgcatggtctcctcctcggattccaggcacacgaactcgccctgcgcgtactcgtcgggcgtgatgtcccatatatagtagtgtcctcggccttccacctggtccttcgtcttgcccaccgtctcgcagaacgcgtcgttcaccttgaggtgggcgccgtgcgcgtccttgaaccacacgagctcggggatggagtcgatggcggtgtcgaggtactgctgcgcgagggccaggtcggcgtcgcgcttcgccgaccgttgcagccgggcgagctcgaatgcggcccgcgtcccgtcgagcgggcccgtccacagcgcgtcgatcacccggtagtcctccggcgtccagcgcgccgcctcggcggcgtcggctacgaccgccacggcgctgtagaacgtgtcgagccgctcgcgccgtctcgccgcgaggtccgcaaggcagcgcgacggccgggccccgcccggcgagccggcgaagagccgcaggtcgacgaccgcgatgtcgcagctgcagaatgcctcgccgtccacagtggggaaggcctcgactgcatgctcgaaccgatcgaggggcgccgcgcggcgcagggcctcctccacgggcggctcgatgccgaacaggttgatgcgcagcgtcttgcggtacatggcaggacctttctacggttggttgacagtgtaccccctttcgccgcctcgtgggggcgggaagggtgccggtggccgttgcgaacttgaggctgttcccccggggtgcattcgtctacactagggtgccggtgcccgccggcaccgttgaggagaaaccccgaggaaagtgatccatggaatacagaacgctgcagcttgccgacaaagacgccgtcgatcaggtgcttgccccgctcgggcgcaacgactccgcgctcgggttcgccaacctgtactcgcttacggagaagtacggcacggaggttcgcctcgaggggcgcgcgctgcacgtgcgccagacccgccggcttccgggggccgtggcatactacccgccgctcggcgggaaggacgtcgtcgccgatgccggccgcctgctggaggaggcggcccggacgggggagcggcccgtgctcgtgggcgtgaccccctcgcagcgccagcgcctcgaaaaggctctgcccggcatgttcgcattttccaccgaccgcgccttcgccgactacctctaccgcactcgggacatcgccgcctacgcgggtccggcgctcgcgaagaagcgccgcgagacgaacaagttcttccagctctacggcgatgaggtgtccttcgagcccattgtccccgcctgcctcgatgagctgcgcgcgttccagcaggcctggcacgacgggagccgccgccgcggcaccgaggagcaccccctggagttggaacaccgcaagatcgcgctcgacctggaccatttcgaggccttgggcctggagggcatcctgctgcgcatcgccggcgacgtgcagggctacgcctacgggtccctcctgcctggcggcgccttcgacgtcatggtgctcaagggcaacctggacttccgctatatctggcgcgccctcctgcgcgaactggcccgcaccgtggccccccgcgccgagtacctcaaccttgaggaggacctgggccttcccggcctgcgcgagaacaagctgagctaccagccctgcgaattgctggagcgctaccaggcaactctggcgggcgaggcggcgcagtgctccgggtaggctgcgtcctgccgatttcgcggtgcgccgcgcgggtcgtattccgcttcaagccgcatcctgcttgatctcgccatcgcacggggcgcccatcggaaaaggcggaacgtgcagtcgcgagcgcatgtcggcccagaggccgtcaagcgtcaaaaacggaccggtttggcaatcgaccgcagcgtgctcctctggcttgcagcgcgcgtctgctacctgaactggtgaaactgcaaaaggtttgaaaaacgtctgcggcttgcaagcgaaatgacagggtcgagattgccaaaccgtccatattttgacagaacccgccgaaaaagaggacacctcgtgcagaagctcccgcacagcgcggagacacccccgccggccggctgcatgcgagcggaaacgccccccgtcagccggccgcatgtgcacagacacctcgtgcagaagccccgcacaacggcagagacgccttgccggccggccacatacgcgcagagaccctcatcattgaatcgccggccgattgctcacgtgcagggggaccgccccgacgcatgcggtcacccccccccgagtcctcccgatgcgccgctcgcccctccccgcatgcacccgagctctcgaccttccgctcggcgggcgttcgcagtgtgccgaaacccttcgcgccaccaaaaagtttcctcgccatttccccagctaaacccgtgaaactacagcaaatcaccacagttcgtaaaaattttccttgacacctcttgacaaccgaagtatttttagaaattgcgacttttcgcagtttcacggattttcttgaaggaggaaaagcctcgtggcccaagcaaaaaacagcgctcccaccagcctttacaggaaccgccgcagcttcgccaagattccggacgtcatggacgtccccaacctcatagccatccagaccgacagcttcgagtttttcaagggcgagggcctcgcgcaggccttccacgacatcagccccatcgagaactcgacgaaggacatgtgcgtcgagttcggcaagcacgagttcggcgagcctaagtacacggtggacgagtgcaaggagaaggacgtctcctaccaggcgccgctgttcgtggagatccgcttcatcaatcgcgagacgggcgagatcaaggagcaggacgtgttcatgggcgacttcccgctcatgacgccgcgcggcaccttcatcatcaacggcaccgagcgcgtcgtggtgtcccagctcgtgcgctccccgggcgtctacttcgccgccgagcgcgacaagacgtccgacaagaccatctacaacgcgaaggtcatcccgagccgcggtgcgtggctcgagttcgagaccgacaagcgcgacatcctgtccgtgcgcatcgaccgcaagcgcaagcagccggccacgctgctcgtgcgcgccctcggcctggccgagacgcgcgaggagatcatcgagctcctcggctccgacgagatggtgctgcgcacgctcgaccgcgacccggccaccacgaaggaggagtcgctcatcgagctgtacaagcgcttccgtcccggcgagccgcccaccatcgactccgcccgcacgctcctcgagggcctgttcttcaacccgcagcgctacgacctggcgaaggtcggccgctacaagatcaacaagaagctgggcttcgacccggactacgaggcctccacgctcaccgacgacgacatcgtgcgcacgatgcagtacatcgtgggcctgcacgccggcgccgaggacttccagaccgacgacatcgaccacttcggcaaccgccgcatccgcacggtgggcgagctcatccagaaccagttccgcatcggcctgtcccgcatggagcgcgtcgtgcgcgagcgcatgagcatgcaggagcccgacgagatcacgccgcagagcctcgtgaacatccgccccatcgtggcggccatcaaggagttcttcggctcctcgcagctgtcccagttcatggaccagacgaaccccgccgccggcatcacgcacaagcgccgcctgtcggccctcggaccgggcggcctgtcccgcgagcgcgccggcttcgaggtgcgcgacgtccacacgtcccactacggccgcatgtgccccatcgagacgcctgaaggcccgaacatcggcctcatcggctcgctggcaacctacgcccgcatcaacccctacggcttcatcgagacgccgtaccgccgcgtcgtggacggcaaggtcaccgacgacgtggactacctcacggccgacgaggaggagaactacgtcatcgcccaggcgaacgacctgttcgaccccgagacgcgccagttcggcacgttcgacgagaacggcgagttccatgtggctgcccgcgtgctctgccgcacgaaggacgccaacggcgtgttcggcgagcccgacgagctgccgcccagccaggtgaactacatggacgtgtccccgcgccagatggtgtcggtggctacctcgctcatcccgttcctcgagcacgacgacgcgaaccgcgccctcatgggctcgaacatgcagcgccaggccgtgccgctgctgcgcccgaacgcgccgctcgtgggcaccggcatcgagcaccgcatcgcggtggactccggcgagatcctcgtcgcccagaacccgggcgtcgtggactacgtggacggccagaccatcatcatcctgaacgacgacggcgagtacgacgagtacctcgtgccgaagttccagcgctccaaccagtccggctgcatcaaccaccgcccgatcgtgcgcaagggcgacgaggtgcagaagggcgacgtgctggccgacggccccagctgcgacggcggcgagctcgcgctcggccagaacctcatggtggcctacatgccgtgggaaggctacaactacgaggacgccatcatcgtgtccgagcgcgtggtgtccgaggacctgctcacgtccatccacatctcagagtacgagatcgacgcgcgcgacacgaagctcggccccgaggagatcacccgcgagatcccgaacatctccgacgacatgatctccgacctggacgccgacggcatcatccgcgtgggcgccgaggtgttcccgggcgacgtgctggtgggcaaggtcacgccgaagggcgagacggagctcacggccgaggagcgcctgctgcgcgccatcttcggcgagaaggcccgcgaggtgcgcgacacgtccctcaaggtgccccacggctccggcggccgcgtcatcggcatggcgcgcttcagccgcgcggccggcgacgagctggcccccggcgtgaacgagctcgtgcgcatctacgtggcgcagaagcgcaaggtgcagcagggcgacaagctgtccggccgtcacggcaacaagggcgtcatctcgcgcgtgctgccgctggaggacatgccctacctcgctgacggcacccccatcgacgtcatcctgaacccgctcggcgttccctcccgtatgaacgtgggccagctgctggagaaccacctgggctgggccgcgaagtggggctgggacgacgcggaggagacggacgccgtggtcgagggcccgatgcacgtggccacgcccgtgttcgacggcgccacggagcgcgagatctccgatgccatcgagaaggcgaaccgcaacctcatcaacatcaaccacgccaagtacggcgacaaggcgcgcgacgagttcgtgccgcagctgtcccgcacgggcaagacgtggctctacgacggccgcacgggcgagaagttccgcgagcccatcacggtcggccagagctacatcctgaagcttggccacatggtcgacgacaagatccacgcccgctccaccggcccctacagcctgatcacccagcagccgctgggcggcaaggcgcagttcggcggccagcgcttcggcgagatggaagtgtgggcgctctacgcctacggcgcgtccaacgtgctgcaggagatcctcaccgtgaagtccgacgacaccgccggccgcgtcaagtcctacgagtccatcgtcaagggcgagaacatcccggccgccgaggtgcccgagtccttcaaggtgctggtgaaggaaatgaagtccctgtgcctgaacgtggagctcgagggccacgaccaccagaccatcgacgtgacggtggagtccgaggggcaggaagacggagaccgcgcgctgttcgaggccatcgcggccgacgcgcgcaagaccgaggaagatgcggcgaacgctctcgacgacatcgccgccgaactgggagagctcatgggagacatctctgacgataatggaacgaacgacctcatcggggatggggaggagcgatagatgacgacggaattcgacgttaccaatttcgacgccctgcgtatttcgcttgccaacgccgaggatgtgcgcggctggtcgcgcggcgaggtgaagaagcccgagaccatcaactaccgcacgctcaagcccgagaaggacggcctgttctgcgagaagatcttcggccccacgaaggactgggagtgcgcctgcggcaagtacaagcgcgtgcgcttcaagggcatcgtgtgcgagcgctgcggcgtggaggtcacgcgcagcaaggtgcgccgcgagcgcatgggccacatcgagctggccgcgccggtgagccatatctggtacttcaagggctcgccctcgcgcctgggctacctgctggacatcccgccgaaagagctggagaaggtgctgtacttcgcctcctccatcgtgacctcggttgacaaggaggcccgcgaggaggacgccgacgagctgcgcgacgagctggccgccgacctcgaggagctggacgccgagcgcgaccgcctcatcgaggccacgcgcaagctgtccacgagctacgtgcccgaggacgacgacttcgtggacgaggtcgacgaggacgagcgcctgacgcccgaggaggtcgacgaggagatcgccgacatctacgaggagttcaacgagcgcaaggcgctgcgccaggacgcgttcgacgccttcatgaagatcgagccgaagcagctcgtgcccgatgaggccctgtaccgcgagatgcgcctgaactaccgcgactacttcacgggcggcatgggcgccgagtccgtgcgcgatctgctggacgccatggacctggccgccgtggccgaggagctgcgcgagaccatcgccaacggcaagggacagaagcgcgccaaggccatcaagcgcctcaaggtggtcgacgcgttcctgaagtccacgaacaagcccacggacatgatcctggacgtcatcccggtcatcccgcccgacctgcgccccatggtgcagctggacggcggccgcttcgccacgagcgacttgaacgacctgtaccgccgcgtcatcaaccgcaacaaccgtctcaagcgcctgctggacctgggcgctcccgagatcatcgtcaacaacgagaagcgcatgctgcaggaggccgtcgacagcctgttcgacaacggccgccgcggccgccccgtcacgggcccgggcaaccgcccgctgaagtcgctctccgacatgctcaagggcaagcagggccgcttccgccagaacctgctgggcaagcgcgtggactactccggccgttcggtcatcgtcgtaggcccgcagctgaagctgcaccagtgcggcctgccgagccagatggcgttggagctgttcaagcccttcgtcatgaagcgcctggtggagctcgagtacgccgccaacatcaaggcggccaagcgctccgtggaccgcggtgccagctacgtgtgggacgtgctcgaagaggtcatcacggaacaccccgtgctgctgaaccgcgcccccacgctgcaccgcctgggcatccaggccttcgagccggtgctggtcgagggcaaggccatcaagctgcacccgctggtctgcaccgccttcaacgccgacttcgacggcgaccagatggccgtgcacgtgccgttgggcgctgaggcgcaggccgaggcccgcgtgcttatgctctccgccaacaacatcaagtcgccggcccacggccgtccgctgaccgtgcccacgcaggacatgatcatcggcctgtactacctcacggccgcccgcgacggcttcgagggcgagggccgcgcgttcatcgacttcgacgacgccatgaacgcctacgacgcgcgagccgagctggacctgcaggccaagatctgggtgcgcctttccaaggacacgcaggtggccacggcgtacaacacgttcgaggaccacgaggccggcgagcgcatcgagaccaccatcggccgcatcacgttcaacaacgtgctgcccgaggactacccgtacctcaactacgagatgaacaagaaggagatcagtcgtctcgtggaggacgtgtgcaaccgctacgagctgtccagcgtgccgcctatcctggacggcctaaaggacgcgggcttccactacgccacgcgcgccggcgtcaccgtgtcggtgtacgacgccacggtgccgccgaacaagggagagatcctggcggccgccgacgagaaggtcgcggccatcgacgaggactacgagatgggcctcatgagccaggaggagcgccacaagcaggtcgtggacatctggaacgccgccaacgaagaggtcggcgaggccatggccgagaacttcgacaagttcaaccccatctacatgatggcgttctccggcgcccgaggcaacatcaagcagatccgccagctggccggcatgcgcggcctgatgtccgacccgaagggcgagatcatcgaccgacccatcaaggcgaacttccgcgagggcctgtcggttctggagtacttcatctccacgcacggcgcccgcaagggcctcgccgacacggcgctgcgtaccgccgactcgggctacctgacccgccgcctggtggacgtggcccaggacgtcatcatccgcgagatcgactgcgggacgaccgacggcgtgccctacccgctgcacaacgacaagggcgaggtggacgacaacctcatcggccgctgcctgctggaggacgccaagggcgccgacggcacggtagtgctggccgcgggcgagtacgtggagcgtatggaccagctgcgcgccatggacgaggccggcatcgacacggtggtcatccgcacggtcatgacctgccatgccgagcacggcgtgtgccagaagtgctatggctgggacctcgccacgagccgcccggtgaacatcggcacggcggtgggcatcatcgccgcccagtccatcggcgagccgggcacccagctcaccatgcgcacgttccacaccggcggcgtggccggcgaggatatcacgcacggcctgccccgtgtccaggagctgttcgaggcgcgcaagcccaagggccttgcggtgctcgcggagatctccggcacgctgcagatcgcgggcgacaagcagtccaagaccctcacgatccacgaccagcagggcaacttccgcgagtacgtggtgagcgcccgcgcccagatgctgccgggcgtgacggacgggtgcgaggtacgcgtgggccagcagctcaccaagggctcggtgaacccgcacgacctgctgcgcctcaccgacccgaacaccacgctgcgctacatcgtgagccaggtccagggcgtgtacgtgagccagggcgtggacatcaacgacaagcacatcgaggtcatctcgcgccagatgctgcgcaaggtggccgtgacggacgccggcgactccgactacctgccgggccgccaggtcaaccgcttcgagttcgaggacgaggccaaccgcctcatcgccgagggcaaggagccgcccgtgggccagccgctcttgctgggcatcaccaaggcgtcgctcgccacggactcgttcctgtcggcggcctccttccaggagaccaccaaggtgctcaccgacgccgccatcgagggcaagaccgaccacctggccggcctcaaggagaacgtcatcatcggcaagcctatcccggcgggcacgggccttccgcgctaccgcgaggtggggctcacctacaagggccgcccggtttccggcgtgcagggcgagaacctgcccgacttcgcccccgaggcgctccgcgagatcgaggagctgctgccccagccgcaggactggtcgctcgacggcgacggctacctcaacatgggcacgaactacggcagctactacagcggcctgtctctcgggcaccgtggccctcagctgtccgacgaggacgcgcgcctgtacatctacgacgacctgggcgtatcgcagcgctgggccaacaagttcagcgaggcgggcatcgagacggtggccgacctcgtgggccacaccgaggaggacctgctgcgtatcgagggcatcggcgtgaaggccatcgaggagctgaaggaggggttggcggaacgtggcctctcgcacgtgatcgaggacgacctcgccgccacgagcgacgacatgtcgcagctcttggatatggtgttctcgcctgacgacaccatcctcatcggcggcgacgagctcccgaccttcaacaccgagggcgaggacatgctgggcgaggccctgccgccccgctcctaccagcgcaacctggaggagctggacgccctgctgggctccgtggggtcgctcggcttcggcctggccaccaaggaggacgaggaatcctcctccgaggatgccgaggacgacgacatcgaagagtagcaatcgggggcgcgccaaggcgcgccccctcttcatgcggcgccctgtcaggttcaagagatcgaaaggcacgacatgtccgataaaacctaccttccggccggcgaggtgccgcccgcctcgcagatcggggccacgctcgaggcgctcgcggccaccatcgcagcgcgacgcgaagcgggggaggagagctacacgcaccgcctgctctccggtccggccgacgaggtgctgaagaaggtcatggaggaggcgggagagacggcgctcgccgccaaggacgtggagtcctgggcctgctcgtcgctcgccgccacgctggcggtcgccggcgcggacgcggacgacgcgctttccgtggagctgccgcccgagtacgatgcggcggtggaccatctgcgctacgaggcggccgacgtggtgtaccacctgctggtggcgctggagcgctacggcatcggcctcgacgagttcgccgccgagctcaacacccgcatgaccgacgcggagcgcccgcaaggcgccgtctgcctccacgaagaacacgtgaaaagggggaagtaacatggcacgacttttcgggaccgacggggttcgcggggtggcgaacacgcagctcacgtgcgacctcgccttcaagctcggccaggcggccgtggcgttccagggcaagaccatcctcatcggcaaggacacgcgcctttcgggcgacatgctggaatcggccgtggcggccggcatcatgtcgatgggcggcacggcgctgctggccggcatcatcccgacgcccgccatcgcgctgctcgtgcgcgagctgcactgcgacggcggcatcgtcatctcggcctcgcacaacccgcccgagtacaacggcatcaagctgttcgacgcccagggcttcaagctgccggatgcggtggaggacgagatcgagtcgttcgtggcgaagggcggtgccgcggccgaggagctgccggccggcgacgccgtgggcgtggccctgccggtggacgacgcctgcgagctctacatcgcgcacgccgtggcgaccgtggccgacgagggcatcgaccttgcgggcctcaaggtggcgctcgacgtgggccacggcgcctcgtgcatgacgagcgccgaggcgctgcgccgcctgggcgcgcacgtcacggtcgttaacgaggacttcgacggcaccgacatcaacgtgcagtgcggctccacccatctgggccccgtgcgcgacctcgtggccgagatcggcgcggacgtgggtatcgcccacgacggcgacgcggaccgcgtcatgctggtggacgccaacggcaacgagatagacggcgacgtggttgaggccgtgtgcgccatcgacctcaaggagcgcgggctcctggccggcaacaccgccgtgtccaccgtcatgtgcaacctgggcctcgcgcatgcgatgcgcgacgcgggcatcgagctcgtccagacgaaggtgggcgaccgctacgtgctggaggccatgcgcgagggcggcttcgtcctgggcggcgagcagagcggccatatgatctttctcgagcacaattccacgggcgacggcctggtcacggcgctgcagttcctcgcggcctgcaaacgcgccggcaaatccatcgccgacgcagccgccgtgatgacgcgcttcccgcaaacgctcgtgaacgtgcacgtgaacgacaagcacgccgtggacaacaacgccgccgtggccgccgccgtgcaggccgccgaggccgagctgggcgattccggccgcgtgctgctgcgcccgagcggtaccgagcccgtcgtccgcgtcatggtggaggctgccagcgccgaggaagccgaccgtcacgcccacgccatcgccgccgtggtggagcgcgaggtgtagcgctggacgcacgacgagcctcgctgtcatcgcactgcccgagggccccggaaacggggccctcgctgcaaaaaatggagggggctttggagcgggtccttctttgcgggaaccccggttcggaacgctcgccaaacgtcgttcccttccccagatacttgtgataagctattataggattaggtctagtagtatacggtatcctatgagggatgcagggtgcaacttgcgaggcgcggtcgcctccacggtgccaatcgatgaggaggatgcactatgaactttacgcgacgtagtttctgcgcgctctcgggcgtggcggcggcttctgtgctgggtctcggcctcgccggctgcggcggccaggcaccccaggccgagacgaaggccgaggggccggccgacgaggcgtcccaggactacctgacccagggcaagggcgagcacctcgtgtgcggcgttacgggcaagctcatcaagatcgcccccgccatcgtggccgacaagctgggctacttcgaagaagagggctgcgacgtggagttccagcagatcgcgctcaacgacgccatgaccgcgctcacgagcaaccagcttgacatggacctgttcggcgtcgtgcccgcctgcacctatgtgtcgcagggcgcgaaggcctacatcttcggcggcaccatcctcaacggctcggagatctgcgcgctcgactcgttcgaccgcgagctcaagacggccgcggactacaaggggctgcgcatcggcgtgaaccgccccgagaccggccagatggtgttcaaggagtggctgcaggacgagggcctggatatcaacggcggcgacgtgacgttcacgtacttcgacaacgaccaaggcggcttcgaggcggtgaagaagggcgagttcgacctgtacatcacgaacaacgcccagggcttcgtgcagcgcggcaacggcataaaggtggtcgccaccgtcaagcagtacgcgggcgattacccgtgctgccgccagaactgctccgagcaggcgcttcacgagaagtacctgtcgctcgtggacttcgagacggccctgctgcgcggctacaagacctacaagcaggagcccgacacggtcatcccgctgctcgtggactactccggccaggaggaggcctacgtgcgcgccgccatgtacggcacggacgactacgacaacgtcatggacccgtcgcccgatcccaacaggaacgccgtcctcaagttctacgacacgctgaagaacatcggcgagatcgacaaggccacggcgtactccatggacgactacgtggtgacgtcgatctgccgcacggcgctcgatacgctgctcgagcgggagcccgacgagcagctgtggaagaacctcgaccaggcgtacgcgaagaacaacgaatagcgggcctgcgggctatcgggtaccatggatgcgggcgctccggcgcccgcatccggcgttcggaaacggagaaggggagggcgcgtggggaagatcgacatcgaggatgtctcgttcgcctacgaggacgtggcggcaggcggcaggccgacggccgccgccgcggacgaccgcgcgctgcgcgacgtggcgctcgaggtgcccgacgggcagttcctctgcgtcatcggccactcgggcagcggcaagaccacgctcctgcggcttgtcgccggccttagccgcccgagcgcgggaaccgtccgcatcgacggcgcgccggtggaggggccgggcctcgaccgcgccgtcgtgttccagaactacgcgctgttcccctggatgagcgccctgcgcaacgtggagttcggcgtggaacaggccaacaaggagctgcaccgcgggctgacgaaggcccaggtatccgccgcggcgcgcgactacctggaccgcgtgggcatgggcgcggcggccgacaagtacccctaccagctctccggcggcatgcgccagcgcgttgccatcgcgcgggcgctggccatggacgccgagatcctgctgttcgacgagccgttcggcgcgctcgacgtcaagacgcgctgctcgctgcagaagctcgtcgacgccctgtggcgctcgggcgagcagcgcaagaccgtcgtgttcgtgacgcacgacatcaacgaggccatcctgctggccgaccgcgtggtgttcatgcgccggggcgagatcgtcgccgaccgcgccgtggacgtgccgcggccgcgctcgtcggccatcttcgcgcacgatgcgtgcgcccgggccctcaaggacgagctgaccgacctgttctacctggacggcgaggaggacgaggaaggcggcgcgttcggggaggcgggcgccggcgtgcccggcgcgctgccggggaaggcggtgctgccatgaggcgcctgttcgggaaggagttcgcattcgcccacgtgctgctggcggccctcgtgctcgtggtgacgtgcatgccgaaccagcgcatggtcacggtgtcgtactacccgctgctcgccggcctcgccgtcatcgaggtgctctacctgctgcgcctggccgcgctgcgccgtcgcggcgcgttctccacggggcccaccgacatcgtggtgctcgtatgggcgctgttcatcgtgtgggacgtgtgcgccacgaagctcgacatcgcgcccaccgtcattgttcctgcgcccgaggctgtgttcaacgtgttcttcgcccaggccgacgtcatcggcgccgacatcgtctcgtcggtcacgctgctggtcatgggctatgtgggcggccttgcgctcggcgtggtgctgggcatcgtctgcgggtggataccgcggctgcgggccatgttcttcccgatagcgaacgtgctggcgcccatcccgcccacggtgttcgcgccgtacctcatcgtgctgctgcccacattccgcacggcgtcgtgcttcatcatcctgctgggcgtgttctggccgcagttccttaacatggtggtgcgcacgtcctcgctcgatgcccagctgctggacaacgcgcgcacgctgggggtgcgcaacttcaccatgatcacgcgcatcatcctgccctacgtgctccccgaggtgctcaagggcctgcgcgtgtcgctgaccaccgcgtttctcatgctcacgttcgccgagatgctgggcgcgtcgtcgggcatcggctacttcatcagcaacgcgaacaactacgccaactacaccaacgtggtggcgggcatcatcgtgtgcggcgtggtggtgacggtgctgagcttcgcgacggcctgggtgcagcgccggttcaccacctggcggtaggaggggggaaggcggcgtcgtcgcgtgcggcgtcgtcgcgggaaggcggcccggcggggcgccttcccggctcgcggcgggcctagcgggcggagtagggcggatagaactgcgacgggccctcgtggacgggccagtcggtgtcgaagtagatctcgcgcacctggtcgacggacaggccgcgcgtcgtctcggtggcggtgtcgcggggcgacgtgccgcgctcggcccacatgatgttggcgccggcctggccgcatagctggctgggctcgtgcgtgcagttgccgcggatgcctgggccggtggccagagcggtggcgccggcgtaggtggccaggcggccgtagctgatgttgccgtagcgctcgaactcggttccgggcacggtgttgcgccgcatggcgccgctgaagcccacctcgaaatcgcgtgcgagcaagatgaggtcggccagctcctcgggcgtgtgctcgggcccgatggggtcgatgcagttgcccagcaccaacccggcgctcttcgcggcctccatggtcttcaggcgcgtctccaccttgcagcgcgtgaacacgccctcgcccaggcgcaccacgtggtatacgccggctatgccgatgcgcacgagctcgcgcgcgtagtcctcgtcgaagtcgggcacgttcgcgatgagcgggacgtcggtggacagcccggcgcgcaccgcctgcgccgtctccaggaacttctcctcgccgtagtgcacggtggtcacgaggtagagcgcgttcgccccggcggcctccatggcctgcgcctcggcgatcacctgctcgagcgggatgacctcgtgcgtgcggaagatcttgttcgacgccgcgaacgagcagaacttgcagtcgttcgggcacggcgccgcgtccagtccgatgtgcgcgtggatctccgcctcgcccccgcacagctgcgaggtgaacgcacggcccgcctgctggatggcgaacgcctcgggcgagaggttctccaccgacaacagggccatgatctccttcttgtcgagcaggcctccgtcgagcgccttgttgatgatgcggatgatctcggtgtccatgaaacctgctttcccttcgcgtccggcccggcgccgggccgatctgttggtcgccaatgatagattgcgtccattataaccttccgaagcgttcctccttgcccgaaccgcggcgaacgtaaccgaccagcggagggccgtcaacggatcggcttacctgattgcgcgcgtcagggagacgtgggatcgttctcggcgcggcacgggacgcggccgcgatgcgcccgccggtcgaccgcggcgcagtcggaccgcgttcctgccgcaacaggcacccatttcggcggaaaggcatccccctatggaagaggaaaagaagggcatcgggctgttcggcctcatcggcctcgtggtcagctcctgcatcggctcgggcgtgttcgccctcaccgggcagatcggccaggtggctgccccgggcagcgcgctcgtggcatggggcgtcgtgggcgtgggcttcctcgcgctggcgctctcgttcgcgaacctgggcgcgaagcggtccgacctgcacggcatcttctcgtacgccgaggagggcttcggcaagttctcgggcttcatcagcggctggggctactggctgtcggcgtggctcggcaacgtggcgttcgccaccatcctcatgtccacgctcgggttcttcctgccgtacttcctgccgggcaacaatattggcagcatcgtggtggccagcgtcatcatgtggggcatcacgttcctcgtcatccgcggcgtggagagcgcggcattcctcaacgccatcgtcatgatcgcgaaggtcgtgcccatcgtggtgttcatcctgttcagcatcgtgctgttcaacgccggcgtgttcacggccgacttctgggggcggatggccagcaacgccgccgccatggcgggcgagggcgtggacctgggcggcgtgggcgaccagatagtgaactgcctgatcatcatgatgtggtcgttcatcggcatcgagggcgccatggtggtgtcggcccgcgcgcgcaagaagagcgaggccggcaaggccacggtcatcggattggtggtgctgcttttggtgtacgtgggcgcgtcggtgctgccgttcgggtacctgccctacgccgagatcggcgcgctggacaagccggccatgctgtacgtgttcgagagcatggcgccgggctggggcggcgcgttcatcagcgtggcgctcatcgtcgccgtgctggggtcgtggctgtcgttcaccatcctgccgtccgagaccacgtcgctcatggcgaagcacgagctgctgccgcccgtgttcaaccggctgaacaagaagggctcgccgcagatctcgctcatcgtggtgggcgcgtgcacgcaggcgttcatgatcacgctcctgttcaccgaggacgcgtacaacttcgcgttctccatgtgcacggtggccatcgtcatcacgtgggcgttcgcggcggcctaccaggtgaagttctcggcgcagcaccacgagtggggccagtgcgccatcggcatcgtggccgtggcgttccaggtggtgggcgtgctgttcaacggctggtcgttcctgctgctcacgtgcgtgggctacatccccggcttcttcttctactggcgggcgcgcaaggaggccggcgcgacggccctcaccacgggcgagaaggcgggcatgggcgccatctccgcgctcggcgtgctgtcgctggtgctgctggcaatgggcgtcatcagcttttagggaaggaaacgaacatggacatcgcaccgttcggggtggaggactggctcaacgtgcacgagaagagcgcgacgtacgacatcgcgcagtctaccatcgcatcgatgacgctcgacgagctcgtggcgctgggagcgccgcgggggctcgtggccgacgcggccgaggcggccttcccgcaggacgcccgggcgggcgccgcccagatgggcttcttcgcgcgcctgggtgccgagaagatgaactacggttggatcgagggctcgcccgcgttcaagcgggcggcggccgcgctctacgggcgcgtggagcccgaggccgtgctgcagaccaacggcgcgacgggcgcgaacctgctggccgtgctcgcgctcgtgtcgcgcggcgaccacgtggtcgccgagtaccccagctaccagcagctctacgacataccgcgggcgctcggcgccgaggtggacctctggcgcatttacgaggaccgcggctggtaccccgacctcggcgagctcgagcgcctcgtgcgccccgacacgaggctcatctgcctgaacaacgcgaacaaccctacgggcacgttcctcgaccgcgcgttcatggagcaggtggccgacatcgcgcgcagcgtgggcgccttcgtgctcgtggacgaggtgtacctgccgctcgtgggcacggaggacttcgcctccatcgcggatatctacgagcgcggcgtggccacgaacagcctgtcgaagacgtactctgtgcccggcgcgcgcatcggctggacggcgtcgagcccgcagatcgccgagatgctgcggccgtaccgcgactacaccatgatctgctgcggcgtggtgaacgacgcgctggccgtgcacgtgctggagcaccgcgatgccgtgctcgcccgcaaccgccccttggtgatgggcaacctggccatcgcgcaggcgtggatcgacgacgagccgcgcgtgtcgtgggtggcgccgcagggggtgtccacgtcgtgcatcaagctggacatccccgaggacgacgaggcgttctgcctgcggctgctcgaggacgagggcgtgctgctcgtgccgggcagccgcttcgacctgccgggccacgcgcgcctcggctactgcgcccccgagccggtgctgcgggcgggcctggccggcctcggccgcgccctgcgccgtttcgactgagcgggcggcgcaggcctttcgagaacgggggtcgatccgcagggtcggcccccatttacttcctatcgcacgaacttgctcaggatgcgcacgagcaggctgggcttgtgcgggcgcgcaggacgcaccggccgcgccatggccttggacgtgggagctgccggcgccgccttcggcgcccggaccggctgcgactccggcagggcctccgggacggccgcttcctcggccagcacctcaaccgcagcgctctccgccgccgcctcggccgcggctagggcgcgcgccaccgactgggcggtcgcggcggccccgtcggcctcgccctgcgccgcgcgctcctcggccacgcgcccgaccgcggcttccacggcggcctgtgcggcggccagtacggcctcctgcgccccgttctccccgcgcccgcggttggccgtgcgcgcggccgcctcctcggccgccgacaggcggtgctcctgcgcctgcttgatgaagaactcctgcgagtcgaacagcacggttgcgccctcgccgtccttgcgcgcgaacgcgccgagcggtgtgtagctcttgtcgggcagcagctcgcgcagcttcgccgtgtcgtccaggctcacgtccagataccccaggatctgctcgcgcagcccgtcgttcaaaatgggccaggctatctcgatgcgcttgtccatgttgcgcgtcatgaggtcggcgctcgacaggtagagcttcatcgtctcgcgcgggccgaacccgtagatgcggctgtgctccaagaggcggcccacgatggacaccacgcgcacgttctccgtgagcccctcgagccccggcacgatgcacgagatgccgcgcacgaacagcgtcacgggcacgcccgcctgcgaggcttccaccagcttctcgatcacgtccttgtcggtgatggagttcgtcttgaagaacagcccgctcggctccccggcctgcgcgcgggcgatctgcgcgtcgatgccggccagtatcatgggcttgatctgcagcggggccacccacatgatatcgtagttgtccgaggtgttctccagccccatgttgcggaagaactccacggcgtcgcggccgaacgtggcatcgcatgtgatgaacgacaggtcggtgtagagcttcgccgtcttctcgttgtaattgccggtgcccagctgcgtgatgtgctgcaggccggagtcggtctggcgcgtgatgcagcagatcttcgagtgcaccttgaagtcgcggaacccgtagatgaccttgcagcccgcctgctcgaagcgctgcgaccattcgatgttgttgctctcgtcgaagcgggcgcgcagctcgaacagcgccgtgacctccttgccgttctctgccgcggcgataagcgcctcggcgaggtgcgactggctggccaggcggtagagcgtgatcttgatggagatgacggccgggtcgttcgccgcctcgcgtaggagctgcacgaacgggtccatgctctcgtaggggtaggagagcagcgtctcgcgctccgtcacctgctcgatgagggagcggttgcggtcgaggcacgccggccactgcggcgagaacggcgggttcgtgagcgccgcgcgctccttcgccggcagccgcgacgccagagcgaacgtgtagcccaaatcgagcggcaccgaggtggagaacacctggtggggccttaggttaaggcgcgccagcagcagcttctccagcgtggtcgacagcggccgctcgctctccaggcgcacgggggccaggcgggagcgcttcttcaggatgcgcttcatgtgctcgcggtagtcctcgtcggcctcgtcggagccctcggtggcatcgaggtcggcgttgcgggtgacgcagatgacgttcgtgtgcttcacggtgtacatggagaatatctcggccgccaccatctctatggcgtgctccagcaggacgaaggccagctccttgcccttgcccggcagcgcgatgacgcgctcgcactggcgcggcatcggcacgagccccagcgtcacgccctcggcgcccaggttcttcgccttcttcgcctccttgacggcggccttgtccgccttgccgtccttgtcggccttcgccttcgcggcctccttcttccgctgccgctccgcctcgtcgttcaggcgcaccaccacgtacagcgcgccgttctccaggtgggggaaggggtggcgcgcgttgatgatctgcggcgacaggaacggcatgacgttgtcgtgcacgtaggcggcaagccacgcgcgctgctcgtcgtccagctcgttcgggcgcaggtggcgcacgccgcgctcgcccagcaggcggcgcacctcctcgaacgtgcgctcctggatggggtatagctcgtggcagcgcgcgtagatggcgtcgagctgctcggagggcgtcatgcccgacttcgagtccacgatgtgcttcttcacgagggacaggtcggtcaggctgcccacgcgcaccatgaagaactcctgcaggttgctccagaagatggagacgaagttcaggcgctcgagcaacggcaccgtctcgtcggcgccctggtccagcacgcgctcgttgaacgtgagccacgacagctcgcggttctgcatatagggagccgcgttagccgcaggtgcggcgggctcggccagtgctgcggcgccctcggcctgggcggcgggctcggcttgcgatgcggcggccgtagggctcgcggtttcctcggggttcggcgtatccttcgcagcgtccatgctagctcccttcgtctcgaacccgctatcccagcacgcgttccacgagatagccctcgcgcacgccgtacttgcagatgtccagccgctcggcgcgaagctcgcccatgagggtgcccaagatcaggcagcccggcacgagcgtgtggatgcgctccgccgacgccttgagcgccaggtgcgcgaacgcgtcggggtcgttgcggcacgtgtccagtatcgcacgaatctggtcggccgtcatcgttttggggcggatggcttcctggcgcagctgcgcgtgcatcttcgctgccgcgcgcacgctgccgccgatgccgtacacggtgcccgcgcggtacgcgtcgcggttgggcagcgccgccagccgctcgaagaaagcgccgacgatggcgtccatctcctcgggatcgggcaggatggcgcgcacgaacgtggcgtaggaggagagcgacccttggcccaggctcacgttatcgaagtcgcgcccatcctcgatgcgggtgagctccgtggagccgccgccgatgtccaccagcgtgccgcgctcgatcgtgcggtcgcacgtggcgcctgcgaatcccaggtgcgcctcgtcggccgccgagagcaggtcgatggtcagcccgctctcgcgctctatggcggccaccgcctccgcgctgttcgcggcgttgcgcagcacggcggtggcgaacacgtcgatgcgcttgcagtcgaagtaccgtgcccgcttcgcatgtcccttgagcacgcttgccgcccgccgcacgccgtcatccgtgaacgtgccgtctgcggccacgaaggcggacagccccgccatgaccttgtcgttgatgaggctcttgaagtccttgctggaataggttttccggcggtcgtccttcacctcgtacaccacgaggcggatggtgttcgaccccaggtcgattacggcgtagttgggcatggcgggttctcttgtctgtcgggcggcctatccacgccgggatgcaccgcgctctccggtcaattaatccattctagggaatcggcgggcctccgcaagcgcgcggcgcgattcggggccaaagttttacgtgccgttgatgtgctctccctccctccctccctccctccctcgtccttctgcctcctgtcccgcgttttccaagtcgcgctcgatctctccgtcgcgaggtcctgacgcggaaaggggccctctatgccaaaaaagagccggtgggagtgcggcagcccgcttggaccgcctagacggcgtagccgagccgcctcctgcggcccgtgatcgtatcgtacaccatccggccctcctcgcggaagcccttgagcctgccgtccctgtaccaccgcatgaagccgtcgagctcctccatgaagcgcgcgggcggggtcgccgaccagtcgcggccgtggtagaactcctccttgagcgagccgaagaagccctcggcccgcgcgttgtccgggcagcaccccttcctggacatcgagcgcacgatcccgccttcctcgcagatgcgcttccatgacctggcccggtactggcagcccccgtccgagtgcccgaccacgggagggtgcccctcgggcagggtccccaggtaggcgagcagcgacgagtcgcacagctccgagtcggggcgcagggagatcgaccaggctgcgggcatgccgtcgaagcagtcgacgacgggcgagaggtacaccttcgcccctcccgccttgaactcggtgacgtcggtgacaaccagctcgtcggggcgggccgcgtggaagccgtgggccccgtccttttgcaggggcgcgttggccgggcgctcgtcgggctccccggcgtaggaggagtactcgagcctcttcctcgtgcgccgcgccgccatgttgccctcgcgcatggcgcgccgcacctcgagctcggagacggccatggcctcgccgccgtcggcgccgacaaggagggcggccctcacgcgccggtatccgtaggtgcgcccgctgccctcgaacgccttgcgggcgcgccgggcgacctcctcatccctctccgcgcgctcggcgttgcgcctcctgttgtactcgtaggtgctcttcggcatcttcaagaaagcggtgatctcggcgagggagcgcccggagcccctcctcagcttctcgcctaactcggccttccgcctgttggagagactctccgggtctcctgcttttgggtcgcgcatcagctcccgcagtaccgcgttctccagctcggcctcggccacacgcgcctcgagctcctcgcgcgcaaggctcttgacgtccttcttctccatgggccccgcctcctcggtgcccatcttagccctttcggcggcccgcgcccaggaggcgacgatgtctccggatgcgatgcccagcctgcgggcgatgccggcccagcccatgcccttggccctcagcctcagggcctcgcgcctggtggcctcggggtagcgggcgtgccgcccgtgctcgcagcgccccgggaccctgcgctcgggcacgtcgagctccccggcctcggcctggcggcgccactcgcgcaggcactgcctgctggggttgccgggcatcctcgagaatgcggcatccgtgagcccgcttgcgcccaggtcggccaggatcctctccctgtcctctttcgagtacatctcggctccttccttggataagaacttatgttcgccgtggtggcatgcccccacggtccaagaaaccgccgcgctcccggtttggcaatccctacttcgacgatatgattatgaggaatgacagcgacctggtaaaacgctctttctgcttgactcgctcctggcacgttcgccgctgcgggggcttaccgattgccaaaccggctcgtttttggcactcgagggcgttttcggcgtcactcgcccctgtgcgaacccgagcaccttgcgcgccgtctcgcggcccatgctaagatgggtcgaaggtggcaagaaaggaggggatggcagcgtgatggaaccggcggagttctccttgttcgggggcgtggatcccggggaggtgccgaagcttctcgcgcgtttcgacgcgcacgaggagtcgttcgagaagggggagctgctgttccgcgagggcgacgtgccgcacgaggtggggctcgtgctgtcgggcgcgctccatgtgatgcaggacgatttctggggcaacgccagcatcgtgtccgaggtgggggagggagacctgttcggtgcgtcgagcgcctgcgatccggtgcccgcgctcgacacgcacggcctggcgctggttcccacgcgcgcgctgtacctggatacgggccggatactgaacccgccgcccggtgcgcccgcctgccacgtgcgcgcgctcgccaacttcgcgcgcatgctcgccggcaagtacgccgtgctcaaccgcaagatcacgcacacagcgaagcgcacgacgcgcggcaaggtgctgtcgtacctttccgagcaggccgccctcgccggaagcgacctcttcgccatcccgttcaaccgccagcagctggccgactacctggaggtcgaccgcgcggcgctgtcgaaggtgctcgcgcgcatgcgcgacgagggcgtgatcgacttcgaccgctcgacgttccgtctgctgaggccgtaaaggtccaatcaggcgacttgccatcgaaaactcgcggtggttctcactttcgttgcatatgacacatacggtgtcgctgctgcgccgtacgatggccttcgtcaaaaaacaagcgaaggagtaaccacccgtgagtattttcgagatcatcatgctgatctgctttggggccgcctggcccttttccatctaccggtcggcgaaggcgcgctctacgaagggcaagagcctgctgttcatgctggtggttgccaccggctacgtggcgggcatcgccaacaagctcgtgtacaacttcgacggcgtggtgtacctgtacgtgctcgacctggtgctcgtgtcgacggacatcgccctgttcgcccgcaaccgccgcctggagcgccgcggcgagggcgctgctgcgcgggtcgccgaggccgcctgaccgtccgctcgcggcgctcgaccatccgcgcccaggctcgcgcgcctcgggcgcccgcatggcgcccacgccggcaggcgcccgcacgctgcctcgcggcgacggtcgcccgcatgcggattcgcggcgcctcgggcgtccacgcgccggcatcgcggcgcccgacccacgcttctgcatcgtgaccttcccaccctcgtcggccgaccttcccgaacagcctggagccgcgatcgcggcaccggatgcggccccgctttcccttctggttcaagctgccgggcccattcgcggcctgtgctatgatgggcacacagtttcgggaaaggatgccctatgctcgagtcagtcgacctctcacgtcccccgctgtccaaagaagagtacaagccgcgccgcgacgcgctcatggaggagctcgtggtgctgcagcaggaggcggtgaagaagggcgtggggctggtggtgctgttcgagggttggaacggcgccggcaagggcagccgcatctccgacctcatgtacaacctggacgcgcgcgccacgagcgtctacgtcaccgaggacctggacgtcaaggccgcccgctcctttgcgggcgcccggcaaggggtgacgggcttctacccggtcatgcaggagttctggcgcgcgctcggcccgcgcggcgccatcacgttctacgatcgcggctggtacacggccgccacgcagcacctgctgtacacggagttcggcgcgctctcgctgggcgggccgggcggcggcgccggcaagggcgggaagaaggccggcaagaaggccgttgccgccgtggagcgggcgcgcgacgagcggcacatcgacctcttgcaccgctacctcacctcggccgccgacttcgagcagcagctcgtggacgacggctacgtggtggtgaagttcttcgtgcacgtgggccaggaagcgcagaggaagcgccttgagcgcctgcacgacgacccggccacgcgctggcgcgtgagcaaggagaagcttgccagcgtgcgcaactacgcgcaggcgtaccgcctctatgaccacctgctggagggcagcaacttctcgtacgcgccgtggcacctggtgaacggcgaggacaagcgcgcggcgaacctggctatcgccgaaacgctcgtggaggccgtgaagggcgcgctcgcggcccagcccgatcctgccgtggcccaggcggccgcgaaggcgcaggcgaactcggccggcctcctggacgaggcgccgcagggggcgcgcacgcccgagcaggagcaggccgtgcgcgccgccgccgagcaggaggccgccgaggcctccgcacgcgccccgcgcgcctcgcgcttcgtcatcatggatgactaccccgcgctcgatgcggtggaccacgcgctggcgctggcgcccgaggactacaagcgccagctcaaggccgagcaggagcgtctgaacaagctggagatggagatgtaccagaagcgcatccccctcatggtcatgtacgagggctgggatgccgcgggcaagggcggcaacatcaagcgcgtggcccaggcgctcgacgcgcgcgcctacaccgtgttcccgagccccgcccccacgaagccggagctcctgcacccgcatctctggcgctactggacgcgtctgccgaaggccggccacgtgggcatctacgaccgcagctggtacggccgcgtgctcgtggagcgcgtggaggggttcgccacgccgagcgagtggggccgtgcctatgacgagatcaacgagttcgagcgcgagctggtgcgctggggcgccatcctgctgaagttctgggtcgacgtgagccccgaggagcagttgcgccgcttccgcgaccgcgagcaggatccggcgaagcagtggaagatcaccgacgaggattggcgcaaccgcgataagtacccccagtacaaggcggctatcgaggatatgttccgcctgacgtccacgcctttcgcgccctggatggtgctggagagcgacgacaagcgctacgcccgcgtcaaggcccttaaaataatcaacgatgcgctggaagcgcgcttgcgcgaaaagtgagatagcgctaccatgatcagacgatcggaatcgaaccgcatgcttcggcgtgcttggacaaaggggtagccaccatggtggaacttttcggaatgcagattcccatgtgggcaatttgggtaatcgcggccatcatcgttcttatcatcgtcgtattcatcgccaagggcttcatcgacgagatgaagaagaagtagctccgctggaaccgccgcttcgtgaaatatgagcgttttcgaggcaccgcgcccccattccgggggcgtttgcttattatggtaacggtctggagacggcgggcgaggccccgcgcgtagcccggcattcgtccatccgaaagggagctatggccgagtatcgacaatatcccgacccgacgccgcgcggtcgccacgcgctgcgcggctccgcgcagcctgacgagcaggctccccggcatgccgcccgccagccgcagccccagcaatcctcgcaaccgcagcagccgcagcaccgggcccagcccgaagtgcaccgtgcggcccaaacacggcagcgcgctccccagcagcgccaggcaggctctcggcaagcaccccgcctgcaggcggccccgcacccggcggcgcagcagcgcgccccgcagccgcagaggcaggcggccccccaagcatatacgcagcagcaaggccggccgggccatcacccgccccagcagggagcccgtccgcagggcttccgtcctgcccaggcgggacgcgccgtgccggctgcctacggcgcggacgcggccggcggcggccatggcggcaagggcaagggccgcggcggcgcgaggaagggcggcccgtggcgcatcgtattctgggttgcgctcgtggtgttcgccgtcgcgctcgtggcgctcggcgccatcggctacagctactggcagggccagaacgcctacgactccgtggccgaggaggtgttcgcggcgcccgaggacctcgagggcacggcgctcgccgacctcacggttgactgggaccgccttctggccatcaaccccgacaccgtgggctgggtctacatccccggcactgcggtgaactaccccatcgtgcacacgaccgacgacgagaagtacctcaccaccgacttcaacggccagcaggcgtggggcgccacgtacggctccatcttcctgtcggcggcgaacgcggccgacttctccgacgcgaacaacatcgtgtacgggcaccatctgaacaacggctccatgttcgccgccatcgcggacttcgagaacgcggaccagttcaacgcccatcgcacggcctatatcctcacgccgcagggcaacttcaagctgcggtcgctctcgctcgtccacgtggcggccgacgacccgctggcccagacggcgtttgcgacggagggggagctggcctcctatatccaggacaaggtcgaccgctcggtggtggcggtttccgatgcgccggcagctgcggatatcgcgcacctgtttgcgttcgccacctgcgacaacctgccgagcgatgggcgcttcgtgctgttctcgtacctcgaggagagcacggtggcgggcgtcgcggccgtgggcggcaccgatgcggccgtcgacccggaggccgcagccgccgtggacgacgcgtcgaaggaggtcgccgcgtgagcacgtccgtgcttcccggggagcgtcccgaccgcttggaggaggagtgcgccgtgttcggcgtgttcgcccccggcgaggacgtggcccgcatggcctgcttcgggctgcaggcactgcagcaccgcggccaggaaagcgccggcatcgccgtgggcgacggcgagaccgtcgtggcggcgaaggacctgggcctcgtgacgcaggtgttcgacgaggccacgctcgcagcgctcgagggcttcgtggccgtgggtcacgcgcgctactccacgagcggcggcgccgcgtcgtgggaggccgcccagccgcacatctcggccatcgacgacgtgctcatcgcgctcgcgcacaacggcacgctcgtgaacacgagccgtctgcgcgcccgcctcgtggacgagggcgtgcagttccgctcgagcaccgacagcgaggtggccgcgaaggccatcggccaggagacgcaggccacgcaccatcttcgcagcggcatccgccgtgtcatggaggacctgtcgggcgcctacgccatggtgctggccagccccgactcgctctatgcgttccgcgacccgaacggcattcgaccgctgtgcatcggcgagctgccggacggccgcggctgggcggtgtccagcgagacgtgcggcctcgacatcgtgggcgcgcgctacgtgcgcgacgtggcgcccggcgagatcgtgcgcttcaacgaggagggcatgcacgccgagcagggcgtgcccgcgggcaggccggccgcgtgcatcttcgagtacgtgtacttcgcgcgccccgacagcgtgatcgacggccagagcgtgtaccaggctcgccgcaacatggggcgcatcctgacgcaggaggcgcccgtggaggccgacctcgtgctcggcgtgcccgactcgggcgtgccgccggcgctggggttcgcggccgagagcggcatcccgtacgccgacggcatcgtgaagaaccgctacgtgggccgcaccttcatcgagcccacccaggccatgcggcagctgggcatccgcctgaagctgaacccgctgcgctcggtgatcgagggcaagcgcctcgtggtcatcgatgacagcatcgtgcgcggcaacacgtcgaagaagctcgtgcagatgctgcgcgacgcgggggcgacggaggtgcacctgcgcatcgtgagcccggaggtgaggtggccgtgcttctacggcatcgacaccgacacgcgcgaccagctcatcgcggcgaacatgacgctcgacgagatgaacgcgtggatcggctcggactcgctggcgttcatctcgctcgcgggcctgcgcgccgccgtgcccgacgcgcgctgccagggcttttgcgacgcctgcttcacgggcgactacccggtggagattccctcctccgtggcgaagaagagcttcaagacgaagaaggatttcgaggagatatacgccgaaggcgaccagtaggggaccacgatcaagcaaggagcgttaccatgaccgagagaataaccgtgagcgccgccggagccgacgacgcccccgcgatgcccagttggatggacgaggaggccacgacctacgcgcaggcgggcgtggacacggccgagggcgcgcgcgccgtggacgccatcaagggcgtggtgcacgatacgtaccggcccgaggtggtcggcgacatcggcggcttcggcgggctgttctccatcgcggcggccaaggacatggacgacccgctgctggtaagcggcaccgacggcgtgggcacgaagctcaaggtggcccagctggccggcaagcacgacacggtgggcatcgacctggtggccatgtgcgcgaacgacatcctggccacgggcgccgagccgctgttcttcctggactacgtggccatcggcaagctcaaggccgagaacgtggccgagatcgtggcgggcatcggcgagggctgcaagcaggccggctgcgcgctcatcggcggcgagatggccgagcaccccggcgtgatggacccggacgactacgacctgtccggcttctgcgtgggcgtggtggaccgggcgaagatgctcgaccccgcggccgtgcgcgagggagacgtgctgatcggcctggcgtcgagcggcctgcactccaacggctactcgctcgcccgcaaggtgtgcgtggagggcaagacccactacgagctgcgtcttgagcgcgaggagctggacggcgcgtgcctgcaggacgccctgctcacgcccacgcgcatctacgtgaagcccgtgcgcgccgtgctggacgcctgccccggcgccgtgcgcgcgctggcgcacatcacgggcggcggcatctccgagaacctggaccgcgcgctgccgaagacctgcgacgccgaggtggacctgggcacgtggcccgtgcctcccatcgcgaggttcgtgtgcggcgccgcgcacctcgacgaggctgaggcgctgaagacgttcaacatgggcttgggcatggtcttgatcgtcgaccccgctcgcgccggcgaggtggaggccgccctggccgaggccggcgaggccacgtaccgcgtgggccgcatcgtagccggcgagggcgcagtgcgctacgcgaacgacggcgagctctacgggtacgacgccggcgcggaggcgtagggccatggtcgaaccgcttaagatcggggtgctgctctcggggaacggcacgaacttgcaggctatcatcgatgcggcgggcgaggggctgccggtggacatcgtgcgggtggtgtcgtcgcggccggacgcgtacggtatcgagcgggcgcgcgcggcgggcatccccgcaaccgtgctcaaccgcggcgtgtacgccgaccccgaggcggccgacgcgcgcatcgtggcggagctgcgagaggcgggggcggaatacgtggtcatggcgggctacatgcgcaaggtgacgccggtcatgctcgaagcgtttcccgaccgcgtgctcaacctgcatccagccctgctgccgtccttcaagggcgcgcatgccatcgccgacgcatacgacgcgggcgtgaaggtgacgggcatcaccgtccacttcgcgaacgaggactacgacaagggccccatcgtggcgcagcgcgccgtggaggtgcgcgaggacgatacgctggaggcgctcgaggcgcgcatccacgaggtcgagcacgtgctgtaccccgaggtgctgcgcctcgtggccgaaggccgcgtgagcgtgggcgaggaccgcaaggtgcatatcgcccctgcctgacgtcgggcccctgactggtcgcgcgaaaggcgcgtccggcgcgcagggcccctcttccggcgcgcgggaggggcgtgcgtattcgaccacgtctcgcgcgcagcttgcaaccgtgcttgtcgaccgtaaggagccctgcccatgaacaaggaaacgctgcaaagcatcgtcgacgacctgcgggcggggcgtacgccccggctctcgcccgaggacttcccgtgcttctcggccgaggcgctcgagggcaaccaacacgtggacccgtcgtaccttgacgtggtcgccgcgagcttgaccacggccgacgtccccaccttcgagtgcgccctgcgcgcgatggacgagggcgacctcgcctggctcggcttcaaggtggtctacgatgccgccgaggcgcaggccaacaccgacaacgaggtgacgaagaagtacggcgagacgggctccgccgacggcgagccgctcgtgttcttctgcaacgacgcgaaggagatcgtcgcatcgcggccgttcagcccgcgcgacacgttccagatgaaggacgccacgcgcggcccctcgatgcacaacgagcagttcgagggcctcacctggctctccgtgccgctgttcgaacaggttcgcgtgtggctgctgggcgcgtcggatgccgcgagcgaggtggcggcgctcgccgaccacgtgggcttcgccgtgtgcgtggtggactacgatcctgcatacgtgagcgaggcgcgctttccgcgggcgcggcgcatcgtgctcgacggcgggaactttgacggcctggccgagctggcctgcgcgccggaggactacgtgtgcgtgctcacgcgcggccatatgttcgaccccgagggctgcgtgtgggccaccgggcatcacgcgcactacgtgggcatgatgggctgcgcgggcaagaacgatcgcgtgcacgagctggtgttggccgccggtgccaccgaggaggactgggcgcgcgtcaagcgtcccatcggcctcaagttcggggcgaagacgcccgccgaattggccatcgccatcgttgccgaactggtggacgtgcgctaccggcagcgctacagtgatgaggcgcgcgagctccacgagaagagtttgggtcgctaagccggccccgatcagcctgtttcccgtcgcggatcggcgggttcaccatagcaggagtcaaccagaaaggatgtaagaccatatgagcgatcctaagatcaagcgcgtgctcgtgtccgtgacggacaagacgggcgtggcggacttcgcccgcgcgctcgtgaacgagttcggggcggagatcatctccacgggcggcacggcccgcgccctgaaggacgccggcgtgcccgtcacgcccatcgacgacgtgacgcagttccccgagatgatggacggccgcgtgaagacgctgcacccgcgcgtgcacggcggcctcttggccaagcgcgacaacgaggcccacatggcccaggcggccgagcacggcatcgagatgatcgatatggtggtggtgaacctctacgccttcgagaagacggtggccggcggggccgacttcggcacctgcatcgagaacatcgacatcggcggcccgtcgatgctgcgctccgcggcgaagaacttcgagagcgtggccgtggtcacgcgccccgagagctacgacgccatcctggccgagatgcgcgccaacgacggcgccacgctgcgcgacacgcgcgccaagctggccctcgacgtgttccagaccacggcggcctacgacggcgccatcgccgcgtggatgggcgcccagctggagggcgagggttccgcgcagttcccggccgagcgcacgctgcgcctgcagaaggtgcaggacctgcgctacggcgagaacccgcaccaggcggccgcgttctaccgtcgcgacggctacgtgaacgccgagcactcccttgcccatgccaagcagcaccagggcaaggagctgtcgtacaacaactatctcgacctcgacgccgcctggacggccgtgcgcgagttcgacgagccggcctgcgtcatcgtgaagcacctcacgccctgcggcgtgtgccaggacgacgacctcgtggccgcctaccagcgcgcgcacgcgtgcgacccggtgagcgcctacggcggcgtcatggcgttcaaccgtcccgtgacgagcgacgtcgtggtggccatcttcgacaacaagcagttcgtggaggccatcatcgcgcccgagttcgcgggcgacgcgctggacatgtacagcgccaagaagaacgcgcgcctgctgtccacgggcggcgtgaacccggccggcggcgaggtggagtatcgctccgtcgaaggcggcctcctgtgccaggactccgacgccgtggccgaggaccccgcggcgttcaccgtgcccacgaagcgccagcccaccgacgaggagatggccgagcttctgttcgcatggaaggtgtgcaagtccatcaagtccaacgccatcgccatcacgaagggccacgctaccatcggcgtgggcggcggccagccgaaccgcgtgaactccgcgcgcatcgccgtggagcaggcgggcgatgctgcgcagggcgccgtggccgcgtccgacgcgttcttcccgttccgcgacggcctggacgcgctcgccgaagccggcgtgaccgccgtcatcgagccgggcggctccatccgcgacgaggaggtcatcgccgccgccgacgagcacggcatagcgctcgtgttcacgggacataggcacttcaggcactaggaaggcgccttttcaggcggcctcccggccgtcgaaacgctcgaaaacgaagggacgcccgcaaggacgtcccttttcgatgggtgcgggaaggtgcctcgtcgcgcgatggcagccggccgccgggtgctattcgccttccgtcagatccaggcggttgatgcggtcggccaggtcggcgcctcgttcgtagaacagcaggtcctcgttgtgcgcaaagtaacgctcgcagccgtgcgcgttgatgaaggccatgccgtagcggttgacggacaggtcggtgacgagcagcagcatctcctgaccgccgccgaacgcgtcttccacgaaacggaaagcgctgtcgagcgcgctcgaggtgtctgcgatgcgcgcgtcgagcgcgttgacctgctcggcgaacagctccttgacgcgcgagaacggcacgccgccgcccgccgcgtcgcagcgcagcgcgcggtcgaccagcgcgagcgtgcgctcgtacgccacgtacttctcgtccgacagcagccccgccttgcgctcggtggtcagccgcgcttgcagcgaggcggcttcctcgcgcagcaggggcagcgcgttcgcgtcgtcgccttcgaggtcatcgcgcagcgcggcaagcctgccgtgcatgaactccacggcgcgctcctccagcacggcgtcgcgcaggcggctgccgagggcgtcggtgatgaggcccatgagcgagacgcgctcgtcgaaggcggcctcgcgggcgcggtcgagcacgccccgctcggcctcgccggccaggatgcggtcgatctggtagtccgctcggtacttcgtgaataggtcgtagtacacgctgaagcgcttcgcgatttcggcgttctgcacgtattggccgatcagcagctcgtcaacggggatgccctgttcctcgtacagcttcatcatagccgacaggtcgtcccagccgcgcgcggtgacgaacgacttgccgtccacggtggtctccacgcggtagaagtggtcgcgctcgatgtcgaggtaggtgagcacggcgggatgcacgcccgtctccacggcgaagtcgcgccaggcggcgaagtcgggctccacgtcgatgcgcttgaggcggtcccatgtggcgatgtcgaaatcgtgcgccgtgcggttgtactcgggcgggttgccggccgtcaccacgatccagccgtccggcacgcgatggcgtccgaagatcttgtattgcaagaactgcagcatcgcgggcgtcagcgtttccgacacgcagttgatctcgtcgaggaacaggatgccctcgcgcttgccggtggcctccatggaatcgtacacggcggcgatgatctcgctcatcgtgtactcggacacgtcgtactccacgccgtcgtaggtcttcttcgcgatgaagggcaggccgagcgcgctttggcgcgtgtggtgcgtcatcgagtacgacacgaaccccacgtcgagatcctgcgcgatctgctccatgatggccgtcttgccgatgccgggcgcgcccagcaggaacacggggcgctgtcgctcggtggggaggcggtagttgccgaactcgtccttcgagaagtaggcgaccatcgcgtttttgatctgctgcttggcttgctggatgtccatggttcctcttctcgttcgcggttcgggggctttcgtagggcaagggctctgcccttgccgctggacctgcattgatcgttccggctgggcggcaagggcagagcccttgccctacggggctcccggggacgcttcttccatcatgacggtttcgtcgagctccaccttcatggcccacgcgggaacgtgcgggctggcggcggcggatgcgtcgtcgacgaagacgaacgcggtatcgtagtcgggtttgcgggccgggtaagtgccctggccgtcggtgaagtagatgaggccgcccaggttcgtgaggtcgccgcgctccacggcgtcgtcgacgtaggcgaacacggggcggaagtcggtgccacccagccccttgatctcgagatcgtccaggtagtcgtccagatcgcgcaggttcgcgatgcgggcgacgtccgtgacggcggcgtcgcactgcacgatgagcacgttcatgtcggcgaagaagctcgtttcctgctcgaggatggcgtacgtcttctcgatgaagcggcgcacgagcccgtccttcgtcgatgccgaggtgtcgatggcgatgacgaagtcgcggatgcgcttctcctccacgtactcgagcggctcgatgagcggcaggtttccgtagcgctccaagccgtagcagtagtagacgtagtcgaactcgtcgtcgttcacgcggatctgctcagcgcagcgggcgaacttgcgcaggaattcgcggtagtcctgcttctcgcgcgtgaccgcgcgcaggttcatggcgaggttcgcgcctttgacgccccagagcttggcgtaggcgtccagctgcacgcccatctcgagcgcggcgttcttccattgctcgcgcgagcggtcgaggttcacggtgtcggcgaaccgctcgcccacggagggcttggcgttctcgggcgcttccttctgcgttatgtcgtccgggtccatgccgcggtgcgaggcgtggctgcgcttggcgctggcggcgtccggcggcagctcggcgtcggtgccgctctcggcgggcccggatgcgggcgccgtggacgagccgtcctcctgctcctcggcgcgccgaccctcctcggtgacgtcgccctcgccctcggcggccatcaggcggtaccagggatcgtggtcgtccacgtagaagggagcgcgcagctcggccagctcggaggcgtccaggccctcgtcctgcaagtagcggtacaccgtctcggcggtggccagcggcaatgccgcgtcgatgcgggcgcgcgcggcctgctgccgcgcggcgcgcgcggtgcgggtggcgggcaggtcgagctcggcgatggtgcgctccgcgacgatgtcgcaggccgcgtcccagcgcgctgcgtcgacatgcggcccgggatagaggtggaggaacacgttgtgcagcacgatgtgaaggtaggcgcgggtgagctcggccggctcggcggcgtagaggcgcgcgagcgcggcgggatcgtagcggaggcgcgcgccgtcggtggcgagcgtggagcccgcgacggggaagggatgcaggcgcgcgaacgcggcgttcatgaagcgcaggttcacgagcagtgcgtttttcgcgaggtcgagggcttggcgggcaagcggctcggcagcatcggacgccatggggcctccttcgacgggcgtttcgtgcggcggcgggcggcatgctcgttgcctgtgcgcgcggcgcgcgtcggcttgacgcttgccatcgccaccacgggcagtgtagcatgggggaagcgggtggtaaactgctactaaaaaggtacatttgggaggtcgcacaattctatgacagggaatatgctggtatttcacgatacgtcaaccgaattgaacgagctcattgagcatgtgcgcaaaaatccgcccaacctttgcgcacaggatgtcgacgtggtccgcgccgcgcaggctgcagagggcgaggtgtggtccccgcagctgccgccgtaccgggcgtgggcgtcgcgggacgaggcgggtgccgggggccagggccggcagggcgcggacggcgacctgctggtggtgggcgcgctgggcatggggttgtcggacgaggagcgcgaaaagctgctcgcacatgcggcggagcggggaggcgcagaggagcgcatcggaaaggacggcgcagcgccctttccgagcgcgggcccgacggcccctgcgcgcgagcgcatgggcgacgacctgcgcggggcgctgcgcgtgcgccaggatgccgacgggtacgcgctcgtgggattcgacctgcgccggctcgccgcggcggcgggaagcgacgacggcctggtggtcagcttgcccgcgttcgtggacggcgtgccggtggtgcgcgtaacggccgaggcgttcacgcgccgactcgtgcagggcgtgggcgtgcgtttgctcgcgatgcccgacacggtgcagatcgtcggcgcgaacgcgtttctggcgctgtcggtgcagcatatccacgtgggggcgggcgtgcgcattctgggtgagcagccgtgcgacctcgccggcgtctcgccgcgcctcaaacgtcgcgagtattccgtcgatgcgcgcaacgggcggttctgcgcgcgggatggcaacctgttcgccgatggcgggtcgacgctgttgtttttagcctcgccgtacgacgagcgcatcgagcttcccgctggcgtcgaacgcatcggcgcggccgcgttcgccgccgggtgcgaacctccttcggtggtgtcgtgcccgccgacgcttgcgcgcgtggatgcgaagggctgggacgatgccgtgtggctgtgcccgcccgaagcgctggcgcatcgcccgctcgccgctcgcggcgtgcggctggcgggtccgcgagcggtggagcttgacggatgctggtacgacttcgacgacgctggcgcggtgctggtggccgggccgcccgcgcccacctcggtgtccaagcggttcgcggcggccgccgccgttcgcgcggcgacgctgcgcgggcagagcgcggtggaacaggcgccgtcgccggggcaggtggcgcacgtggccgcgcattccgccgcaccggaggacgcgctcgtgctgccgcgctcggtggaaggccgcccgctcgtccgcgtgggcgtgcgcgcgctgccctacgctcccgcatcgctcgtggtggccgataccgtgcgcgtcgtcgagcgcgacaacgcatgccgcaacgcgaagcggctcgtgcttcccgaggggctcgaggctatcgggccccactgcttctgctcgcgcatcctcgaagggcccgtgtctatcccggccagcgtgcgctccatcggagaaggcagcttcgagtacgcggtgtgccgtctcgagcgcacgggaacgatcgtgcacgtatcggccgatcagctgctcacgtgctttctgacggacgcggaggacggcgtgccgttcgactacgggcgctacgacgagctgctgcgctcggggaagaacctgccggacaagctgggcgcggtgctgcatcggctgaccgtgccgtaccgcttggaggacgcgacgcgcacggcgctcgtggcgtatctgcgcgatcacgagcgtgaggctcagaagcgtgtggcgcaggagggcgaccgggcgatggtagaggcgctcgtgcgggacggcttcgtcgacgagcgcacgttcgaccggcagatcgagctgctgcgcgcctgcaaccgaaccgactgcgtgctctacctcatggagcagcaccgcgcccagtccaagccgacgagcgtgagggagcggttcgcgttgtgaaattggtgcggtatggaaggcatgcctttggattcggcaaaagcgccgcgatggcgtaagcgccggcttagcaactttatccacgatggtctactatgtgttgacagctcgattggcaaagcggcccggatgcggtagcagggcgttggaagtgcggcacgtgccacattcggtcggcggaaagcggggagatgcgatgaagatgaagaggttcttcaaggttgtcctggtcggagtgtgcatggttgccttggctgcggccgtcgcgggttgtacggcgcctgccgcggattcgcaggcgggcggcaaggagatcgacgtctcgttcgagggcggcatgctctcatgtacgggcgacacgatgaccgtggcgctcgatgcgaatgccaccaccggctacgagtgggccagctcgatcgagggcgaagccgtcaaggccgtcggcgacgagtacaaggccgaaacgagctcggacggcaaggcgggcgccggcggcgtgcacacgttcacctaccaggccgagggctcgggcgaagcgaccatcacgttgaagtacgcgcgctcctgggaagcctccgacgccgacaagacggtggttgtcaaaaccgaggtgaaggacggcgcgttcgcggaagcctccgtgcagtaagtctcccggcacgcttccttgcggcggatgcgcggtgcagggaagcgtggttgtttcgagatggcgtgcaaccgctgctatacttgatagttctaggaacgatcgaggtgtgaggggtgcgcgatgatcgatgagatccaggttgagaacctcgcgttgatccgcgaggcgacgctcgtgccggcgcgcgggctgaccgtgctcacgggcgagacgggcgccggcaagacggcgctgctctcggcgttgaagctgctcatgggcgcgcgcgccgacaaggacgccgtccgcgacggcgaagattccctcaccgtttcgggaagattctacggcatcgcctccgccgacggctccgaatccgacgctgccctggctgcgggcgacttcgacgaactccgggagctcgtggccacccgtcgcgtgacgtcggacggccgctcgcgcgtgtccatcgacggccgcatggccagcgtcggcgagctcgcgcgcgccgtggcgtccaccatcgacctgtgcggccagcacgagcaccagcagctcatgaagacctcccagcatgtgcgcatgctcgacgcgtgggcaggcgaagcggtggcgcaggcgcacgctgcgtatgaggaagcgttcgcgacggcgaacgaggctgcggccgagctggcgcgcgtgcgcgaggcgggcgaggcctcctcggccaagctcgacgaggcgcgcttcgtgctgcagcgcatcgacgcggtggatccgcgcgaaggcgagtacgacgagctgctcgaggagctcgcgcgcgtcgagcacgccgagacgctggtcgtgtccgcgaatacggcgcacgaggcgcttgcgggcgagcaaggggccatcgacgcgctgggcagcgccatctcggcgctcgacggtgcggctcgctacgacgcgaagctcggcgagttcgccgacgcgctgcgcgaggcgggctacgtgctggaggacatggcgcgcgagacgcgcgactaccgcgagggcgtggagttcgatccggaggcgctcgcccagcagcaggagcgcatggcttcgctgcaagggcttctgcgcatgtacggtccgcgcatggaggacgtgctcgagcgtcgcgccgaggcggccgaccttgtgtcgctcgtggacgacgccgccgagcgcgaacgcgcggcgcagcaggagctcgatcgggccgaagaggcgctcgcgcaggcggcggccgtgctgaccgaagcgcgcgccgaggccgcgccgcggttcgctgcggccgtgtgcgcgcagatggaccgcctggaaatgggcggtgccgggctcgtgtgcgaccttgcgccgctcgagcgcggccagtggacgaaggtggggccgcaggcggtggagttcctgttccgcccgggtgccgggatgcaggcgcgcccgctcgcgcgcatcgcgtcgggcggcgaggtcagccgcgtcatgctggcggtgaaggtggtgctcggcgaggcggacgaggtggacacgctcgtgttcgacgaggtggacgcgggcgtgggcggctcgaccgccgtggccttggccgacgtgctcgccgaccttgcgcgcacgcaccaggtgatcgtcgtcacgcacctcgcgcaggtggccgtccgcggccaggctcactacgtggtgcagaaggcggcgggggatgagggcgccatgcccgagaccgatctgcgccagctggacagcgccgagcgacccgccgagatcgcgcgcatgctgtcgggcgacgccaccgagacgtcgctcgcccacgcgcgcgagctgctcgagcgggccgccgactgacgcgtgctcgtcgcctcgccctctaccagcgacgctcgatgagccgcggaagcgtgcccgacagcacgagcccggcgatgcccgcgccgatgcaaagcgcgaacacgggcagtgccgcgcttgcgaacgacgcgccggcaaccgcgccgcatgccgccgatcccacggtgccgcccagcccgcggaagaacagcgcgagggaggtgaccttgcccatgtcgcgcggctccacggcggtctgagcggcgatgttggtcatgggcatgttcacgccgatgccgaatcccagcatcgccgacgagcacgcgagctgcaccatgccggttgcagggcccacgaggcacagcagcagcgctccgatgcccagcacgaggaacccgatacggctgatagcgcgcattctcccgttcctgccgaacacccgccccgccaacgtgctgcccaccacgagcgccagcgtcatggggatggtagccagcgccgaggcggacgacgagagccccaacccttcctgcacgaaccgcggcacgaacatcacgccgattagcagggcgaactgcgagcagaaccccatcgccaccgccccgttcacttgcgcgcggcggaagagccgaaccggcacgatggcgtgatcgcggcgtcgttcgaccagcacgagcaccgcgatcatgacgacggccgtcgcgagaagcccgaagaacggcccggagaaccacgagaaggcgctgccggtcaggctgaacgcaagcgtgagcggcacgatggcagtggctgagcacacggcgccgggcaggtcgaacgaccgctctgcatgggcttgcttcccgggaaggaaccgcactgccagcacgagcgccacgatgctcaatggcaggttggcgaggaatatccagtgccagccaaccgtgtcggcgatcagcccgccggccagcggccccgtgatggaggccaagccgtacatggacgagaggatgcccatgtactttccgcgcacgcgcggctcgaacagctcggccatggcgatgaacacgccggcctccacgagcccgcctcccacgccctgcacggcgcgccatgccgtgagcgcgtcgaggctgttcgacagcgcgcaaccggccgatgcgacggcgaacacgctgatgccgcaggcgaacacccgcttgtggccgaagcgcgtcgcgcatgcgccgcacaagagcgtcgccagcgtgcaggtgagcaggtacgaggtgaacggccaggtgtagtggtcgaagctgcccaggcccgcggcgatcttcggcatggcggtgctcacgatggtagcgtcgagcgcggccatgaacaggctcaatgccagtcctcccagcacggcggaggtagggaaaggcttgctctccgcctgcgcctgcccgttgcgccgcgctgcaccggccgccgcgccctcgagcgccctgttgcgcgcggctgcggccgaagtgcgcgttcccgcgtcgagcgcctgttctctcaagttttgcacgtccatgatatctcctatctacaatattactatcaatgatagttagtgccgaaaaagaaaccggtcaacccggttcctcaattagttagtgcatcagaatgccgtttttttggcgcattggcctgtcgccaacggccagtcgaatccattgccctctaagccctccctgttgcgcctgtggaaagccttgccggtccataagtctcttcgcaggtacaaaagcaagatcactgctcagatttcaacgcaagggagggagcattcggcggtgcgatgtttcacgtgaaacatccgttcgtgttttgcgcgtcaagcatcgccgtacagacccttctcgaactgctcgaggtgtttcgccaccaggcggtacgtgtcggcgcacagctccatcgtcgctcgcgcctcgaggcgctcgtatgcgggtatgagcccatccacgcgctcggccgtgcttcggtgcgtctcgatgagctcgtcgatgagggcacggccggtcttctggtccacgaggctgatgtttgccaagacgggcaggaagccgaagtccacgcgcgcgggcagcgcggcggcctcgtccatgagctcggcgaagcgctcgcgtcctttgtccgtgatggtgtacaccgtcttctcgggcatctcgccctccttgacgacggtgccgtcggcgtagccttcgtcgcacaggcggatgacgttgcggtacaccgacggcgagctgatgcgtatccagcggcggacgttgcgctcttccagcgtcttgtccatctcgtacgcgctcatcggccgctcgatgagcgctcccaggatcatgatctcgatcgaatggctggccatttttctggttcccttcggttttcgttggcaaggaatatactatcactgatagtataaagcgcaaggggagactgcagaaatctcaccgatggagggcgcgagcgctcgcacgccactctcggggcgggaggccgcaccgggcacgaaacgcttcggagaagctgccctgacgggaataacccacgcgtgcggctatttcggccagagacaggtcggtggtctcgagcagctcgcaagcgtgatgcatgcgcacatcgcgcgcgtactcctgcggcgtcatgccgcaggatagcctgaacaactcgatgagcttgctcgttcccatgcaagtcgcgcggcagagctcctcggtggtagcggggcgcgcgagatcttgctggatgaggtgctgggcaaccgccactgcggcgacgtcgtctgccgagagcgcgatgggcgcacggccgcatgcaagccgccaatccacgatgagcgcgcacgcttccactactttgctctcgtagaacgcctccgccacgacggcgctcggtcgggcttgtcgcatgtcgtcgagcagggagggcagcctggcggggcaggacgtgccgtcgagcgcggtgatagccgagctcagcaccacggggtcgcagtgcagccgcaggctgacgtcgcgcagcgcctcgggcaagagcatgacgaacgtctctcccaacctcgccccgccctgcacccgctgatgatagggggcatgcttccaggcgtgccccaccacggtgcggtcgggcagtgtcgcgtcgatacccaagtaggggagcatcccctggttgtaggagccgaagtagaagcaatcggccgcgtcgcagaagaatccgccctcctcgcgaagcgtaaagtcgaacgcgcccaccgctaggcgatcgccgatggggaagtaccagaaggagcccatgccgatcgcgggatcgatcagccacaggagcccttgacgcccgtgttcggccgcgtcggccggcacgccgccaagctgccgtacctgcggctcgaacagcgtgtcgatggccctgccggccccgcggtccgtttcggcgcgattcttgaagttttcggcgggattgcgcattggcgcattcctcctctccgttcccccgaaggacgctagtatagttaaccatggataacaatactactacaaacagggccttgggggaacagtctgcccatggcgcaaacgcagcaccgtcattcgcctgcgccgctactttgaaagctgcgggcgcgacgaggtcgttgcatgcgggtggcggggatgcctgcgccgcgaaagcgtcggagagggcctgcggcagggctgcggcagtgccgcccgcgcaccgcgtcgatccccgtgtctcgttggtctgcatcctgttgatcggcctgtccacgttcgcctccgcatcggtggcagttgagttggcggcgatgggcgggtgcgtgctcgtcggcatctggtgcgggcggccctcctcggccctgcgttgggctgcggcctgggcggcgctgttcgtcctctgctggctgtgcgcgcactcgggcgtggtgctcatggccgtgggcgcctcgttggcgatgctgcgccgcatgctgtgcgccttcatgatggctgcgaacatggtgggcaccacgcgtaccggggagctcgcctacagcctgcagcgccttggcctgccgaagcgggtgtcggcggcgctgtgcgtgatgttgcgcttcgctcccacgctcggtcaggagttcggtgcggtacttgacgccatgaaggtgcgcggtatcgcgctctcgccggcacgtgttttgcggcatcccgtgcaggtggtcgagaacctgctggtgccagtggtgggacgagtgggtatcgtggccgatgagctggcgaatgcggcggccgtgcgcggcatcgacgcgccgaatcggcgcacgagctactacgagctgcatatcggtgcggctgatgcgctgctgcttgcgtacttcgccgcgattgcgggcgtgtctgcggcgctgggcgcgggggtgctggcatgacggcgtcgcagaggctgcgcgatggcatggccgtggaattccatggagtggcgttctcctatgccgatgcggaaggaaacctgttcgagccggtgttgaagggtgtgaacctgtctgttgcgcgagggcagtgcgtggcggtgacgggttgttccggctgcgggaagaccacgctcatgcgcctcgtgaacgggctggcgccccaagcctacgacggggagctttccggtgcggtgcgcgtgctggggcaggatgcggccgacttgggcatcgaggggctctcgctgtgcgtgggctccgtgttccagaatccgcgcagccagttcttcaacctggacaccacctccgagatcgccttcgggtgcgagaacgcgggcctgccgcacgatgagattcacctccgcgttcacgacgccgcagccgacctgggcatctctcatctgctcgaccgtgacatccggaagctttcgggaggacagcgccagatggtggcccttgcgtcggtgcatgcgctgggtccggaggtgttcgcccttgacgagcccacggccgcactcgatgtggcgtccatgcgcacccttgcgcacctcgttcggcgtctgaaagagctagggcgtacggtgatcgtctcggagcaccggctgtggtggctgcgggggatagccgaccgggtggtgcatatggagaacgggcgcatcgcccacgactgggtggctgcggaattcgagcgcctgtccgtgtgcgagcttcaccagatgggcctgcgggcctggcgcatcgaggatgcccgcgccgaagacatgccgacggccaggcaggatccctccgctcccatgctcgccccgggcgccgcctccgctgcagcgctctcgttcagcgaccttcgtgcgggctatcgtcgcggcggtgatgtgctacgcggggccgccggcgtgttcgcgccccggcgtatcgcggctttggtgggaggcaacggcgcggggaagtcgacgcttgcgcgctgcttggccgggttgcatcgcgagcgcgcgggacaggtggcgttcgggggccgatcggttccgtatcgcagacgagccggccgggcgttcctggtgatgcaggaaccgggctaccagttgttcgcccatacgaccgcatgcgagctggaagcggccgcggcccgccgcctcggccgcggcaaggcggcgcggatggcggccagcgaggcgctcgaccgtttcggcctggcgcatctggccgagcggcatccgctgtcgctctcgggcggcgagcgccagcgactggccattgcggccggcgtgctgcaaggggctcgcgttctggtgctagacgagcccacgagcgggctcgatttcgccaacatgcaggccgtcgccagagagcttgagcgcgtgcgcgacggcggcacgtgcgtgacggtgatcacgcacgactacgagttcatcgtcgccgcatgtgacgaggtggccgtggtggcggatggccgtgtgagcgtccaagagccgcttgagcgagcgaacctgcccgccgtgcgccgcatgctcggtttcgacgggtgatgagctcgcgtgcttcggcattacttccgatgaaaggagttcttgtatggaatcgacagcaacgaaaaagcgcacgctcgcccgcggcacccggcttaccggtcgcgactatgtggtgctcgccgtattcggcgtgcttctgttcgcggtgttcatggccttctcgatagtgtgctccctcagtgccaccacgtcgtggttcacccatggggtgggcgctgttccggccggcatcgtgtggacgtatgtgttggcccgtgttccaaaacgcggcgcggtggcgctcatgtgcctgctggtggcgcttctcggcttggttatgggcatgttctggacaggccctctgggcatcgccctcggcggtgtggtggccgagctcgtgttgggcgcgccgggcaagcgcaccgcctttcgccgtgtggcggcgttcgtctccttcgtcgtgtgcttctgggccgggcatgtctcgcttatctacctcacgggccaggcgtacgtggacatggttgtggcatcgggaatgacggccgagtacggccagcagctcgtggacttcatgtacggcccgctcgccctggtggcgcttgcagcagccgtggcgggtcccatcgtcggcggtcttttgggggagcgcgtgttcaagaagcatttcgcgcggatgggcgcctagtcgcatcgaggtgagccgacgcggcctcggcaggctgcgttcgaggaaaggaaggaagcatcatggcagaagcagcaacggcagctggcgtgctgcatggaaccgccagctccggtggaacgactccgccggcgggcgcccccgccgcgggggcggggagcgggcgcgcgccggcggctgacagggcgatgcccgtggcgccgcctggccccaaagaggccgtcggacgactgctcgggttcgcgggctcgcgcaagaagctcgcggtcctggggtgtgtccttgcgggcgtaaatggcgtcttcgcggtcatgcccctggtgtgcgtgtggttcgtgctgcgcgacctcgtggccgtggctcccaactggagcgctgcggaggggcttgccttctggggctggcttgcgttcacgttctcggcaacgggcctgttggtgtacttcgcggcgctcatgtgcacccacctggcggcgttccgcacggcggcgaacatgcgcaagcaggcgctcggccacttgggccgcgtgccgctcggctacttcgactcccacgcctcgggacatctgcggcgcgtggtggacggctgcgccggtcagaccgaggacatgcttgcgcacaagctgcccgacttcgtggggtcgctcgtcaccccggtggcattcgtggcggtcatgttcgcgttcgactggatcatggggcttgtgtgcctcgttcccattgccatctcggcgctcatgatgtggtggatgatggggcgtcggacgaaaaaaggtggcatgccgttcatgatgctctaccaagacgcgctcaaccgcatgaacaaggcggccgtggaatacgtgcgcggcatccccgtggtgaaggtgttccagcagacggtgcattcgttccgtgcgttctccgaggctatcatgagctaccgcgacatggcctgccagtactcgaagtcgtgccagcgccctcaggtcgttcagctcgttgccatcaacggcacgttcgccgtgctcgtgcccgctggcatcctcctggcgcataccgcgggcgatttcgcagcgtttctgacggacttcctgttctatgcggtgttctcggccatcactaccaccatgatgacgaaggtgatgtacgcgagcgaggccgtcatgatggcgcaggactccgtgcgccgcatcgacgagatactcgcgacaaagccgctagcggagccatcggcggcgcaggccgggcatccgcgcgatggctcgatctccttcgagcatgtgggtttcgcgtaccctggcgctttggaagacgcgctggtggacatgagcttggaagtgcccgccggctccacggtagcgctcgtgggaccctcgggtggaggcaagacgacggccgccagcctcgtgccccgcttctgggatgtggattcgggcagcgtgagcgtgggcggggtggacgtgcgcgacatccccgcctccgagctcatggcgcaggtggccttcgtgttccaaaacgaccgcctgttcaagacgtcgcttttggagaacatccgcgccgcgcgtccgggcgccacgcgcgcacaggtggaggccgcggcccacgccgcgcagtgcgacgacatcatggcgaagttccccgacggtttggacacgcaggtaggcgcgaagggcgtgtacctctcgggcggcgagtgccagcgtatcgcgctcgcccgcgccatcctgaaggacgcgcccatcgtggtgctcgacgaggccacggcgttcgccgacccggagaacgaggcgctcatccagcgcgccttggcgaggctctgcgagggcaagacggtgctcatgatcgcgcaccggctatccaccgtcacgggcgccgacgtcatatgcgtgttggacgggggccgggtggtcgagcgcggccggcacgacgagctggttgcggccggcggcctgtatgcgaagatgtggaacgattaccgcacgtcggtaacgtggaggattgaagggagcggcacccatgctgcgtgataagttcgcactgaccgaacagggcgcgcgcgatttcaagcgcggcgtgggggccgcagcgttggccaacgtcgtgctcatggcgcccatcggcgtgctgttcacggttacgggcgcgttcgtgtcccacttgatcgacccgtcgcaaccgttgccggagctcggagcgtatctcctggccatcgttgcggtgctcgccatcatgctgctcacgcagaatctcgagtacgacagcacctacaacgtggtgtacaacgaaagcgctcgcaagcgcatcgggctggccgagaaactgcggcagctaccgctgtcgttcttcgggcagcgcgatctgtcggatctcacgagcgcggtcatgaaggactgcgccgaccacgagcgcatgttctcccatgtcatgccgcagctgttcggtgcagccatttcgacggcggtggtggccgtttgcctgctcgcattcgactggcgtctggcgctggcggcgctgtggcctatcccggtggcagtggcggtgctgctgtccaccacgcgtcttcagcaagcggcaggacgcgcccgcaacgaggcgaacctcgagcttgccgatggcatccaggagtacctggaatgcgctcgcgagatccgcgccacgaaccaggtcccggcgtttctcgggcgcgtgggagagagggtagacgccttcgagcatgcgaagatcagggcggagctgactgctggcgtgagcgcgtcgtcggcccaggcgcttttgcggctcggcattggcaccacggtgctggcaggtgcgctgctcattgcggacgggcaggtggacttcatggtgttcttctgcttcctgctggcggttacgcgcgtgtacgatccggtgaacgtcatcctgcagaccatcatcgagttgctggacttgcgcctgaacatcgctcggctgcaggctattgaggacgagcctgtgcaggcaggtgcgatcgagttcaagccggcgggtcacgacctggccttcgaaggcgtgtcgttctcctacggcgagggcgagcgcgtgctgagcgacgtgacgttcactgcccgcgaaggcgaagtgacggcattggtgggccccagcggcggaggcaagtccaccgtggccaagctggctgctcgcttctgggatgccgatgcgggacaggtgcgcgtgggaggagtggacgtggcgggcgtggagccggaggcgctcttggcagactacgccgaggtgttccaggatgtggtgttgttcgacgatacggtgatgggcaacatccggctcggccgggccggcgcttccgacgaggaggttctcgccgccgcccgcgccgcgaactgcgatgagttcgtgctgtgcatgccgcagggctacgacacgcccatcggcgagaacggaagccgtctttcgggcggcgagcgccagcgcatctccatcgcccgcgccatcctgaaggacgcgcccatcgtgctgctggatgaggccacggcctcgttggacgttgagaacgagacgcaggtgcagacggcgctctcgcggcttctggcgggcaagaccgtgctcgtgatcgcacaccgcatgcgtaccgtggcgaacgccgacaaggtcgtggtgctgaaggagggccgtgtggcggaggaaggctcgccggaagagctcatggcacgcgaaggcggtttgtaccgccgtatggtggagctgcaaaccgaaaccgccgggtggtcgctggcgtcgtaagcggcgatatgcaccctactgtgcgtggtactcgagcgctttcatgcagaaggagtctgcgcggtggccgaagagccgccgcgcagcgttcaccgtcgagatgcgcggcgctttcgacaggctattgcgcttgctgcgagcgtcccggcagccaagagcacgatgccggcgacgacggtcggctgcacgctgtcgcctgttgcggcgagaagcttggcgctcgatgaagaaggctgggagccgggcgtcgggggcgtcggttcgggtgcaggtgcgattgcgggaacgccgctcgcagcgaggaacagcggaccggcgactgcgcccttcttgacggcaacgacgccggtggcatcgttgtaggtgtagtccgtgccgttgaccagctctcggccgtctgcgcttcccaggcgcacgctcaccgagccgggcagcgtatagccggtgtcggccgtgagcgtgagacagttgctctcctcgccgtccttctcgtacgttgcgaccggctgctcggcaccggttcccgcaagggagagcccggccaggctcgcgttcaccgggaaggtgcacgagctcaccgtccccccttcgccgatgatgatgggacgtgcgaagaagccgccctcgatgacgccccgattggtcacgtcgccaaggaacatgccgcccgagacagtgccgccttctttgttgctcacgatggatgagaacgttccgcctccgatggcgtcgtagttcgtcaccgctcctgcgaacgtgccgccggtgatggcggccgcattccagtcgggatcggggtcgccgttggtcacggggccggcgaacgtgccgccagatatggtgccgccgccgtcggtggtgtcctcgtcgttgctcgcaacggtgctggtggaggagaacgtgccgcccgcgatgatgcccctgctgaggatttcgccgttaaacgttcctccctcgatggttccgaagttgtccatctcctccgagttgaacgtgccgcccgagatggtgcaggacttgttcttgtcggtgccgaatcgtgcgttgccgttctgcacgtaggcgttgaacacgccgcggccttcgatggctccggagttgttgacgccgatgttgaactcgccgccgccgatcgtcccggagttgtccacgctgttgttgttgccgccgtcttcgaacacgccgcccgaaaccaccgcgccttcgctgttggtcacgtagtcgtcgaacgtgccgccggcaatcttcccgtggttgtgcgcggattcgtggaacgtgccgccttcgatggtgccgtagttgttgacgggcatattgaacgtgccgccctggatgacgccgcccgcttcgttgtgcacggtggaaccgtttcccttggatccgttgacgaagatgccgtctacaatgatgccgctgttccagatgcggttctcgccggaaacgtcgaacgcgtggcccgtgaacgcgaatgcgtatcccgcttcgagcacgagctcgccgtcgtcgtacgtccagccatcgcctgacgtgctcaccggcgcgccgtcgtcgccgacctcgatcgtgacgggagtgggcgttgcgcctctttcgtcggcgaacgtgacgctcggagcgagcgcgcaggcgagcgtcgtcagcagggctagggcgagcaggcgtttcctcatggggacccccttcgagagcattgaccctcgaatgctagcatggggaagggggctatcgatttccggatcgaacccggccgctttcgctgcgaaatcggccgggttcgccgtgcgccgcccgctagatggacgacgccacagcctcgtcgtccggcagggctgcggcttcttcggcgcgctcgagcttggtcggcccctggccctccccgctaccggcgaccagcgcctcgtcgccgcgctcggccaggtactgctccatggagtagtgggtgatgtcggatcggttgatcacgcccaccacctggccgtcgtcgagaaccggcaccttcttcagatggttctcgcccagcacgcggcacacctcgggaaggtcggtgtgcacgtccacgcctatgatgcccttcgcgccgatgctcagcgcctgcatgcccatgagctcgtcgagcttgcgggcgaagtccttgttgccgccgtcggcgtccacggtctgcatgatcatgaccacggggtccatcatcatggtggagcgcttcgacaggtagcgcatgatgtcgccgtcggacacgaagcccacggccttgccctcggcgttcacgagcggcgccgcggagatgtgcttgtccaccagcagcttcatggcctcggccacggtggcgttcgacggcagggtgaacacgtcgcgcttcatgatggactcgagcaccgtgcgccgtgcattgtccttgtcgagctcggcagtctcgcccggcttgttcttcacgagcgccaccaccatgacgaagccgatgaggcacagcacgcctgccagggcgaacgccacgtcgatgccgaagatgctggcctgcgtgggagtcatcacccgcgcgctcgcgttcgtggcgatggtggacgccgaaacgatgatggccgtgcccagcgagcccgccacctggcggaacgtgttgttcaccgaggtgccgtggttcaccagctcgttgtcgagcgcgttcatgccccaggtggtgatgggcatgttcaccagcgacagcgagaacaggcgcaccgtgtacagcacggtcagcgtgatcaggcccgtttcggttcccaggaacgcgaagcagaacgtggtgagcgtcagcacgcccatgcccacgagcgccagcacgcgcgggccgtgcttgtcgaacaggcggccggcgatggggcccatggcgcccatgatgatggcgccgggcagcagcacgaggcccgacacggtggccgagtagcccatgagcgactgcaggtagatgggcacgaggatgccggcggcaagcagggcgccctgcacgagcatgccgatgatggtggcgatgaggaacttgcggttggccagcacgcgcacctgcagcatgggatgctccatcttcagctggcggcggaagaagaacacgagcgccaccacgcccacgagcgtgcccgcgatggcgtcggcgcgcaggccgtacgagccgatggtggacaggccgtacaggaggccgccgaagccgaacgacgacaggacgacggacggcacgtcgaggctgacgtctttgttcgtctcgccgcccttctccagcacgaacgcgccgatgagcacgacgacggccgacagcacggtgatgatatagaacatgtcatgccaggtgtagcggtcgatgatcacgccggcgaccgtggggccgatggccgggccgaacgcgatgacgatgccgaacaggcccatggccgtgccgcgcttgtccacggggaacgtccacatgagcacggtcatcacgagcggcatgaggatgccggcgcctgcggcctgcacgaggcggccgagcagcagcacggcgaagctcggcccccagccggccagcgcgctgcccgcagtgaagatggccatggacacgaggaagagccgcttggtggtgaagcggtccgtcaagaacgccgtgatgggaatcatgatggcgttgaccagggtgaatcccgtggtcagccactgcgccgtggaagcgtcgacgctcatctcggccatgaccgacggcagcgcgggcgccaccaccgtttggttcaagacggtgacgaacgtgccgaacacgagcacggccaacatgatgatctgcttgcgcgacaaacccatatgcctgattccttccgctaagagacgtgctgccgcgaacaaaggcgccctcgagcgggctttcgcccgtcctcgagaacgccttcatgtgcggctgaggtaatttacacccagtataaatattcattcggtagatgaaaagcggcgcggtcgaaacttgtggtaccctgcatgaaaacggcacatcatcgtcaacgggaggttgcgcgcatcgtggagcacggtcgggagaacgcatcgccggaggggctgcggtaccgtaagaagctcaaggcgcggcttgcggtggagcgcgcggcgctggagctggtcatcgagcgcggctacgacggcgtgacggtggaggacatctgcgcgcgggccgagatatccaagaagacgttcttcaactacttcccctcgaaggcctcggtcatcatgggacgcatggacgcgttccccgacgacgagcgcctgctcgagatactggcggagcatgacgaggcgtgctacctcgatgtgctcgtgggggtggtgagcaccaccgtgtccgcgggcgtggacgacgagatagagagcctgcgacgcgaggcgctgcgttccatgccccagctgttcttccacggccagcgcgatcttttggccgtgcagcgctccatcgccgccgccttgcgctcctatctgtgcgagcgtcccgagcgccgcatgttggcgggcgggtcggtggaggaggaggcgctcgtggcgtcctccacggccatcggcctggcgcgcacgcgctcgatgctgcatgtctgcggcgaggcggcgcccacatcctccgagacgcgccggctgatagcgacgtacctttctgcgggggacgacacggcgggctagggcgcgctcccggctcgcagccaacggctcaacggtccgcgatactgcggcctgcgttgaaaaaacgtgcattttctcttgacagcatcccgaagcgttgtgctaaagtatgcgccacaacttaatagctgaaaccgatgaggcgaaagtcaagccatcatgagcactcacagagagcgggcgcagctgggattcccgcagtaagctggatggtaaatggttcgccgagggaaaggggaaaggaaggcatggcgcgcacggggccgagccgaccgagtatctggaccgtgagcctgcgttaagggcagaacatgtgttggcatgttcgtgagagggttctgcatcgcagagccaataaaggtggcaccgcaggttacaacacctgtcctttatctcaaaggacaggtgtttttttatgcggcgcagcgcggcggcagccgtgcgcacctttggaggcgaggcgatgcgttcctcaaccgcgaagctcgtgccggcaaacgaaacgccccgggaggggcaacgaaccggcgggaactccgccaagaaaggattgaggaacatggagcagcagatcaagcgcgaggttgctacgcagacggccgcagcgggcaaagcggcagcgccgcgcaagcgcgacgtggcggcggctcccaagaaggcggggctctccacgcaggacctcatcctcatcgccgtgctgctggcagccggcgcggtgctcaagctgacggtgggctcgctgctctcgtcgatgggcatgaagccgaacttcatcatcgccatgtactgcctggccatcatcctgacgcgcccgaagctgggccagtcgctcgtcatcggccttctggcggggctcatctgccagatccccctgctcaacgccacgccgcttcttaacatcccctccgaggtactcggcgcgctggcctgcggcttgctcgtcaaggtgcccatgagcatcggcggcaggctcgacctcaacccgctcgtcaacacgttcgtgtccacggtggtgtccggaggaaccttcgcgctgctgtccgtctacatcaacgtcgtgtccacgggcggcgacgtcatggtggcgctggccacgtacgcggccatcgtgttcggcacggccaccttcaactgcatcttggtgcaggttctggccatgccgctgaagaaggtgctcaagcgctagggattccgcgggcctgcggccgccctcgctgatttgctacgccaacctgcgattcggaagaaagactcgacatgatagagatacgcgatttcacgtttcagtaccgcgaaagcgagcggcccgcggtgagcggcatcagccttgccattccggacggtgcgttcgtcgggatcaccggcgcggccggttcgggcaagtcgacgctcacctatgcgctcaacggcatcatcccgcactgctatccgggcgacttctacggctcggtgaccgtggacgggctcgacacctgcgacgtcgcgctcaccgatgtgtcgcggctggtgggcagcgtctgccaggacgtcgacagccagttcgtcacgtcggtcgtggaggacgaggtgctctacgggctggagaacttcggcgtgccgaagggcgagatcgaagggcgcgtcgcacaggccttggacgacatgggcatcgccgatttgcgcgaccgcatgatcgcaacgctctcgggcgggcagaagcagaaggtggccatcgcgtccgtcctggcgctgaacccgcgggtgctcgtgctggacgagcccaccgccgagctcgatccggccagctcgcaagcggtgttcgacctgctggcgcgctatgcgcgcgagcacggcaccaccgtcgtggtggtggagcagaagatagctctgttgtcgcagtacgccgatatgctggttatcgtaaacgaggggcgcgtccgcttcgccgacgagcccgcgaaggtgctggagcattcggacgagctcaagcggatcggcgtcaactgcccgcgttcgaccaagctcatgaaccgcctgcgcgccgagggcctgtacggcggcgcgtccgtccgcaacgtgcgcgaagcgcgcgaggcgttgagggaggtgctcgcatgatcgagttcgacgacgtgcacgcgtcctacgaggcaacgctgcccatcctcaagggcgtcagcttcaccatccgcgacggcgagttcgtcgcgttcgtgggcacgaacggagcggggaagtccaccacgatgcgcctggtgaacggcttgctgaagcccgacgccggccaggtgctcgtcgacggcgtgcccacgaccgagctgcgcacgagcgagctggcccggcgcgtgggcttcctgttccagaatcccgaccgccagatctgctgcaacacggtgcgcgaggagctgctgttcgggttcaaggcgctcgggcaggcgggtcccgaggccgacgcgcgcgtggacgccatcatcgaggagttcggcttcgatgccgacgacgacccgttcctgctgaaccgcggcgcacgccagcttttggcgctggcttccatcgtggtgctcgcgccgccggtggtggtgctcgacgagcccacgacaggactggacttccgcgagtgcgagaaggtcatggccatcatccgccgcatccacgagcagggcgccacggtgatcatggtgtgccacgacatggaggtggtggccgactacgccacgcgctgtatcgtgatgagcggcggcacggtggtggacgacgcccccacgttcgacgtgctgcgcaaccgcgacacgctcgagtgcgcctcgcttgttccgccgcagatcgtggacctgtcgcttgaactggcgcgcgacatgccgcggctcgccgagacggccgtcgcccgcgccaacacggtggatgagatgctggccgccgtcgtcgaagaggctcgaacaacccaagacgtcgaaaggagcgtgtgcgcatgagctcgtttctcgaatacgtgcccggcaccagcctgctgcatcgcatgaaccccgtggccaagctggcggcggccgcgctgttcgccgtcgcgtgcttctgctcgagcaacctcgtgttcttggccgtgctgctggcggtcgggttcgcgctggccgcgacgtgcggcatgatgaggcccgccatcggcctcgcgaaggcggtgttcgcgttctcgctgatcctcgccgtcgtccagatcctcacgacgccgagcggagcggtgctggcagagcttccgtggggctacatcggcacgggaagcctgttggcggctctcaccacggtggtgcgcctcatggccgccgccatcccgctgttcctcgtgttctacgtcacgaagatgaacgacatcacaaacgccgtggtgaaggtgctgcacgtgccttacaagtacgcgttcacgttcacgtccacgatccatttcatccccctgttcatgaacgacatgaagggcatcatggaggcgcagaccgcgcgcggcgtggagttcgacgcgggcggcatcgtgcggaaggtgcgcctgatggtgccgctgtgcgtgccgctgctcgtgtcgtcggtccgcaagaccaacagcgccgccatcgccgcggaggtgcgcggcttcaacctgcgcggcgtggcgagcggctacaaggagtacccgtttgtgggttacgacgtggctgtgatggcggtcgcggtcgcgctggtggcttgcgccgtaacgctggggatcgtgctgtaacggctgcgatcgcgtcggccgcgtgctccctcgcgccgggggccctagggcagcggtagggcaagcgcgacggcgaacgatgcgccatgcgagaaaggggctccagagagggaagcggcggaaagagcctccgccatcctgccaagcacacggacttttcggcctgtccttatagccgcccgacgcaacggcgaaccgttggatgaaaaggggcaaactgcggagatcggcggacccaggtcggccgacaagacggcgagcccgacgggcacggggcgtcgtgccggctcgttgccgtgccctaggctgatgcagagccttcggggggatgacggttcaccgcgcgccgcgtcgccgcagcgtccagggccctatactggtcacggcggaggcaaacggcgccttcgggcgctccgacgaaggaggctgcgcaatggcaaaaggattcgagctgttcatggacgaggagccggagctggcgaaggcgtacggcggcatggtcatgcaggtggcgaagtcgagcgcgctcgaccagaagacgcaggagctggcctacctggccgtgctctccgcagtcggcatgacgggcggtctcgggttccacgtgacctcgctcaagaagctgggcgccacgcgcgaggaggtgcgcagcgcggtgctcgtgggtctgcccgccgtcggcatgactgccatcgaggcgcttggagccgcgctcgacgcctacgacgccgcggaggcgtaggcgcccgcccgccctggccgctgcctgcctccgaaatcccctctcctcatatagcctgccacgctcgcccggctggttgcacgggggcgcaacgggctgctgacagatacgcggcggcgcgccttccgcgtcgtccaggctgcgggcgcacggctagcatggacggcaatgctccccattggaaaggacgctgccatgctcaccatcggatgccatctctcggacaaggacggataccttggcatggccaaggccgccgtgtccatcggggccaacacgttccagttcttcacgcgcaacccgcgcggcggtgcgcagaaggcgctcgacccgcaggatatcgccgcgttcgaggactatgcgcccgaacacggcatcgaggtcatcctgggatatgcgccctacacggcgaacccggccagcgccgaccagcgcgagcacgatttcacgatgatggtgctggccgaagacctcgcgcgcatggccgagacgccgcaagcgatgtacacgctgcaacctggcagcgcgctcggcaagccggtggacgaagcactggcaagggttgccgcagcgctcaacgacgtgattacgccgtcgcaggagacgcccgtgctcgtgcagaccatggcgggcgagggcacgcaggtgggcagcacgttcgagcagctggcgcgtatcctcgaccaggttaagttcgacgaccacgcgggcgtgctcttcgacgcctgccgcgcgtggggcgccggctacgacctcgccggcgacctcgacggcgtggtggaggagttcgaccgcgtcatcggcctcgaccggttgcgcgccatccacctcaacgactcgaaggacgctctcggctctcacaaggaccgccatgcgcctatcggcgagggcgagatcggcttcgacgccctggcggcgctcgcgaaccatccgaaactgcgcgacgtgccgttctacctggaggcgcccgacgcgacgctcaaggagtacggcgaggccatagagaagttccagaaggcccgcgcctcggcctgagctcgccgctccatatgctactataagcgtcacgattaaaccaccggaaaggatgcggccaatgttcaccatcggatgccacctctcgagcgccaaaggctacctccacatggcgaaggacgccgtatccatcgatgccaacacattccagttcttcacgcgcaacccgcgcggcgggcgggcgaaggccatcgacccgaaggacgtggcggcgtatgcggcctacgcgcccgagcacggcatcgagcgcatcctggcgcacgcgccctacacgctgaaccccgcctccgacaagcagcagacgcgcgacttcgcgctcatggcgctggccgaggacctggggcgcatggaggagacgccgcaccagctgtacaacatgcatccgggcagcgccaccggccagacgcacgaagcggccatcgcgaagatcgccgacgcgctcaaccggtcgcttctgccgcaccagaccaccacgctgctgctcgagacgatggcggggaagggcagcgaggtgggcggcacgttcgaggagctggcggccatcatcgcgcaggttgacctggccgaccacgtgggcgtatgcctcgacacgtgccatgtgtgggatgcgggctacgacatcgcaggcgacctcgacggcgtggtggaggagttcgaccgcgtcatcgggctcgaccggttgcgcgccatccacctcaacgactcccagaacgcgcgcggctcgcgcaaggaccgtcacgcgcgcatcggcgaggggcagatcggcctcgaggcgctcgccgccgtcacgaaccatccgaagctgcgggacctgccgttctacctggaaacccccaaccccgagctctccggcttcgccgaggagatagcgcttctgcgcgccgcccgcgaggcagcgtaaggcgcggtgcttcgcggtttacgggcgcccgtccgcgctgcctgcggctacccctcgctcggctccagaacggcgccgtccagctggcggtcggactcggcccgcggcacggggcgcgagtacaggtagccctgcgcgatgatggcgtcgtccagctgctggagcatccgggcctgctcgcacgtctccacgccctccacgacgatggtcacgcgcagcttctcggcgatgcccaccacgccctcgaggatggcccggctgcgctcgccgctctcgctgctcatgaggaacgtgcggtccagcttcagcacgtctatcgtcaggtcctgcaaggtgcccagcgacgagtagccgctgccgaagtcgtcgatggatatgcggaagcccaggtccttaagctggcggcagatgcccttcgcgcgctccaggtcctccatgacgatgttctccgtcagctccagctctatgaggtcgaccggtaccgcgtactcgtcgacgatggctttcaccctctccgggaacccgtcccgctgcaggtgcaggcgcgagaagttgcatgcgatgggcacgacgggcagcccctgggccaaccgctcctccaggcgcgtgcaggcttggcgcagcacgtgcaggtcgatctcggtcacgaagccgttcttctcgaacagcgggatgaagtcgttcggctgcacgacgccgcgctcgggcgactcccagcgcacgagcgcctcaaggccgacgatgcggttcgtggccagctcgaccttcggctggtaataggccacgaactcgccctgatccagcgcggcgcgcgccagcgccaccaccgcgcgctcggccacgtcgcggtctttcatgtcggccgtgtagagcgccgccttgctcgacgacgtctcgcccacgctgtcgcgcgcgtagcgggcgcagtccatgagctcggccagggcctgcgcgtccaggcggcgcgacccgccggggcgctccacgatgcaggcgccggcatgcaggaacaggcggtgcgagtgcgatcgcagcacgtccaggctgttgaagcggcggtccagctcagcgaaccgctcgaggaacgcgtcccagccgtcccaccgcaccagcaccacgaactcgtcggcggtgatgtgcgcgtggtgctcgccatcgtgctccagctcgccgatgaggcggtcgagcgccttgagcagctggtcgcccgccgcgtagccgaacgcggcgttgaagctcttgaagcgggcgatgtccaggtaaacgatggcgtgctccccgcttcccgcgcgctcgagcacgtcctcggcccccgtgcggaagcgggcgagcgtccacccgcccgtgagcgggtcggtgaaggacagctcctcgatgtggcgtgccgtgcgcagcttcgtgcgccccaggtagagcgccccggccaaaagcaccccgaacagcgccgcgagccccgagatgatctgcagcgggtactggcgcaggaagtcgaggggcgtggtgggatgcacggccagcgagctttgcgacacccaggtggtgatcttgctctccgccgtgtactgcacgcagcggtccagcacgctcagcaggcgcgtgtcggcggtccccgccacgcctatgctcatgtcgttcgtgtagtcggtcatggtggtgacggtgagcgattcgtactgcgactccgacagcaggtagttcgccacgtgcgtgtcagcgtaggcgaagtcggcggcgcctgtcagcacggcgtccacgcactgcttcggcgtgtcgaagtacgcgatctcgtcccccacgtgctggcgctccatctcggccgccagcgcgaagccgcgcggcagcgccacgcgcgagcccgaggagcccggccccacgatgagggccatggggtcgcgcaggtacggcccagtggtggacacgatgcccgccgtggcctcgtcggcgtcgcggtccacgccggccaccaggtccaccgcgccgctctccaccatctcgaaggcgtcgctgtggcggtcgacgggcacgaattcgaacgagaggcccgtcacgcgggagatgtcctcgaacagccgcgcggcggcgccggcgaacgcgcccgtctccgggtcggtgtacgacagcggcgtgcggaacgcgtcgtaggccaccctcagcgtgggggcggacgcgaggtaggcgtactcgtcctcggtgaacacggggtcctggtcggtgttgatgccgaagtagcggttgtacagcagcgtggagaagccggggtcgcgcagctggagccggttcatggcggcggtcaggtcctgttggagctcggcgcggtcgagcgggaacgcgaagtggatgggctcgggagagaactgcgcgatggtgcggaaacgcgagttgctgcccaggtaggtgatggcgatggcgtccagcgcgccctcgtccagcgcattcaggaggtcgtcggtctccaggtactccaccatgtccacgtcgaagccgttgtcgtttgcatactgtgcgaacgcccgggcgtcctggctgttctcgatcactcccacgctcatgcccgagaacgcggtgaagtcctcgtaggcgtagcgcctatcgtccaggcgcacgttgagcgtggtgtagatgctgcacatgggctcggccgagaacagcatgcggtccgtgcgctcctgggtgtagtatacggcggggagcaggtcgatctctccgttctccagcgcctcgtaggcttcggcccatccggcgaaatccacgtactcgtacgtccagtcggcgtagcgccgcagctcttccaggtagtcgatgttgtagcccacgagctggccggcctcgtcgtaggacatgtagtcgccgtcttcgtagtagcccacgcgcacgatacgcttgccttccggcgcgtcctcgtcggcgaaggcgggaggagcgtaggccccgggcagtgcaagcagcgccgcaacgagtgcaagcagcaaaagcggcaaggacaccccgaccaggtgccggttccgcgcgtcttctcctccgtgtgctatggcttgctccgatccgcttcgacgccctcctgcgtctcgctcgtacgataccatatttacgcgggtgtggagccaaggcgaagagggcggcgcatggtccgtgcctgaatcgcagtcccttgcgctcctttgcgcagagagcaaagaaaatggccggttcgtctccgaaccggccatcaagttgatggtggagcttagggggatcgaacccctgacctcatggctgccagccatgcgctctcccagctgagctaaagccccgaaaaagtgcgaaacctagtataacggaagcgcgcacagggtcaagcatcattttcaagaatttcctcgttttcggaagacggcgagaacgagcgccttcggttgtccacgtacgcgcgcagatcgcgcacgttgtgcacgtcgagtttcgcgtagatgctgtgcaggtgcgtcttcaccgtgttgggcgcgatgaacagcgcctcggccacatcggcgcgcgattcgccctccacgatgcgccgcagcacctcgaactcgcgctgcgtgaggctgaaatcctcggcgacgatctggcaggcgcggtgggcgttcgcgccgtcgtcggggccgcccggccgcacgaagccccagccggtacgcaggttggcggcgttggacagcagaagggcggccatcacgaagcagaacgcggcggcgcacagcagggtgttccagccaaagccggccggcagcagctgcagcagggcggctcccagcaccgcccccagcgtccggccggccatgagcgaggtggtggggcaggccgccacccaggtggccggttgacggcagttctttatgaggtacgatcccagcccccacagcaccaggtcgaggtacaggaaccccgttacctgcatcaccgcgcccggtgcgcccagcggagcgcccgcgatgccggcgcacagcagccccaatcccacgagcgggaatccaatctggtacaccgagcggttgaagtcgagcttgcacaccagcatcgtggccagggtgagcactgcggccagcaggtaccctgccacgttccacgcgggcgagaactgcccgccggcgcacgcgagggctacgagcaggccggcggcgatgccctgcgccacggaggtggcgatgaaccggtagggaacgagcactttggcttcgggctcctcgtaacgcgtcctaggggagcggtacacctcttgctgtgcgcgccagaacgaggcggcgaacacgagcggcagcacgaacgccgccgcccagcgcccttgcggcatcggcaaaagggtcagcgccaggtagagcagggaggcagcgaacgcagcggatacgccgaacgtgagcgtttgggtcatgccgagggcgcccatgatgcgcgcttcctcgatgtgcgcgcctataagccccatcgccaccagcgcgattcccagtccgcggcacgctgcggccagcgccgtgttgccgattcctcccagctcgcgcagaagcagcaggaacagcccgagcaagaggcaggctgtgagcagccccaggtaccagccgcggtcgtggaacgtcagccggcggaacagtatggcgaaggccaggcacaccagggcgcaggcaaggaacagcagcgtgcaggcgggaaatgccaagccgcccacgtcgaacgtgcccggcagcaggaacgtttccatgaacagcaacacggcaagcagtttgtaagaggtcaaagcgatgaacagggaggggatggcgcgtacaccgaggaccatccttctcaagtcgctttgccggtaacgagcgcgctccataatagcctccttgagagagcgtgcagccggctttgcgcttggaacatccccatcccatacgcgacggcgtttattcaacttgccccagtatacgatgcgcccgaacgcctcaaagtttcggtttcccggcaaggcggcgacttgccctataatagttgggagaaaaggaagcgaggcgggccgccgaggagaagccgaggcggcccgctggcatgggacgtgcgcaggcgcaggcggaggcggtatggaggcagatcagggaacggcggtgccggggagtgcgcgccgaatgggcggagcgcgggcgagcgcccggccggcgccgctcggtgcggacggaaagcccctgtcgacctggcaggtgtggctcaggcggctgtgcatcgtcatgatcgtgtgggccgtgctggagctggtgttcggcgccgtgttctgggcggccggctcggtggcgggagacgtgcggctcgccggcgtggagttgcgcgacattgcggcagccgtgggggccacggcgcttgtgagcgcggtattcaacctggccatcggcctgctgggtattcgtggagccaagaacccctacaagataacgctgttcttctggataacgctggccgacgcggtgctcacggcctgggccatggccggcaacctctcgtcgggcatcgtcgacgttaccggcatcgtgagcgggctgttcatcatcgcgctggccgtgtgcacgtggcaggtgcgcggccagacgggctacttcgacgagcatccctgatccctcttgtgctccggcgccctgccggcttccggtacgcgccgacgttgcggagggtcccgtcccgacctccggacgataccggaagctcgcgtacccgccgtgcttcgcccccacgatcctccgattctcgtgcgtcgggacacctcttgccgacatgctcgccaaggccgttgtccatggaaaaggcccccgggacgatgccccgagggccttctggctttgcgatcggctcggcttctcgcctactcggcgtccttcgccttcgcgcagatctccacctgttcgatgacggggtcgagcgcgccggccacgtcgtactcctccaccttgccctcgtccacgaggcgcgcgaacgacgggtcgatgggcagcgtggcgaacgaggggatgtcgtagcgcttggccacggcctctccctggggctcgccgaagatgtggtggtccttgccgcactcgtcgcacttgaagtaggccatgttctccacgaggcccaccacgggcaccttcaggtcgtgtgccaggttcacggccttgcccacgatcatggccacgagctcctgcggcgccgacacggtcacgatgccgtcgaccggcagcgactggaacacggtcaggaacacgtcggaggttcccggaggcatgtccacgaacaggtagtcgatatcgccccagctcacctcgccccagaactgcttgataatgccggataccacggggccgcgccacgccaccgggatgtcgtccttcggcagcatgaggttcacggacaccactttgatgccgctggccgtctgcgccggcacgatgccgtcggcatcggccgtgagcgggttcgtgatgccgaacgtcttggggatggacgggccggtcacgtcggcgtccaggatgcccacgctgaagcccttcttctgcatctggctggccaagaggctggtcacgagcgacttgcccacgccgcccttgccggaaaccacgccgatgacgtgcttgatgttcgtgcgggcgttcgtcgggaacgtggacgagcccgcgtcctcgcggtcgccgcagccggcaacgccgcagctgccgcattcgtgggtgcattcttcttctgccatggctccttctttcttcgagaggccgccgcctcggtctcggcggcccgtcgtctcgtctccctcggcatgatagcatatataaggttgtgtcaagaaagattgccgttagctattactagaggtagtcctataatgggcggaaacggcagggcgcccgaggcacccggagacgaggcgcgccctgcgggcgcccgaatacgaaggcggcgcccccgcggggcgtccggagagcgaggagagcgtatgctgttcgcagacatcgacatcttggacgagaacctggacctgcgtccccactgctgggtgggcgtgaagaacgggcgcatcgcgtacctggacgggcaggcacccgccgacgccgaggccgaggcctacggcgaggcgtacgacggccgcggcaagctgctcgtgccggccttctacaacgcccatgcgcacgcgcccatgacgcttctgcgcggttacgccgagaacctgcccctgcaggcgtggctcaacgacatggtgtggccgttcgaggcgaagatgacgcccgaggacaactactgggccacgcttctggcctgcgccgagatggcccgctacggcgtggtgagcttctccgacatgtactacgccaccgacgagcgcgtgcgcgccgtggtggagagcggcctgaaggcgaacatctgcgagagcgagctgtacttcgagcccaagccgttcgcggactatgccagctgcgcggcggtcgaggaatacgtgaggaagtaccacggcgccgcggacgggcgcatcctcatcgactacaacatccacgccgagtacacgtcgaaccctcagacgtgcaaggatatcgctgccgtggtgaaggagaagggcctgcgcatgcacctgcacgcctcggagacgagaagcgagcacgaggagtgcaagcagcgccacgacggcctgacgcccatccagtacttcgcgagcatcggcgtgctggacgtgcccaccacggccgcgcactgcacgtggtgcgagccggccgacttcgatatcatggtggagaagggcgtgttcgcggccgcgaaccccgcgtcgaacatgaagctgggcagcggctacgcgcccattccggccatgctcgagcgcggcgtgagcgtttgcctgggcaccgacggcatggcctcgaacaacaaccacgacatgatgcaggacctgtacctgctggcgctgctgtacaagggctccacgggcgacccgtcggtggtcacgccgaagcaggcgctttccgccgccacgcgcgtgggcgcgctctcgcagggccgcgaggactgcgggctggtgcgcgaggacatgaaggccgatctcgccgtgctcgatgtgacgggcccctcgtgggcgccgcgcacgaaccctctggtgaacatggtgtatgccggccacggatccgacgtcgtgctcaccatgagcgacggcgcggtggtctaccgcgacggcgcctaccccggaatcgatgtggagcgcgcgaaggccgaggtggaggcccgcacgaagcgcatcatctccgaggtgtagcccctgccgccaaagcccgcccggcaccccccccgacgccgcgtgccgcacgcaaccgcgccccgcgccagcctgtacgcaaagtaccgctaggcgcggggcgcgtgttggtttattctggtatggctatcattatgaagagggaaggggaagcatgctgcgaatttccgatgcgcgcatcgacggcttcatcgccgaggacgtgccctacgtcgacctgacgtgcgcggtgctggggataggcgacgagcccggcgagatggactacttcacgcgcgaggactgcgtgctggccggcaccgaggtggtgcgccgcatcatggggaagctgggctgcgaggtggttgcggccgagccgagcggcacgcgcgtggcggccggcggcacgttcatgaccgtgcgcggcgcgtcggccgacctgcatgcggcgtggaaggtgtgcctgaacgtgttcgaccactgctcggccgtggccacgaaaacgcgtgccatggtcgatgcggcgcacggtgcgaacccgcgctgcgaggtgcttaccacgcgaaagagccaacccggcgcgaaagacctgctcaccagtgccgttatggcaggcggggcctttccgcaccggctggggctctccgagacggcgctcgtgttcgaccatcacctcacgttcttcggcggcttcgacgcgttcgtggagcagctgccggccatcaaggcgcgctgcatcgagaagaagctgttcgtggaagccgacgccgcgcgcgcccgggtgctcgcggccgcaggcgtggacggcatccagttcgacaaggtgcccgtggacgagctgggtcccctcgtggccgagctgcgcgccgtcgacccgcacgtaacgcttgtcgccgccggcggcatcaaccccggcaacgccgccgcctacgccgccaccggcgtggacggcctggccacgacggcccccttcgccgcgaagcccctggacatgagcgttcgcatgcgccgcctatagggacgacgctcccgctttcgcgcccgtcccgaggcttcgctccggcccctcgggatgggcgccccttccgaggctccgctccggcccctcgggacggtgccccttccgaggctccgctccgacccccttccctccgtccgtcccgctccggtgcggcttctgcgcgtttttccaaacagggtgtaacctcttcgccctcctggcacgtctaataagcaaccgaccttgaaaggggcgtttgcatggacgatctgatacagagagcgcgagacggagacggcgaggcgttcgccgccctgttcgagcacgagaagcagccgctgtggcgaacggcgatggcggtgctcgacaacgtggacgacgcttccgacgcactccaggagacggcggtgaaagcgtggcgcgcaatgccgcgcttcggcggccgcagcgccgtgggcacgtggttcatgtgcatcctgctgcggacgtgctatgacgttcggcggaagcgcaagcgcgagaccccgtgcgcgatgggggtcttcgacatcgacgccgacggcacggacgtgtcgtgggagccggcggcggggctcgtgtcggcggggcgcggcgtggtgcgcaaccccgatcgcgacgaggcgatggacgtgcacgacgctctcggtcgacttgcgcccgacgatcgtctcgtgctggtgctgttctatgtgaacgattaccccatacgacagatatcccagatcatgaacgtatcggaaggcgccgtgcgcacccgcctgtcgcgggcgcgggatcgattcaaggtcgtctacggcgaaggaccgagcggcgttttcaaggaagcggaggtggcacgatgagccatgagaagttcggcaacgaaagcgagctgcgccaggcggtgatatgcgagctggatcccggcccgcttccccagaaggcgcaggccaagctcgacggtgtgtatgcgtcgctcgggtccattccccaggatcgtccgacggcggagagcgcagccgcctcggagcgtccccggccgacgcgccggagcgacgcggaggctgcggcgcacggcaagccgacgggcgggcgcgtcgtgaggcgcggcgtgctgatggtcgcggcggcggtgaccgtggcgctgctcggcggcgccgctttcgcggcgaccacgttcttgcagatgcagccgggcgacgcgccgttcttcgacagcggcaagaacctgccgatctacgggagcctgcaagagggcgtgtccagcttgagcgccgacgtggggcagacggtggaggtcgacggcgtgaaggtgacgctcgattccgtgtcgtccgaccgaaacatcgtcaacctgttcttcacgctggagaaggagggcggcttcgacctgaccgagcaggcgagttacaagggctcgcaggagagcgagtgggatcgcctgcaaaggctgtcgccgcgcttcacctgcgcgctttcgagtaatggcgagtcgatcggcagcgattccgtctacctgttggatgcctaccaggaggacggcaaggtgaaggtcatgcagcgcatcgtgccggaggcgacgctacccgaccaggtggacgtcgagctggaaggatgggcgacttggaagccctacgaggagggcgacgcgcccttcaccttcgacttcggcctcgacctcggcacggtggcccagccgcgcgagctgggctcacaggatctcacgttcgccacgagcgagggcgagaagaccatgggtatcgagcgcttcacggcctccgagctgggatgcgtgatggtggtgcgcaacgatgagatcgaaacaatcgaggaaagcggccgtcccatctataacgtggctgaaggctccatcacgccgtccatgctgaaaatcgccgacgacctaggcaacgtgctgaccccggtgggcgcgggcgacggaacggggatcgatccggccggcgcgtatgtggtggagctggcgggcttgtcacccgatgcgaccagcgtcacgttcacgccgatgatgcacgcggccgattgggggtcgatgacggacgatcagcgtgcggcgatcaacgagcagaacgagcgtacggtggacgtctcgcagatcgggaccaagctggagacgagcgaatacggcggttacgagctgacgggctgggatgtggcggacggcacggtgagtatctctctcaagccttatggatggcaggcatcgctcggcggcgcggcaggcatgcggcccacgcagcagccgacgccgctgtgcgaagaatggtacgacgaggagaccggggagaggtactggggctaccacacggcggtcgggtaccagaaacacgattaccagactggcgagctgctgctgatcacctcctactacgcggccagcgacgaggagctgcgcggattgacggagtacgagtaccaagcatcgttcggcgggtatcgcgaggaatctgacgcgtcgcagacgctttccttctagcagcaacgcatgaagagcgggcccctcggcgaggggtccgctgcggttgcgcgcgttcgcttcggctatttgccgagcactttcttgatgcccttggcggccacgacggcgccgccgccgatggccagaaggccggggccgggcaggatgagcatcggcacgcccacgagcatgatcgcgccgccgacggccgtctgcacggcgcccccgatgcggctgggcttcttcttcccggaggcagggcctccgtcgatgatggtagcgttgacagaggcggcctgcgcggcgttcttcccgtacgacggcgcgcggaacgcgtcgccgcctgcaggccgtccgctccgcgcggcttcgcttgcgctggcgacggggctgacatcgatgatggggctgtggtcgctcatggtctcctcgctaacggtgggtggcggctcgaagccgcgtgttgcttgcgattatacgggcagcacggagccatgcgcctggggcggggtgctggcgacaggttcgtcaccgttcggtaacgtgttgttcgcgggttctccaaagacaagcgccgcgtttcgaattcgcgccgacgctcgcgacgctgctgcaaagtcgccgatttcggcagattgacgggcgaaagacgcgacgaacggcatagcgtccctcgctggccgttgtccgaccaggtgttttgctttacctgcacaaggctctggctgcaaagggggcccgcacggcgaagaggccgccgaaatcggcgattttgcagcagccgaacgaagttttgcggctcgttgcgggggatacggccaccctcagtcgaatccgacgggcagcccgagctctctcctaagcctgagcttgcgcgcgtgatggtcggggaagctcatctgcaatcgtttgcccaggcgcttgcggatggatgcggctatggtgtcggtcgccagcatgctgtcgagctcgtcgttggtgacgcctatgacgatccatcccatcgccaccagagcgttagcccttctcgaatcccgaaggcggctaacctctccttcgtggtgctctctgctctggtactcgacgtcgagtttggcttcaggccagcataggtcacagcggaagcttctccttccggagatcgcgcgcgccgcgctgttcgcgctcacctcgtagttcatcagggggatgccgagtccgtatcctccgcgtgacaggggcagcccgaggatgagcgcgagcttcgattcgcgcgcggaggccgatccgtcggcaaggtagggtaggatgcgctggactttgcgtgctccgcccatcgaggggttcttcgttacgtaggtgcgtagggcccgcgtgcttgtcagcggttcgacctggtaggcggatcgagcgccggtccgtttggtttggtaagagccgcacatctcccatcctagctcgagcagcgccgtttcactcgcttgtcgcgccaggtgaacgaaactggttgcgggcgcggtgagggtcgtctcgcgatccaagcgcaggagcgatccgctcggcaggggattgccgtgcacatgcggcttgcaagtcggcgatgctcggcagttcgggttgccgacgagaacatgggcgggtttctcgaaccgcagatcggcatgcatcgcttccagcagttcgagctttcgctgcagctccccagctctcggggcgtgatcgggcagcgtgcgagccgcgcccttctcgggcgccagcatgcccggtcgagcggctcgcaggatttgcagggcggtgaggtgcccgaagcagatgcgcgccggtttcgcgcgctcccgcctgtcataggggcggagaccggttttcgggatggggtcgcatgcggccatgcaagcctcctagctcgtcgcgggctcgaaggatcttgcagacgtggggaagcgagcacatcgtttccgcagcgggctcgtcaacgtgggaagagcgcctgcctcgactctggttggatgattctagcacgtgcaagccgtctgcggcacgacgcttcttgctgcaaaatcaccgatttcggcggccgtcgcgcatggcgggtcgaggctcggcttctccattgacgactggcgatgaaaacgcctgttcagaggaatgctctgaaggcaatacggggctgcttccggaaagacggctttatgggcgccgaaatcgacgattttgcagcattcggtcgggcggtgactgttatacgggatgatgcggcctgcccgcggctgcgctccggcgcgccccgggcgcggctcggcctcggcagcgggcgggccgcgcacttcaggggtgcggtcgaattccggcgttgtggacgccgaaagcggccatttgcgatacactatgggtcaaggtttcatgttcgcgtttgaagttcgtaggttaggctcgactgtggttcgcgccttgacgaagacggcaacggcgtgggccactcaacaggaaagttggtggtcaacatggcagctcctgctaccgaacacgtacggaacattgtgctggtgggccaagacggcgccggcaagacatcgctcgccgaggcgatgctgcacgtctcgggccgcacgccccgcatgggcacgacccacgacgggaagtcctacctcgactacgacgaggaggaaatccggcgcaagttcaccatcggcacgtccatcgcccccatcccctacaaggactacaagatcaacctgctggacacctccggccaccccgacttcatcggcgacacgctggccaccatgcaggcggccgagatggcgcttttcgtggtcgacgccgtggcgggcccgcaggtcatgaccaccaagctgtggcgcgaggccgaggacatgcgcctgtcgcgcgccgtgttcatcaaccacatcgaccgcgagaacgctgacttcgacaccgccatggcgctcctgcacgcgcgcttcggctcgcgtctggggcccgtaaccatccccatcggcgtggacgcggacttcaagggcgtcatcgacatcatccgcatgaaggcgcgctacttcgatcccggcagcgacgccgagcgcatcgaggacatcccggccgactacctggagacggcccaggccgcgcgcgacaagctctgcgacctcgtggccgaggccgacgacgagctcatgatgaagtacctggacggcgaggagcagctcacgcagcaggagttggagcagctgctggacaaggccatcgcgcaggagctgttcattcccgtgttcgtgggctccacgatcatcgagcagggcatccagggcgtcatggaggacatcgccacctacttcccgcacccgcgccaccacggccgcttccgcctggccaacggcgaggagacgctcgtggacgagacgggcgagccggcgggcttcgtgttcaagaccgtgtccgacccgttcgtggggcgcttgagcttcatgaaggtcatatccggcgtgctggagccgggcatggagctggtgaacgcccgtacgggcaagaaggaccgcctgggccacttgtacgtcatgatgggcaaggagaccaacgacgtgaagagcgcgaaggccggcgacatcatcgtcgtccccaagctcaccgagacgcgcacgggcgacacgctgtcgaagtcgggcaccgtggccatcgacccgctgcccttgcccgagccgcagtaccccgtggccatcgaggccgtgaacaagaaggacgaggacaagctgggcacgttcctggcccgcgcggtggagaccgaccccaccatccgcgtcagccgcagcgaggagacgcaccagaccgtggtcaccgccatgggcgacgcccaggttgacacgctgctcgcacgcctgaaggaacagaccggcgtcgaggcgaggctcgtggacgtgcgcatcccgtaccgcgagaccatccgcaagaaggccgaggcgcagggacgccacaagaagcagacgggcggctcgggccagttcggcgactgctggctgcgcctggagccgaaccccggcggcggctacgagttcctggacgagatcgtgggcggcaagatcccgcgcggcttcatcccggcagtggacaagggcgtgcaggacgccatggccgagggcttcctggcgggctatcccatggtggacgtgaagtgcgccgtgtacgacggctcgtaccactcggtcgactccaacgagatggcgttcaagacggccgcgcgcatcggcttccgcgccgcgtgcgagaaggccgaccccatcctgctggagcccatggccaacctgaacgtgacggtgggcgaggagtacgccggcgccgtgatgggcgacatctccacgcgccgcggccgcatcgtgggcaccgactccaacgacgcgggcgagacggtcatcatgatgcgcgtgccctacgccgaggtggtcacgtacacgaaggacctgcgctccctcacgcgcggctccggctcgtacaccctggagctcgagggctacgaccccgctccggccgacgtgacgaagaagctcgtggaggcctaccaagccgcccgagctgccggcaactagcttttccggcccggtatctggcatgcaaaaggcgccgccccgagtgggtggcgcctttttaacgtgtgacggggggcggcggatggcgtctcgttctcgcacgcttgcggcaaacgagagctatcgggggagcgaggcgtttcccccgaccctctgcctccctccgcctcctcctacactcccggatgcgctgccagccattcctcgctcggaggggtgtttcggcggcatacctggtacccatgctcgggatgcgcgctcgtgcccttgccgcaggggtaggcgcacacgaggccgctgtagttgcagcgcaggggctcggggcgcacgagcgccgtcaggtcctcgccgcaattcttgcacaagagcgccgctccggccgtcacttccgtgcggtcgaagatggtgcacgtgccgcaagagggacacttccccgacttcttgggcgcgggctggcatttcccgcacagcgggttgcatatccagcagcctcccggcatagtggccttcctttctgtcgttgggctataatataatccaatcgattacgttatgctctatactagggttatgaccggttcgggcgaagacgagcgcgccgaagcgggggagagatcgtgcaggtggcgcgcacggaaattacctggaatcgcgcatatgcaactatcaacctagcacggggcctggtgggctttgtacctatcgcagtatgaaaatgagcggctctggtaccgtgggctataggcccttccgagtaaaacgagtaaggtttgagaaggacgagtgaagcgctgctcgtttcttttcatcagggggaaaggggcgtgccggatgacgcaatcaatgccggaacgatcagaggataagacttcccatgtgaagacgttgacgatgatcggattcaaggttctcttgagctggcattatctggtactgttctctcccatatttatcggtgcgaccaacaacccgtctttttccttctttctcgagcgccagttcacgctgtatctgacgcttgccttgtccttcggggcgcttgtcggcgtaggccgcttcttcctgaaccgcaacaagacggctccgtccacgctgctgctgggcgcggcgggcgtgcttgccacggtcgcctcggcgctttcgctggttacgctctcggccgacatgccgtggcgcatcgcctcggtggtgctgctgggcttttccgaggcgttcctcatgttcctgtggcttcactattatatggaggcggcggcagggcatctgttccgctcgttcgcggtcgatatgatggccggcggcatcctcgcgttcctcacgtgcagcttcgtgccgccgctcagctaccttgtgacgctgtgcatgccggcggtggccaccgtgtcgctcattgcgaactggcgcaccatcgagccggtcgacgtggccgctcggactccggccgtcgtgccgccccgcaagagcgtcctgcgccattcgctgaaaacgctgctgcccaccacggtgtacgcgttcgtgttcggcctgctgcagggcgggttcatcaacagcggcgtcgcgctgctcatggcgggcaacgccgtggtgctcgtgggcatcgtggtggcgggcatcgtcatcttcttcatacccgaggcgcccgagacgaacgccgatatcgacacgatacaccgcttttcgctgctcttcttcgtcctcggcatcgtgggactttccttcttgggcggggggggggggggtgctcctcgcatcagaaacggttatcctggcaggattcaacctgttcgacttcggcggcctgatactcggcgtcgggctggcgcggcggcttaagcccggatcgctgctgctggtcgacggcggccgcgtgctcgtctacatgagcttggccgtgggcctcgtggtgggcaagaccgtggtcacgggcctcggcgtggccgacccctcgctcgtgctctactcgctgtgcggggccgccatcaccatgctcgtggcaacggtgctcacgccgttccgcgagcaggagcccttcgaggcgcagcttgcccgcatgacgtccgaccccggcgccgctgcccccgaaggtgctgcggccgcaaagaaagccgacgtcgcatccacctcggccgtcggcgcgcccgcgccctccggcgccggggccggcacctccaagaaagccgcagccgagccggcgcccgacgctccggcttccgcctcgcgcgacgaggacgcgccgtccaagcccgcgctgtcgtcgaaaccctccggcgagcccaagcgtgccgacacgccttggcggcgcacgtgccgcggcatcgccgagctctacaagctctccccgcgcgagacggagatattcttcctcatagccaagggtcgcaacgccgagtacgtccagcagaagctggtcatctccatgcacacggccaagacccacatagcgaacatctaccacaaactcggggtgcattcgtcgcaggagatgctaagccttatagagacgttccgagaggaagacatcaaatcgcaagagcaggactgacaagcccatctcggcgcgccgcggcgcgccgttttgctgtccatctggggcgatgcgccccgccaaccgtaaggagtaccctatgcaagaaaccgcaccccagctcgacttgagcgcgtttgcgctctcttcgcacgacagcgtgcatatcgtcatgccgccgcagcctgtcgcgaccgacgacgacatcgacgcgcagctgttcgtgtacgtggcctcggccacgaaccattcgcccatccgctccatcggcgatttgaccgacgaatgggtgaagggccagttcgacggcatcagcaccatggccgagctgcgcgcgggcataaagcaggacctcgagcgccagggcatggtggcctggaacaacacgaagttccagaagtgctctgacgccctcgtgacgcgcctggagggcgagcttcccgcagatgtcgtcgccgcgaacatcgaggcttcgcacgcgcagtacgagcagcgcctcaagtcgttcggctccacgaaggagcgctatctgcgcgaggagcacctcacgcccgagcagttcgaggagaagctgcgcgacgacgtggtgttccagctgaagctcaacgcggcgctcgacaagatgatcgaggccacgggaaccgaagtcgcgccctccgagctcaccgagtacctgtccacggacgatcccgatgcgttcctcgcggagatcgaggcgaacggccgcatggcggacgcccagcgtgccgccgcccgcgtcaaggtcatgcgcagcgtggtggacgcggccgtcgtcgagacggaaggcgacgcctccgccgcctagccccggcttctatgcgccatccggcgctgcggctcgtgcccccggcaccggctgcttcggaagggcccgcgtcgcgggcccttttgcttgctcgggggctcataccccgtatcgtcccctttgcatgaccgatttacgtttccccaggtaaaagcctcgatacgtgcgtagtagtgagtatgactgccagtactagatcgccctttttcatacccgcgaaggtagtttcgccgatttgccgcgtggtagcttatgcgctgtgaatgcaccccaatgtatttgcgaacagaccttgtccaccgagattcaatgaggaagaggaggaaccacgatatgtgcttcagaccgccgtcgttcgacgaaatgatgaagaagtgcccgtcttgcggctctttcaacccgcccgagaacgacaagtgcaagaagtgcggcaccgagcttcccgctgcggatgctgccggcacgggcgcgaacgcccctgccccgagcgctcccggcgcccccaaggctcccggcgctgcgccgagcgcccccaaggcccctggcgcgccgaagccgcctactgcgtaagcaggagcgggtcgatccttccggcagcggcttgagagaggccgcatgcacgtcggcacgagggtcattgcaagtctttaagaaaccccgatcctccgcgcggaagaggagaccgagcggacacggggaaggcgggaagcgaggtttgaggaggccgcgcgacccgagataagcgtgcttcggggtttctgaagaataagagttcatcttatcggtatctcttttatgaaaggggggcttttcatgatcaacgaatacaaccatgatctgtacaaaacagactggcgttggtacgaggatggttatgaagtgacccgcacctcggtctggaccggacctgggtgtcacaacggctgcggcgtgctcacgtacgtcaaagacggcaagctcgagaagatcgagggcgaccccaacttcgggtacaaccagggacgtctgtgcctgcgctgcctgaacatggtcgagaacatctacaacaacgaccgcctcaagtggcctctcctccgcgacggcgaaaagggcgagaacaagtggaagcgcatcacgtgggaagaggccttcgactggctcgaggacacctacaagacgatctgcaagaccattcatgacgagtacaacggcatcgggcccgagggcatcgtcgccctgtccggcaccggccgtaacgccatgtggcatggcgccatgtgcctccgcgccgtcttcggcagcccgaacatgtcgttcggcttcctctctgccgactcctgctaccagccccgcatgaccgccaacctcatgaaggacggcgactgctggatcctggacgcctcccagctgcacccggatcgctacgacaacccggagtggaagcagcccgaggtcgttatcgtgtggggcaacgagcctctcgcgtccaaccccgacggcttcgtcggccactggctgatcgacctcatgcgcatgggcacgaagttcatcgtcatggacccggccctcacgtggctggcctccaaggctgacatctggatccaggttcgtcccggcaccgactgcgcgctcgccatgggcatgctgcgcgtcatcgtcgacgaggacctgtacgatcacgacttcgtggacaactggtgctacggcttcgacgagctcgtcgagcgcctgcaggactacccgaccgacaaggtcgcggagatctgctggatccccgagcagcagatctacgacgctgcccgcatgttcgctgctgccaagcccggcgccatccagtggggcctcgccatcgacatgcagatcgctgccatggaggcttcgttcgccatctccgacatcacggcgctgtgcggcaacctcgacgtccccggcggcaacgtgctcgtgcgctacgcctacaacagctccaagaagtacggctgcggcctcgagttcatctcccaggagatgcttgaccgccgtatcggcaccgaccagtccccgatccacaaggccggttacacgccgttcatcccgcctgacctcctgctcgaggccatggagacgggcgtgccgtatccgcctcagatgatgtgggtccatggcacgaacccgatcgccaacatgggcggcgacgccccgcgcatctaccgcgcgtggcagaacgtgccctacacggtcgtcgtcgactactacctgaccccgaccgccgtcgccttcgccgacctggtgctccccgtggccatgtccgtcgagcgcgactccttccgctcctggtggcagccgctgcgcacgatgaccgccgcagccggccgttactacgagtgcatgatggacgaagagctggtgttctatctgggcaagcgcttcaacccggacttcttcaaccagttcgagaccgtgcgcgacttcctcacgtggatgatccaggacgacggcaacggcgttccctacacgttcgaggacctcacgcacacggtgtacgactactgggattggaacgagacgtaccacaagtacgagaagggcctgctccgcgaggacggtcagcccggcttcgttacggctaccggtatgtacgagatctcctctccgctgttcgacgtgtggggcttcgatcctctgccgcaccacatggagccgttcgagagcccgtaccgtacgcccgagctgtacaaggagtacccgtacatctacacgtccggccatcgtcacatcggcctgttccactccgagcatcgccagctgccgaccatgcgcgaagtgcaccccacggctatcgccgacatctcgcccgagatcgccgaggagatcggcgtcaaggaaggcgactgggtgtggttcgagaaccgtcgcggcaagtgcaagcagcaggcgcacatcgctccgggcctcatgccgaacctcgtccgtgcccgccacggctggtggttccccgagcaggaggctgcagagccgaacctgtacggcgtgttcgactgcaacggcaacaacctgaccacgatgggcgtgtacggcccgacgcactacggcgccccgtacaagagcacgctctgcaagtgctacaaggtgacgcctgaaaatgattgctcgcctagcgagattgtgaccaagggaggtggcttcggtggctatgactacacccggttcgaaggcgactaacggtctgctgatcgactacgaattctgcaccaactgccatacgtgcgaagttgcttgcaagaaagtgcatgatcttccgatcggccagtacggcatcaagacgctcgagtacggccccgtgaagaacatcaacggcaagtgggagtggacctatcttcccctgcccacggatctgtgcgacctctgcgccgaccgtgtggccgagggcaggcttccgagctgcgtgcatcactgccaggctggcatcatgtactacggcacgctcgaggagctgtccgctaagttggctgagaagcccaatcaggtgcttttcgcaaagtaatgttggaacgaaggaggtagagctatggctcgtcaggagaaaggcggattccgtccgcctccgctggggaaaattctgtggaagtgcaccgagtgcggtacctttaacgcggccgatgccacggcgtgcaagaagtgcggcgccgagaaggagaaggttgccgacaagtccatcgagagcgctacgttcaagcctatcgatgactccgagcgcctgaaccaggacaagaaggccgtcgagaagattctcggcgaggagtagttagttccaacggcgaggggatctctttcttgagattggggtcccctcgttctttccatggccgccaggcagggtcgaaacgttttcatggggaaatgctgaaagagcaaaagaagacgaagcctcgatccgagtcaaccatccaaggctagcgcatgaaagcaggaacgccttcttttgcgcgggatccgcactgtccgacggccgcctatcagattctccggcttaaaacagctcataagggccggggaacgttccaaggagcggattatgagtgcagctgcaaagtcgccagggaagttcaccatttcccaggcgatcgactccctcggagtcagcaagtttaccatttccattttcttcctcgttggcatagcgatgatgttcgatggttacgactacatgatcatctcctataccaacacccagatcatgcaggagttcttcggtcctgcaggcaacgacgccctcaagggcgccctgtcgtcctggtcgacgatcggcatcgtggtgggctcgttcgcagccggcccgctgtccgacaagttcggccgccgcaagatcctcaccatcggcacgttcatgtacggcctgctcaccatcccgtgcatcttcgccccgaactacgaggtcttcgcggtcttccgcgtgctcgccggcctgttcctgggcgtgtgcacgcctatcgtcaccacgctgttcacggagttcacccccacgaagcagcgttcgttcttcatcacgttcggcatggcgtggatgatcgtcggttgggttatggccgccctcgtgggcacggtcatggtccaggttgccacgtggcactggtgctacgccatcggcgcgctgccggtgatctacgcgttcatcttcggcaagttcaccccggaatcggcccactggtgcgccgtgcacggcaagcttgacggcgcggtgaagacgctcgagcgcatcgagaagcgcgcgggcaaggagatcccctacgagctcaagcccgagaaccttctcgtgccgccggtttccgccaagtcgagcccggccgaggtgtggaagggcaagtacctgaagaccaccatcgcgctggttatcatctacttcgccggcaacttcagcatctacggcgtgaacgcctggctgccggccctgatgctcgaggccacgggcggcgccgttaccgcgtcgtacatgctggccatggcgcagaacgccgcgtccgtcgtggcgaactgcaccaccggcttcgtctccgaggccatgggccgcaagcgcaacctcatcttcggctacggcctgtcggtggttgcctgccttatcgtctcccaggtggtcaagctgcccgccgagacgagcttctggccgtacctgatcgcgttcgtgttcatgggcttcgccctgaactacgccatcaccgctgcccagccgatgatgtccgagtcctatcccaccgagttccgcaactccggtgttgcgacgatcgtcgcgctcggcaaatccgccggcatcctgtcgcccatcatcctgggcggcctgaaggctgcgggttgggcgttctctccgctgatcgccctgctggccgcccccatggcgttcggcttcttggctggcttcctgcttcccaagggcgccaagggcatgaacatcgacgacatcgccgatgaggctgccgacgcaaaggcgtaagcactgctttaccgccccatcctgaaaagatgcgagcggattgacgttcgaccggccgacggggttcctggaaaggggcctcgtcggtcgggtttgccagggcggttcgcgggtcgccgcatctcatagagcgttgctggtcgcgcgcaggatgccgacgattgcggcgaaccgccttggcaaacccgaccgatgtaccgggtgccgaggggctgaatcgatacaagggggttcgcgatgagtgctatcatctgtccgttctgcggcaaggaatcggcttccgaggaccattgcacgaagtgtcgcacgcgcttcaccaaggagatccgcgctgccgctttcacggtggacaacgacccgcgcagcgaccgcataggccccgtatccacgaagaccgccaaggtgatctgctggatcgtgctgggactgcttctggcggctttcgtgctggccaccgagctcaccggcaacggcgttaccggccactgagggtgcggcggggctaggtcgtctcggcagccgggcaggcgccccgcgttgcgtttgatcggagaggcgccctggccaaccttccgcgctttcaaaaccaggcggcggagcattcgggggagtattgcctccgcattgtcatgtgttcgcctgctctctcgaggccttgcgtgagaggtgggagctcgggggatccgcaccggggccgtatccaaaagctcttcttagccgtatctcacgggttgaaggggctgtatcaaaagtcccagaatgcgatcccggctggcagcaagggcagagcccttgccctacgctcgtcccgggagagacgacgaggcgaaacttttgatacagcccctttacttcaacctgggggacgttccccgctggcagcaagggccctgcccttgctgccagcgggacggctccaaggcggggctcgagctcaaggctttcgaatcgccgccatgcgcgcgcttcgccggctttatccccgctttgcctgctcgtagtccttgatgtcctgcttcgtgatgcccacgctcgcttggatgcccctgatctcgttgccggagcgggtgaagtccacgctcgaggtgccgcccaagatggccaggccgatgccggccatcatcattgcggctcccacggccatgttgcctacttccaggatgccgctcgtctccaagcccagcttcaccgtgacgagcacgacgatggctgcgagggcggcggcgcacttgatgaggtccttgcgacggttcgccttgagacgttcgatgtcctggtacgccttcgccttgcgctggctcatgtttctgcccataacgtgtcctttcccctgattaggatcgcgtgatccccgtcggggcggcctctggcgccagaggccgccccgacggggaatcggcaagcctgcggaggcagcaagcccgccgattcccgcatgggcgctcgcttacgaggcggcggcagccgtctcgggcgcctcgacgtcggcggagctgccggaggccttcgccttgcgaccctccagcatcttcatgtcgctgttccacttcttggagaacggcagcacgtcggctgcggctacgagggacagcacgcccatgaccatgaacacggccaggcggttgtcgccgcccacggcgccctgcaccacgatgttcaggatggagccgaacacgatggcgaagttcgccagcgacaggttgagcgggtacttcttggcgccgtagcgctggcgggcgaacgccgaggccaccacgggcacgccgccgtagcagaagccgcagcaaaacgcgccgaccacgtagagcgccgagatgccggtggtgagcgcgccgatgatgcaggcgcaggcggccacggcgatgaggccgtccaccagcatggtgatcttcacgttcgtcttgtcgtagatgaggccgatgaccacgcgcgccaggccgttgcaggtggacaccaggcccacgagcagcgtggcgaagccggcgtcgaggcccacgagctgggcatcggaggcgcagttgccgatggtggccaggccgatggcgatgacgatgatggcccagacccagtacacgtagaacgtggaggacttgagcggcgtgtcctgctcgcccgggtcgtagccggacgcggtcgccttctcgggggccatgagggccacgatgttggccggcgggcggcgcagcgtgcaggccagcacgaccaccacgagcgcggtgatcacgccgatggcggcgaacacggtgcccaggccgagcgtcggcgccaggttcaccgacagggtgcccaggatgagcgagcccaggccgaagcccatcatgagcacgcccgacgagaagcccaccttgtcggggaaccacacgttggtggtggcgatgacggagttgtagcccacgcccacgcccaggccgcccagcacgccgtagcacaggtacaccacggtgatgctgccgttgccgaacaggcccgtgccggcgaagccgcagaagaacagcgctgcggccacgaacagcgtgttgcgcacgccgatcttggcctcgatctgcgatccgatgacggcgccgacgcagaacgtgatcatcatgatgttgaacgtgagccccacggcggccttctcgaggccgaacgtggtgcagatgggggcggcgaacatggagaatgcgtagatcagccccaggaacagcaaggtgagcgtggacaaggccaggtagagcatgcgcttgctcttgatctggccgacggtaaggtcaggcatggatcccctctctttcaatggttacacgcgcgcacggacagcgcgggcatgccgtgcgacatcatccattgtgccgtgcgcgcgcgggctcgcgtatagtcgtccgtactagatgccctcgttttcatactcctcacggtaggggcgttcctcatgccggtggtaggttgcatcgcgagcgaaacggtctgcgcgcgtttgcgcgcagcttccgcgcggaggcgtcggcacctccgccgggaaacgtcagggaggcgatgagcgtggccgacatacgcacgaaccgctacgctatcctcgtttgcggcatcctgaccatgctcatgttcggcacgatctacgcctggtccatcttcattccgccgctcgaggccgagttcgcctggacgcgcagccagacgtcgctcgtgttctccgtcgccatgatcgggctgtcgttcggcatgctgtccatcgggccgctctcgaaggtgctctcgctgcgcgcgtgcttcgtcgcctccacgtcgctgatcgtgctgggcttgttctcgtgccagttcatcaccgagctctggcagctctacgtgttctacggcgtgtgctgcgggctgggttcgggcatgagctacacggtgtggaccacgaacacgctcgcgtggttcggcgacaaggtggggttcgcctcgggcgtgctggtcatgggcttcggcatgggcgcgcttgtgctgggctcgctggcctcggcgctcatctactcgtcgctgggctggcgcctggcgttcgtggtcattgctgccctggcgctggtggaggcgctcgtggccatcaacttcatccaggagccgccgccgcgcatcgcggcgctcaagccgaagcgcgacgcggtgggcgtgagcctgcccggctccaagacggtgcgcgagccgtcgttctggcttttctgcatctggcgcagcgtggtcatgggggcgggcggcgccgtgatcgccgaggcgtccgtcatgatgacgggcatcgggtcgtccatcgcgttcgccacggcggccgtgggggcgctcgggctgggcaacgggttcgggcggccgctgggcggcatcctgtacgaccgtatcgggcagaaccgcacgctggtggtgctgccggcgctggcgctggccgtgtcggtgggcatggcggcggcctactggttcgaggcgccgtggctgttcgcgccgttcctgctcgtcgaggggctgctgtacggcatgtacgcggccatcaacacgtcgtacatgcgcacgacgttcgggcagcgcgacctggccatgaacaccggcatcagcgccgtggtgctggcgccgttcaacctggtgttcccgctggttgccgcggcgctgttcgagtggaccggcggctacgaggcgttcttcgtcatcgtgcccgccttcgcgctgctgtcgctggcgtgcggcgcgctgtgcaagccggcgaacgcgcggctgcaggcgaggtacggggctgcgggggagacggcgggtacggggattgcaggggagctgcaggatgccgcagggcagacgacggggaggagcgccgatggcgtggggcaaagggcagatcgtgaagcaggcgttgcgcaccgcgcctgaggactacgccgcgttcgaggccgtgaacctggctgggcgagacggcgtgcgcgtgctggacgtggggtgcttcgatggcttcaacacctacctcaagttcgcgccctacgcaggcgtggcgcgtgtcgtgggcgtggacccgctgcccgaggccgtggccgaggcggcggcgcgcacggccggcgacgcgcggttctcgttcgcatgctcgacattcgaggactacgagcccgaggcgggcgagcgcttcgacctggtgtacttttcccacgtgctgcagcacctgcccgacccgcaggccgcgctcaccaaggcgtgccggctgctcgtgcccggcggcttcgtggtggtgaagaccacggacgacgccgcgaagctgtcctaccccgacccggagcaggttatgcgccggctgttcgacctttacgagcggcacgtgctgccgaacaccccgcacaccgcctgcacggaccgttgcaacggggagaagtgctacacgcttatgaggcgcgcgggcctgggcaacgtggcggtgcgccagttcgcggccgacacgtgcggcaagacgctcgaggagcgccatgccctgttcgagcgctgcgtgtacttccgccgcaacgttcccgcgtgcgtcgacgagggaactgccgccgagatccacgccctcgtggaggcgtggggcacgctgttcgaccaggacgactactacttcgtcacccagtcgttcgtggccatagggcagaagccgcaggaaggcgcctcgccatggaagtacgccggccccgttttcgagtcggcgcccgaggcgttccgcaagccgcaagaggtccaaacggaagcgcgtccgcgcggcggcgcaccgcttgctcccgcggacgcccccgccgttgccatccgcccgctcgccgagcgggacctcggcgccgtcatggccatcgaggtagcctcgttccgcgatccgtggacgccgctcgcgttcgcgctcgacctgcgccacaacccgtgcgcgcactacacggcggctttcaccgagggcgggctggcgggatacctgggatggtggggcgcccccgacggcgccgccatcgtgcgcgtggccgtggatcccgcgcggcgcaaggcgggcgtcgggcgtgccctcgtggagcaggcggtgcgggacgcccgtgccggcggtcacggcgtcctcacgctggaagtgcgcgcgggcaatgcccaagcgcgcggtttctacacgcgcttgggcttccaggaggcggcggtgcggacggcctactacgaggatcctcccgacgatgcggtgatcatggcgctcccgctggggtgagcgccgagcgcgcgtttatcggccggcctcttcggtgatggtgtccgacatgcccacggcccatagcatgtacgcgttcatgatgcgcggcgacttgtcggccagggtctccgagtcggcgccgctggctgcctcgcttgcgctgcgcaggtgctgcggtcggtagggcggccgcggggcgtagtgcgcgcgcttcgccacgagcagggcggggaacgtcacgccggcgttgttgtacatggtggcggcgttgttgtacaggcgctcgcacgtgggcaggaggcgatcggccccctgcagctgctcgatcgcctcgtgggcgcagtcgagcgcgacgacgcgccgcatgtcagctgcggcggagaaggagcgccatgcccgggcgagcgcgctgtcggcctcggtagcggcctcgggcccgtccgcctcccggcaggcggccagggcttggcggatgccggcggtgggcgcgtcggcaagctcgccggctgcgtccagggcatcgagcaggcgcagggaggcatccaggcgcacggctcgctgctcctgcacgcggcgccaggcgtcgccggcctcctggtcgagcctttgcaggttgcggtagagcaggaacatgatggtggcgaacccggtggcgagtacgacgaacggcacgagaatcggcatgatagacatgatggcccccttcggagtcggctaacgccgccattatacgaagggggccgggggaaaccctaccacttctggtatggttctggagtatgaagtggcaccgtggcgcccgagccgggacgctggccggctcggtggtcgcctagagtccggcgcgcgtgcgcacctcgtcgatgctgcggccgcacttcgacaggtcgcggcctgccgagcctgcgaagatggccaggacgaacgccgagatccacatcgcgccgttcaccaccatgtttcccgcctcgatgacgccggcgttctcgagcatcggcttccccagcaagatgagcatcatgacggcaagggctgccagtatctttatgaggtcgaggcgccgccgtgccttgagtcgctcgatctcggcacgcgccttctcgatgcgtccgttgcccttcttgcccatgcgggcctccttctccctcgaaccggccgcaccgtgcggccggggccgatgccttttgcgcgccttagcctatcgagcggtccacggcctcctcggccacggccatgggcaccgccccggccgatgcgacgacgggcgtgccggctgtgcccggcaagatgtcgtcgagctcgtccatgagatgctgcgccttcatgcggtgcacctcatggatgggcgtgcggccgaacttcgcgttgtagatgaggaacgttgccaagccggtgaagaacaggcccgcaaccgccaggaagaacgatcccagatgcaggagcccctcgccgaattcgcccatcgcgaacgacacgcccacattgtacatgttgtagccgcccacggggatcatgacgctgaagccctgcccggcgaagttggcgagcgcgcccgacacgccgagcggcgcgaggatggctccgcaggaccatgccgtgagcaggatccacacgggcttgcacttcggcgtgatgcccttcaccaccaggtacaccacctggaacagcgcgcacagcccgccgcccaccaggaaggccagcgggaacaccatcgcggtcgtgttcttctccacggctaccatcggctctacgcccatcgtgccgcagacgaagccgagcaggatgctcaacgcggccgccacggcattgaaccagataaccaaccacaaaccctgccacaccgccttgcctgcggtggcgttctgcttcgtccagggccctaccatcttcatgcccacggccatggcgaagccggagaacggcagcagcgcgccgaacgtgccccattcctcgaccagctggtagttggcgaagcctcccagtatgcagccgatgatgcccatgctgatgagcgtcgatccgccgatgaagaactgcatgggcgtgccggtgagcacgttggtccacacggtgacgagcgcctgggcgacgagtgcgagcacaccgccgatcagaaaactgtaaatcacggtcttgtaggctttcatcgaagcaatccccccctgtaggttccgatacgtgacgtgcgcgaaagcgcgagacgccgccattgtaccggcgcgtggagggagggcatcgacccatgcgtactagccccctgttgattttcgtccacacgaggggatgaatcgtgctgcacgattggggaaaaccccagatgggaatgctgatgaggagggggtggcgaagacggtggaaagcaagagagccggaaacgcggcacgtttccggctcctgtgtttcagacctcttccagtataagatgatatctactattaggcaatacccgcagagatgattttttcactgaccgaaaattcccgtcgttccgcggatttgcccctgctctccccgttcccgcgtttcagcgagaaggtgacgaggggaaggggctggcaggcgcttcggaaagaagcaaatgccaaggcaaagcatttgcccgttgagcaaagacggctggccgatgccgccggcagacgggcgagcgcgtacgtttccgtgcggtgcgcgggggacgagcgccgcccgcgcaccgtgcgacggaagctgcgcgacgggaaggatgcgcgccaaggcgggggagctgggggcgcggcgctactcgccgcggccgaacaaggtgcgggggatggcggtgcggatggcggcgcgcgcctcggcggccttctcggatgcccagagcaggccgggcctcacggcagccgtgtatacgaccttcacgaaggggcctacggccagcaggttcacggagaacgccagcaggtaggacaggggcaggttctcggcataggcgagccaggtgaagccggccgggccgttcgagatgagcacgccgaagaacgtcatgaacgtcaccatgaccgaaacgttcaccagcgtcatggcgaccgtgcgcctgaaaccggcgaggccggccggcacgacggcgcgcgccaggcggccgacgagggggttcgccacgaccgtgcgcacgaagagcgcggctatgaacgtgagggggtactcgtagagcacctccgagaacgcggccagcgaccggtcggacgcgtggatcagccagttgagcgtcaccatgcacgtgaccatgcagaacaccatgagcacctggaacgcgagcttgtccttcccgccggcgggcacggggacggcgccgcggagggcgcgggtgtaggcgttgtcgggcagagggcgtacggcatgcagagacatggggtcctttcggtcgtggtgcgtattctcttgtcgcttctttcatgcgtcgtgcagggccgcggcaggcggcgcaggcgtttgacgcgagctcggcggggagcaccccgccgacacaggacgaccggcagcgggcgccaggcggcgaggctgcatcgtagatgtcgtcgatgatgaaaaaacgggcagcgcgttaagcgcatacgaatccgaactcatcggatgcacccagtatacggcaccgcgcctcaccgatgccggcatgtaagttcatcaccattaactcttcaccgcatcaggcgctatgcaccgcccgccgcgcacagccggccgctcgcggctcggggcgtgcggggccgcacgatcggccgcgtgctgcggggcacgggcgacgcgcagcacgatcggccgcgtgctgcggggcacgggcgacgcgcgcggccttccttctgcatgcatccgccggccacgatgcgcgttttcgttcggcaagctagccaagccgcgataatggtgataatctagtataagacgtaatctatcattaccgggacggtcagcgtgcccgggcgacgcatgcaggaagggacgaaggccatggagacctactacaacccggaagacctcgacaagttctcgacgatgggcgaggaggcccccgagctctgggacctctacatggcctactacggcaaggtgttcgccgagggcgcgctcacggcgcgcgagaaggcgctcatcgcgctggcggtggccggcgccgtgcagtgcccgtactgcatcgactcctacacgcagtcgtgcctggagaagggcgtgaccgaggagcagatgaccgaggctttccacgtggccaacgccatccgcggcggcgccgcgctcgtgcacggcgtgcagatgaagaacgtggtcaagcagttggaaatgtagccatgccgcaaaccagcgaacaggcccaggccgtcatggactcgttcccgccgttctacgagcgaacggacgaggccacgcgccgcacgcgcgggcagctcgacgtgctgcaggtgaacgtgggccgcctgtgcaacctggcgtgccgccactgccatatggacgccggccccgcgcgcacggaggtcatggcgcgcgagacgctgcagcagtgcctggacgtggccgcgggccgcggcttcaagaccctcgacgtgacgggcggcgcccccgagatgaaccccgctttcgaatggttcgtccgcgagggggcgtcccgcggcctggacgtcatcgtgcgctcgaacctcgtggtgctgctggacgagccctaccgccatctgcccgaagtgctcgccgagctgggcgtcaccgtgttcgcctcgctgccccactacacggcgaagccggtggagaagcagcgcggcgcgaacacgttcgacggcgtcatagccatgttgcagaagctgaacacgctcggctacggcgcgtccgagggcgcgggcggggaagggcccgcactgaacctcgtgttcaatccgagcggtgcgttcctgccgcccgaccaggaggcgttggagcgcgagtaccgcgcgaagctggcggaggactacggcatcgtgttcgaccacgtgttcgccatcgcgaacaacccgctcgggcgtttcgggaacctgctgcacaagacggggaacctggagcgctacatgggcaagctcgtgggcgcgttcaaccccgataccgtgccggccatgatgtgccgcagccagctctccgtgggctgggacggcgcgctgtacgactgcgacttcaaccaggcggccggcctgccctgcagaaacggcctgaccatcgccgacttggcggccgacccgacgctgccgctgcagcgcgacatcgcgttcggcaaccactgctacgcctgctgcgccggcgccggcagcagttgaggcggctccacggcgtagtttgcgccgtaagggttccgtcgttctgcgaacgacggaacgagcagacgctgcggccggccgtggtgcccggacttcgcgcggtgccggagactcgcgtaccgaagtacgcctcgcctccgccatcccccgaattccgggcaccacggccggcctcgctgacccactgcgccaaccagcgcgcttttcctagatcccgatcgtcaggccgtctgcggcgggcttcacgcggccgccgtactgttgcaggtactcctccagctcggcgagcgtgacgggctcgtcgtagtgcatggccaggtgcgtgaggtagagcgtccccgcgtccaattccaggccctcctcgatgcactcctgcacgctgtggtgcgcgtcgggcgaccagttccgcttccagaacgtggcgtccatggccatgacgtccacgccgcgcacgcgctcggccgtctcgggcgggagcttcccggtgtccgacgcgtagaacaggcgcgtctcgggcgtctctatgaggtagccgtacgtgcccggcgcatgcgtcacgggcagcgccgtgtagcgcacgccgtcgagctccagctcgtcgaagggggcgagctcgcgcatgtccaggcagtacgtcatgtagtggaactcgatgcccgccccctcgagggccgcggcgctgccataggtgggcagcgcggccttgcgcacgagctgcaccaggtactccagctcgccgaggccccccaggtggtcgaagtgcgcgtgcgtgtacaagagctcgtccacgcggcgcacgtcctcgcgcagcagctggtggcgcaggtcggggggcgtgtcgatgagcacgttcctgccgggcgagccgtcggcgttcgtgccgcgcaccagggcgccgcagtcgccgcgccgcgcgcgcgggtcgcggcgcgcctcgttgcaggcggggcagtcgcagaagaaggccggcacgccgcatccggcggccgtccccatgaacgtgaacgtgtgctttccgtgctccatcgcggtctcctcggtggtcgatgccgtgtcttttctcccatgatagcgcttttcgcaggagcgggttgcgaaactcccgaccgaagaagtcatcgtctttcggcccgatcgtgctactataggcaccattcgatccgaggcggggcgtccgagaggggcccgcatcctcggtaggcggtttccgacggggggaagaggctgtcatgcggcaaggcttaccggcagattatcgacatgcccggggcgctcgcgtaccggatggggcggaggcggcttcgtgaacgtcgaccagaggcccgatctcggcttgcaacagcacctgcacctcaccaccgagctcaagcagggcatcgccatcctgcgcatgtcggcgcaggagctctccgagtacgcgcggaagtgcgtggaggagaacccgttcttcgacgatgacgactgggtcgagccgcgccaccccctcgcgcccgagcggtactcccaggacgtgagcgccgatgcgctcttcgagaagcgcggccacggcagcccggagacgttcgatgccgagcgcagcgacctgtcccagcgctcgttctcgttcgaccgcttcctggccgagggcgacacgctcgacgagcacctgctggagcagctgcgcctgcaggccgacggcccgcgcgcgaaggccatcggggagtatctcatcggcaacatcgacggcaacggctacctgcgcatcgccgtggaccaggcggcggcctccctcggcgttcccgagcaggaggtgtcccaggtcctcgcgctcgtccagcagttcgagcccacgggcgtgggcgcgcgcaacttggccgagtgcctgctgctgcagctgcggaagagcggcaagctcaccccgctgctcgagcggctcatcaagagccatctcgttgagttcgagacgcgcacccccgccgccatcgcacgcgacatgggcatctcgctcgcgcagctgggcgaggcgctcgacgtcatccgctcgtgcaacccgcgtcctgcgagccagttcggccgcccgtcgcgccctatctggcccgaggtggtggtcacgtcgtgcgacgatgggacgtacgaggtcagcctccaggatttctatctgccgcacctgaagatcaaccccacgtaccgggctatggcgtcgcacgtgaaggagcacgagaccgagacgtacctgagcgaaaagctcaaggaggccgagagcctcatcgacggcatcaatttccgccatgccacgctctacaaggtggcatgctgcatggtgcagatgcaggtggagttcttcgagaagggctacgactgcctgcgccccctcaccatggcccaggtggccgaggccacgggcgtgtccgagtcgacggtgagccgcatttcgaacggcaactacatgcagacgccgcgcggcgtgttcgagctgcggttcttcttccattcttcggcctaccagggtgccgaccgtgtggtgtcgtccgtcagcgtgaagcaccgcataggcgagctcgtggatcgcgaggatccgtcgaacccgctaagcgaccaggccatctccgaggcgcttgagcgcgcgggcgtgtccgtgtcccgtcgcacggtgaacaagtaccgcgaggagctgggcatcccggcccgagccgcacgccgccgcagctagccgcagcgaaaggggcgcccccgcaagccaagccccgccacagatccggttcggggcgagacagggggacggggtcaatgtctcatttttggatcaaaaatgagacattgaccccgtccccctgtctcctggcgtccgccaaaaggacgtggcagaaggggcgggacgaaatcgcaggctatggcatgttttcgacgacgaaccttgtgggcggcttttcgccatcgggggtttctcgaattcatgccggcagaaattcgttcaagcatgccatagcctccgatttcgtccatgactctatcagtcatgttaaaaggccgtgtgcgaatgccgcaaacctggtgcaatcaagaagaacatggttgcgttaatcggcgtttccctaggtgcgcctcgtcttatttctaaacaaattctcatgcgttctcatattgtgacgcctgttccgtgcaactttctgcggcctttgcgcacgcgcagcctcgtgacctgccggtatttcccgcaagaaagtggcacggttcttgcatcgatgattacgaggcgtctttggtttgggctgaaaagggatcggccaagtgaacgggtgtgcagcttatcggggggaaaggtcgacgagctgtcatccctgcatccgttcgaatccaaacgcgtttccgagaccggtttcgtaagtaaacggggactgtcggaataaggaggagttggattgactaaaaagcaaaagactgcggcggcatggaccgtcgtcatcatcgcctttttcggaggctttgctcttgccaacgtccaaaacaaggtaccgccctgcattgacgtcgtgatgatgtacttcaacatcggcgagacggatgccggctggctgacgtcggtgttcaccatcatgggcatgatcacggccatcccggctgcggcgctcatgcgcaagatgggcccgaagaagatcggcgtgatctcgctcgcctgcgccgccgtgggcggcgtcatcggcgcgttcgcaaccgatctgtgggtgctcatggccacccgcgtgctcgagggcgtgggcgtgggcatgatcgcggttgtcggacctgcggtcatatccatgtggttccccgccgagaagcgcggtcttcccatgggcctctggggctcgtggatgatgtgctcccagacgcttctgttcttcatcgccggcggcctgaccgtgtcgttcggatggcagggcgtatggtggttctgcgtggcgttctgcgtggtcgtgctcgtcctgtacatgtggaaggtcgacgcgccccccgagggcacgccgaactacgctgagggcgaggacgaggaggagttcaagttcggcgacggcttcaagtcttcgggcacgtgggtcctcaccatcgccggcaccatcttcacgttctgctgcttcggcttcgccacgtacatctcgctctactgggcgcagacgttcttcggcggcgacatgaaccagtccaactggtgggtttccatcatgtacgccatcgagatcccggtggtcatcttcatcggctggctgctgaaccacatcaagctcaagaaccgccgctacgtaggtgttctgggcttcttgctgtacacgttcatcctgttcttctgcttccggatggaggagcccggcctgctgctgcccttcatcctcatctatccgttcctcgagggcgccattccgaccgtgtactggacgctgtgcccctcgaccgccaagagcccggagtattcgggcacggctatcggcatcctcaacgtgggcctgaacatcggcacgctgctcggccctccggtgaccggcttcttcatcgagaattacggatggggagttgccacgatcccgctggcagtcgcctcggtgctgggtgcgattgcgttcttcttcgtgaagacgcatgaccacgactccgacaaggccacggctcgcgctgcggaaatcgatagcgacctgacccaagcggctgtgtaggcaagaccgagcagccgtgtaactgaaggagagtagtttaatgaagacgaaacgagcctggatcgtcgcgttcgcgaccatcttcgccggcatctcgctggcgctcgtgcagaacaaagtggcaccctgcatgaccaccctcatgggtgcgttcaatatcgatatggcgacagccggttggctgagctccctgttctcgctggtgggtatcgtcatggccatcccggcctccatcgtgctgaacaagctcggaccgaagaagggcggcatcgtagccttggcatgcgccatattgggctcgctcatcggtgtgttcaccgacagcgttcccgtgctcatggcgagccgtatcgtggagggcgtgggcgtgggcctcatgtcggtcatcggaccgtcgctcatcgccatgtggttccccgaggcgaagcgcggcctgcccatgagcatctgggccgcgtaccagatgggcgcccaggctgtcatgttcttcttgggcgccgtgctcaccaccagcttcggctggcagggcgtatggtggttcgggcttgttgcgtgcgtcgtcgcgttcgtgctctacgtcctctgcgtgaagagccctcgtcccgaggacagctacgcggatgtggagagcgaggacgtgtccatcgtcgagggcatgaagtcgccttcggcctgggtgctctcgttggcgacgatgctgttctgcatcggctgcttcggctttgtcaactggatcgccacgtgctgggcccaaacgttctcttgggacgagggccaggccaacatgtgggtggggtacttctccatcttcggcgtgatcgccgccgtggtcatcggcgcgctgctgaaccatgtcaagaaccgcaagctgttcggcgtggcggcgctcgtcgcctacggcgtggcttcgctggtgggcatgttcatggacaacccgtcgtttctcatcgggttcgtgatcgtttacggcttcgtggacgcgggcttcccgtgcgtgctgtggacgatggccgcccagacggtgaagaagcccgagcttgcgggcgtggcgctgggcgtggtatccatcggcttcaacgtgggcatccttttggggccgccgatcatcggcgccgtggtggaggccgccggctggcatgccggcgccatcgccatctgcggagcctgcgtgctgggcgccgtggcgctgctgttcacgaagctctacagcgcggacgacgttccggtccaagaggtgccggaggccgagcccacagccgcctaggggctggcccggacgcccgagggcgtccgggcccttcccggaaagggagggcgccggcgatcccggcgccagcgtgaaacgatgcggacgcttccgacgaggcgtccgcatttgtttttcccagggggacggggcatcggcccatagcgcttctcccgcccgattcccggcattgcgtccgcctgggtttgcgacgccaccgtccggagaacttccgccgccggttgggatgcgcggtcgccggacgccgtgattctcaaaagtaacccgaatggcgggcgaatctcaatatgcgagcgtccttcgccgtccggcacccgcattcgaggagcaaattgagaaaccggttggcgcgccggcgcgtccatggacggcgaattatttcgctcaaaattttttcacgcttatgaactgggtatatatcaatttacccaccgggtttcaacggattggcacggaccatgcaactacttattacgtaaggcgcgagcggcaagagggttaggccgaccgcccttcgatctacgttgtaaggccatgcgagagcatggcgtaggtttgtcggagaggaggacatgcaaatggcagaggagaagaagaggctggatctggacaaggagttccaggagaagcgcatcaaggagcacctggccgacccgaacaagaacaaggaagcctggcagcagaaggcgcaggatgcttcgggtcgcgattggacgaagcctcgtcgtccgacgttgaaagacggggaagtctaagtactgcccgaaagaggagaatcggagagagagggatagcaagtatgcttaccaacgaactcgaaggcgtcaacaaagacgtctacaaaacagattggcagtggcaggaaggcgagtacacggtcacgcgtacgaacatgtggaccgcccccggctgccacaacggctgctctgttctgtactacaccaaggacggcaaggtcgagaagatcgaaggcgacccgctgagcccctacaaccagggccgtctttgcatgcgttgcctggacgtcgtcgagacgttctatcatcctgaccgcctgaagtaccccctgaagcgcgtcggcgagcgcggcgagaacaagtgggagcgcatcacgtgggacgaggcgtacgatgacatcgccgagcacgtgcgcgccatctgggaagagtacggccccgagtccatcgtgtccatgcagggcaccggccgtaacatctgctggcagaccccgtacctgagctacgccgccttcggcagcccgaacttcgtgctcggcttcctgtccggcgacgcctgctacctgccccgtacgaccatcggccactgcttcatgggcgacttcttcgtggccgactgctcgcagcacctcgagaagcgcttcgccgatccggagtacgtgttcccggactacatgcttatctgcggcaacaacgctctgatctccaacggcgacggcttcttcggccactggatcgtcgacgtcatgaaggaaggcggcacgaagctcatcgtgctcgacccctcctgcacgtggctggcctccaaggccgagcactggctgcaggtgcgccccggcaccgacgccgcggtcgtcatctccatgctgggcgtcatcatcgaagaggatctctacgatcacgacttcgttgagaactggtgctacggcttcgacgagctggccgagcgttgcaaggactacccgcccgagaaggccgccgagatcgctggcatcgacgccgacgacatccgcgccgccgcccgtgcgtacgcttccggcaacccctccacgatccagtggggcctcaaggtcgaccagaccgtctgcggcatcccgctggcccaggctctgctctccctgggtgccatctgcggtgacatcgacgtgcccggcggcatgatgatcccgcgctgcgcctacgacattcccgactcctatggctgcggcatgtggaacctctccgacgagatgctcggcaagatgctcggcgtggacacctccccgctgcacgccctcggcttcgacccgacggccaacggcgacacggtcctcctggccatcgagaccggcgagccgtacccgatccgcatgctgttcatccagtccacgaacccgatcgccaacatggccgccgacgccccgcgcgtgtacaacgccatgcgctcggtggactacaacgtcgtggtcgacgtgttcatgaccccgacggcggttgcctgcgccgacatcgtgctgccctgcggcatgagctgcgagcgcaactccgcccgcgtgtggtggtggccgctgcgctccatcgtcaaggtcgccgactactacgaggccaagtccgacgagcagatcatcctcgagctgggcaagcgcctcaatccccggctgttcccgtgggagacggacgtcgagctcatgacgtggtggatccagtccggcaaccgcttccatgccggttggccgcacaagaccgaccagacgttcctcgacctcaccgagaaggtcatcgactggccggacgactgggcgtaccgcaagcacgagctcggttggctgcgcgacgacggccagcccggcttcaacacgaacacgggcaagtgcgagctgtacaacaccctgttcgacgcgtggggcttcgatccgctgccgtactacgaggagccgcctgagtccccgatctccacgccggagctgttcgaggagtatccgtacgtcctcacgaccggtgcccgcacgtgggagtacttccactcggaggagcgccaggttccgcgtctgcgcgagtcgcatcccgatccgctgaccgatctgcatcccgacaccgccgcgaagatcggcgtgtgcgagggcgactggatctgggtcgagaacatgcgcggcaagtgcaagcagcgcgtgcgcatcaacgcgtccctcaagcccgacaccgtgcgctccgagcacggctggtggttccccgagaccgacggcgccgagcccaacctgttcggcgtgttcgactcgaacatcaacaacctgacggttcagggtgtgacgggcccgacgctctacggcgccccgtacgcgaaccaaatctgcaagatctacccggtcacgaaggagaacgactgctcgcctagcgagatcgtgacccgcaagggaggtttctaagatggctgagaagtatggacttctgatcgactacacgtggtgcaccggctgccactcctgcgagatggcctgcaaggtggagcacggctggcaggctggcgaggcgaacggcatccagctgttcgaggacggcccgcgcctgatgcccaacggcaagtacgagtacaactacctgcccgtcatgacgtcgctctgcgacctgtgcgccgaccgtacggccatgggcaagctcccgacctgcgtgcatcactgccagtcggcttgcatgaagtacggcacggtggacgagctggccgagaaggccaaggaaatgccccgtacctggatctacgtacctgagcagtaaagcctcgtcttctctgctggtgccccggctaaacgccggggcaccagccccgagagggcgtcacgtaaggagaaaactatgtgttacagaccggccaataccgttaccattgtgaagtgcctcgagtgcggcgcgttcaacaagcccacgaacgagacctgccagaagtgcggcgcggacctgaacgagtcccgcaaggccgctgacgaggccgcggccccttctccgggcgctcccaaggagatctccctcaagccgcagggcctcgacggtgcccccaaggccccgggcgctcctgcagccccaaaagcgccgggtgccccgaagccgccggcgaactaaccatgccatgtccggcggcatacagcgcgtgttttaggatgaggcgaagcgcccatgcctaactgtagaacatgcagcccctggtgtcgtcgttgccataagaaggcggattacaagtttcccgtcgagtgccccgagtgcgggtggtacaacccctacgagcgggacacgtgcaagaagtgcggtgcgccggtcgcccatgacgaggagaaggcggtcacgcacctgaacgccgaggtgaagaaggcctgcttcttctgctcgccgttcgagcggccgctgtgcaacgagtgcgtggagacggggcgtacgaagatatgcccggagtgcggcagctacgtgttggggacacggactgcctgcaagaagtgcgggcatgttttctagggcgtgctgcggggcgacagcccgcgcggttgccctgagcgcagcctgagagcgaggggggcgagggcatggcggctgcaaaccgtgcctgttattgatcgggctggagaaggtgcttaacgctcatctccagcccgattggtttttccgagcctgcgctccggctcgggtcagggccgcggttcggcgcaggagggctactggctctccttgagcttgcggtacagcgtggccttgctgatatcgaggatggcggccgcggcggcgatgttgccgtcggcctgcatgatggcctcgttgatggcgatgccctcgagctctttgagggagagggtgggcagcgtcctgctcgtcgcggcaggggcctcggccccgggggcggcggcctgctcgtccggcaccttgatagctgaagacgattcgttttgcgaaggggctgcggcgtcgtccgccggtgcggccgccccggcttcctcgctgctgcgcaggtcgctggcctgggcgatgtagctggggaagtcgtcgatgtagatgacgccgttctcgcaggtgtagtaggcggagtagatggcatgcttcagctggcgcacgtttcctggccaggcgtaggtgctcacgaactgcgacgcctcgttggaaagcgacaccttgccgttgcccgtcttcgtgtggcactcgttgaggaagtagcgtgcgaagtagagcgcgtcccccacgcggtcgcgcagcgggggcaggtcgacggtgagcacggagatgcggtagagcaggtcctcgcggaactggtgctggctcaccagcttcggcaggttctggttcgtggcggccaccaggcggaagtcgatctgcttgtacgacttgccgcccacgcggatgatgcgcttgttctccagcacgcgcagaagcgtggcctgcagttccaacggcatgtcgccgatctcgtcgaggaagagcgtcccgccgtcggccagctcgatcttgccgggcttgccgccgcgctcggcgcctgtgaagctgccgctctcgtagccgaagagctcgctttcgatgaggcggggcgggatggcggcgcagttgatggacatgaagggtccctcggggcacgcctggttgtggatggcctgggcgaacagctccttgccggtgccgctctcgcccgccagaaggatgttctcgcgcgatcgggcgaagcgggaggcgagcttcttcgcctttgctatctggtagctcctgcccaggatgtccttgaacgtgatgtcggccgcatctcccagcttgcctcgcgaggcgccgagcgtggcgcgcttggcctccttgagcgcgatgatgtagccctcgaagtcgtggtcgccgccgtagatgcgtgagatcttggcctcgaggggcatgccgtccacgtcgaaggtcgagtggccgccctgctcgatgacctcctcgaacgtacggctgtcgttgatgagggcgttcacgttcgtgccgagcagctcctcgggggacgtcttgaagatgcgggcggcttccggggtggccagcgagatggtgtcctcggcatcgcagatgaggataccgtccttcacggtgttcatgaggttctgtgagatggtctcgtagcgctgggcctccagagacgccttgctgtagcgcgactcggtctcggcgagctgggcgtcgtagccgctgatgcgcagctggtcgctcagggtgatggcgagcgatgacacgaggctcatggcgtggatgaggatcttcttgttcgccgtggacagcagctcgtcggacgtgggctgcgtgagcgcaagggcgcccacgctggcaccgaactggtcgatgatgggcgccgcgcaggcgatgaggccgtgcagcgcgaagcagtagtgctcggggccgatgagcacgaacggcttcttgtggcgcatgcacagcgtgtgcgcgttcgtgcccatgttgctctcgttgcactggtagttcgggcccgcgaagcggtgcagccacaggttgccgatctgcacgaggggcgtgccgttcacgtcgagcagctcgaacatgtagtcgttctgcaggttcagcgactcgatgttcctgatgagcgacttcgcggcagctacgatctcggcgttctccgcgagcgtttcctcgtatgcctgctcggtgatgtactcgccgaggtcgggctggtcgggactcaagccgaaattgcgcgagttgatccacgactccgcgatctcgggccgcacgcaacctgcctggcgggggtcgcccccgttgttgaggaagtcgagcttcgcatcgaagatgcgatcccaaaacgaatcgtcttcgtgcatggacttgatgagctgaagatcgctggcgtagtcaagttccttggtgcctgcaacgtcgtccatggcgccccccttgcgcttacgggttaagtgcataacgacattataggattaaaaggtgaagcaagttacgcaagaagatcattttgagaaaagctctggaaaccggggcatctcctcgcatgccgcgcccgagggcttcaacggccggaagccgtgggggctcgatgcaaagggagccgacatgggggacgatccgtgggcgttcgaccacggcattcggcgctcgcctgccgaggggcgggatttcgagggtgccgccgtccgccgctcgccggccgaggagctggtctcgaaaggatacttcctgccctacgccaagcgcacgtgcggtggcgaggagctgcgctgcggcgagtaccgctaccgcctgcgcgaggacggcacggcgcgcctcgtgtcctacgagggctcggcggagcaggtggacatcccggccgaggtggacggcgcccgcgtggcctcgctggccacgaacctgttccgcggccacgccgagctgcggcgcgtctcgatgcccgacacggtggagttcgcgggcaaccacgtgttcgacggctgcgtcaacctgcgcagcgtgcggctgtcggcggcgctggaccaggtcgaccccaccatgttcctgcagtgcggggcgctcgcggaggtggagctccccatgcccctggtgcggctggagggaaactcgttctcggacgcgccggtggcccacgtggcgttcgggccgctcgtcgaggcgctcgacgcgaagcccctcgggctgccgcacctggagcgcgtgaccgtcgatcccgccaacgaggccttctccaccgacggccgggcgctgctgtcgagggacgggcggcacctgtaccgcctggtggttccctgccgctcctacgaggtgcccgccgggtgcacggacgtggacgagcgggcgttcgactcgctggacgacctccaggaggtggcgctgccggagggcgtgcgtcgtttgggccgcatggcgttcgcgaagacggcgctttccgcggtgcgcctgcccgcctcggtggaggcggtgggcgagaaggccttttaccattgcgcgcggctcgtgcaggcgcacctgccggccgggtgccgggagatcggcgccgaggcgttcgcgttcaccgcccttgcgcgcgctgagctgccggcggggctcgagcagctgggcttccgcgcgttcgaccacacgcccgcgcaggcgcgcatcggcgagggggccctgggcgtgtcgccggccaaccgctgcctcgacctggacgccgagggcggcctgtaccgccatgacgtgttcctggagctgatagggcaggtggagtcctatcgggtgcgtcccggcacccatgcggtggccgacgaggcgttcaaacgccatgcgcgcgtgcgcgccgtggagcttcccgagggcgtgttctcggtggggcgcgaggcgttccgggggaaccggcagctcgtgcgcgtcgatttgcccgagagcctcgagcgcatcggcgagcgtgcgtttctggacacgtcgctctccacgctgcgcctctcggagaacgtgcggtcgatcggcgaggacgcgctgctcgtgcagggcgacaaccagctcatgccgcgccggcccctccagtcgatctcgctcgatgcggccaaccccgtgtactacctggagaacgggcttctgtgccagcgcgacggcagcaagatgggcggcgacacgtgccttctgtacgtggggcccgacgacgtggtgcgcataccccgccaggtgacgcacgttgcgagcctggccttctgcggcgcttccggcgtggccgagctgcacctacacgggcacctgcacagcatctgcaacggggcgttctccacggctcgctccatcccgctcgtccacgtggggttccccgagcccgtcgacggttacgaggcgggcgagttccgggtgcccgagctctcctcgcgctaccgttcgccgtcgtatttgttcggcgccgggccggggggaaccgccttcgacttcgagtactacgactcgtgggtgacgcacgcggcgaccatgcgggagttcgcgccggcggccctgtaccgcctgcagcatcctatgtgcctgtcggatcatacgcgcgggctgtacgagaacatcttccagcgcaaggcgcggcaggcgtgccgctacttcgccgaccagggcgacctggacgcgctcgcgtggctggcggggcgggggcttttggacgacggggccatagaagcggaactgggcactgcgacgcgcgaggggaggacgcaagccaccgcctgcctgctcgagctgcagcatcgtctgatgccggccgcgggcgtggacttcagcttgtaaacgcctatgaaagacttgacgcccatagcagagggggacgtggtcctcaaagaacgggagcgcctggggggccaggctgtcgcggcgcccaaggtgggcctgaccaccgaggcgcgccaggccgagaagcgcgagcgctacgagcggtgcctgcccgtggcgggcgacatattggaggacgcccgcacgtcgttggccgtgcggttccgtttcctcgaccgggcgctgtggcgcatgccgctcgtgccgagcttcgacgtgtacggcatagcgagcgacggcgtcaagctgtactacgaccccgagtacgtggtggcccgcttcaagctctcgccgaacgaggtggtgcgcgacgtcatccactgcctgttccactgcatattccgccatccgttcatgctgtactcggtgctgcgccagccgtgggacgtggcctgcgacatcgccatcgaggcgctgctgctggagctggtgggcgaggctttccccagcaacttcgaccggcgtgcccgcgaatcgctcaaggtcatccgcgcgcaggtgggcggcgtggtggcggccgagcggctctaccacttcttctcggaggagggaagccagatcgacctgcgctcgctggcgccgatgttcttccgcgacacgcacgggctgtggtacaacgacggggccgagggctcggcccgcggctcgatgagcgcggcgcggcagcagtcggaggaccgcgagggcggcgagctgcccacgtcggaggggggcgagtcgctcgacgacacgcgcggcgcctccgagatgccctcgccgggcgggggcgacgacgaccaggaccgggagccggccgaggacggcgagcgcgacgagccggccgatgagggcggccccgacgacgcgtcggctgcggccgacgaggagcgcgcccgcgacgaggagcttgccgaggcgtgggaagacgtgagccggcacatccagatagagctggaggcgcatatgctgcgccagggcgagggcgcgggcagcttcgccacggcgctcgcggccgtgaaccgcgagaagcacgactacgcggagttcctcaagcgcttcgccacgctgcacgagcgcatgcgcgtgaaccccgacgagttcgactacatctactatacctacgggctggaccggtacggcaacatgccgctcatcgagccgctggagtaccgggaggcgcgggcggtgcacgacttcgccatcgccatcgacacgtccgagtcggtgtcgggcgatctggtgcaggcgttcatgcgcaagacgtacaacatactgaaacaggccgagagcttcaccgatcgcgtgaacatccacgtcatccagtgcgatgcgcgcgtgcaggaggacacgaagatcacctcgctcgacgagctcgacctgtacctggaggacatggagctcaagggcttcggcggcacggacttccgcccggtgttcgactacgtgaacctgctggtggaaaagggggagttcgccgacctgcgcgggctcgtgtacttcacggacgggcagggcacgttcccgcgccggcagccggcctacgacgccgtgttcgtgttcctggacgatggctattccgacccggcggtgcccccctgggcgctcaaggtcattctggacgagaggggattgacgtgacggacgaggcgcgcgcgacgcgcggcgacaggcggcaacaggcggacccaaggagtgcaacatgaacattgcggaagcaaagcagcaggtgaaagatacgatcgaggcgtacctcgcggtggacgaccaggggcggccccttctggacaccgcgcgccagcgccccgtgttcctggtgggtgcgcccggcatcggcaagacggccatcatggcgcagatcgcgcaggagctgggcatcggcctggtgtcctactccatgacgcaccatacgcgccagagcgcgctcgggctgccgttcatcgtgcacgaggaattcgagggcctggagtacgaggcttccgagtacaccatgagcgagatcatcgcctcggtgtacgcctacatgaagaagagcggggtgaggcgcggtatcctgttcctcgacgagatcaactgcgtgtccgagacgctctacccctccatgctgcagtttctgcagttcaagacgttcgggcgccatgcggtgcccgaggggtggatcatcgcctgcgccggcaacccgccggagtacaacaagtcggtgcacgagttcgacgtggtcacgctcgaccgtgtgaagaagatcagcgtggagcccgacttcggggcgtggaaggcctacgccgtgtccaagggcacgcacccggccatcctcacgttcctggagatcaagaagaaccgcttctactccatcgaagcgtcgctcgacggcaagtcgttcgtcaccgcgcgcggctgggacgacctgtcggacatgatgggcgtgttcgagcggctgggcaaggcggtggactacgacctggtcgtgcagtacgtgcagaacgaggcgatagcgcgcgagttcgcggcgtactacgacctgttcaacaaataccgcgacgactaccgcatcgacgagatccttgccgggggcgacgttgccggtataatcgagcgggcggccgtggcggagttcgacgagcgcctgtcgctcgtggggctcctgctggatgccgtgtgcggcgacatggccgacatcgtggccgagaccgacgtgctcgtggcgctgcgcgacgacctgcggggcctgaagcccgccgcggaggaggggggcgacgtgcgcggccttctggacgagctggagcggacccggacctcgcagctggagctgggcgtggcggcgggtaacctgtcgaagggccgccgcgcgacggcggaggccgagctggacgggatcgcggcgttgcggcaggcggtcgacggcgccgcgccccaggacgccttcgcgctcgcgtcgcaggcattcgccgcccgggcggcggcgctgcaggcgcgcgcagccgacgtggagcagcggctcgcccgcgcattcgccttcatggaggcggcgttcggggatgcgcaggagatggtggtgttcacgaccgagctcacgtcgcgcaccagctcggcgcgctacatcgcccagtacggcagcgagtcctacttcgcgcacaaccaggacatgatcctgtcggaccgccagcgcgagctgcgccggcgcgtggaagacctcgacgtgtagatgcaagccaaggaaagcaagcaacctaaaggagaagagaacatgaagaagtacacgctcacctcgtatgatccggtcgagctcgacctgccgaagccccaggtgcccgcgagcctcgtggacgcccagatcgagaagctgctcgagcccctggccgagtaccacgagatagccgaggagcgcggcgtggccatgggcgaccacgtggtggtgaccacggtggacgcgcgcttggacggcaaccccgcctccaacttcgtgctggagcactcgctgtaccacgtgggcggcggcgagatgccccgcacgttcgacgaggagctcgtgggcatggcgcccggcgagacgaaggacgccgaggcgaagatcaagctgccgctggcgaaggacggcgacgcctcccgccttaccatgcaggtgacggtggagaagatcctgagctgccgcacgccggagcttaccgacgcgttcgtggccgagcacttcgagcccgccacgacggtggccgagttccgcgagggcgtggccaagcagttcggcctgcccgacatggccaagaacgacgcccagttccccgacctcgtgctggacgagctggcgaagcgcctggtggaagatcctgacccggccgacctgctgccgggccagcccctggacgcgctgcgcatcacgtgcgccatcgacgcgctcgccgaccacctggacatcgagctctccgacgccgacatcacggcgcagatgcccggcaacgatgccgagcagcgcgagaagatccgccagcagctggaggaccaggggctgggcgacgaggcccgggtgttcgcgcgccgcgaggccgcgctctcgtggctggtgaacaactcgcgcgtgtcgtacaagtagcggcgctgacaggaacggaggcttgggcatgggcgcggagaaggcgatcgatccggaggcgctgcgggcgtactacgggcagcttcccaacgagtacgggttcgcgagccagtgcaagatgacgcttctgggcgatatcaagggcaagcgcgtgctggacatcgactgccggcggggcaagggcgtcatcaagctgtcggactacgtggggccgcgcggccacgtggtgggggtggacccgacgcccgagtggatagagatcgcccgctccttccaggacgacgcgtggcgccgcaacgggctgcccgagaacaacatggagtacctggtggcctatcccgaggacctcgccgcggcggggctcgaggacggcacgttcgacctggtgttcgccaacagcagcgtcaacgtggacttctgccccgaggcggtgttccgcgaggcgttccgcgtgctgcgccccggcggggtgctggtgtacgacggcgtggtggcggccggggagcgcgacgcggccacggtggcccgcgcgcgggagctcggcaacgccgtgcaggccgcgcccagccgcgaggagttcgaggccatgatggcgcgcatcggctttgcgcggccggactactacgaggagtccgacgtccgccccgagacgggctacaagggcgggttcgaggtgccggtggccgagacgggcgaggacgtgcgcttcgtgaagaccacggcgcgcatcgacaagccgcgccgctaggcgcgcggggaccgggcgcgcaggacgcccgggcaaggagaaggaacgctgccgcgcgctcgtgcgccggcggctcgaaggaggaggaccaatgcagtacgaggaactgaaggcgcaggcagaggcggtgcctgcagcgcaggcgaaggactaccgggaacttttggccctggctagcatcgcgggcggggtgtggccccggctcaaggggcatctggaggcggcggaggactgccgcgggttcttccaggcgatctacgacgacgatgcctgccggttcgagaacgcctgggcgtactgggcgaagatgaacaaggagccctgggccgaccgcttcgaggccgagaaggccgtgcgcggcgtgcgcctggagaacaagggcatcttcatcgagggcaacggcaacgagctgctcgtgccgctgcagggccgcgggcacgcggccaacgtctacctgttcgccgagaacagcttcaacgagcacgccgccgagttctacggcgccatcaacggctcgttcacgtgcgtggggatggagctggagggcgccttcgacatctaccgcgcgcaccgcgccctcatcttcgagcgctgggacgtcgacaagctgcgcaggcgcgccaacggcaagggccaggtccgcaccggctgcgactgctcggccacctggtagcccgcttccgtcccgcggccgacggcgtcggccgcgggacggggaggcgtggccgtgcgcgcgaccgtgccgcagatggaagggcaaggatgggcgtggcagtgagcggagcggcctgcgcgtggaggccgctggaggggcgggcgcgagcccgtccctccgctcgtttcctagcgggcttccgccggcttcgccgccgctttcggcttgggcttcgacgctgccttcttcggccgtcccgccttgggcttctcgcgcaggcgggcgtcgacgctgtagcgcgtgatgaacgagtcgcgccctttgcggaagcccatgagcaggccggccttgagcatttgggagacgcgtgcgcgggacaccccgagaagctccgccgcctcggatgccgtcacggcggggacggtgtcgaggctcgcctccacggctacgagcaggatgcgaccgtcctcatgcgtcggctcgtggccaaatgttgcctcggggatatccctgccgtccatgaggcgaaactctatttcgagcttgagccagtcggccgccatggccgagacttcggccaagtcggccccttgggtggcgccgtcgaagtcgaagggacgggcgatgatccagccgtcctgcccgataaaaagctcgaactcatatacgtgcagcatggatggttccttcctagttgagctagcgtcgcttctcgatgcccgcctgctttctgatatcgcgggcagtgtcctcgtcgatttcccggtgccgtgggatcgatgtcgtgaatcccggtttcttgaagatatcgtggctcgccccgccgtagtttttcagcccttgggcttcgacttccttgacaaggtcgcgtctcttgaccatggtcgtccttcctaaaaattataaactataattaagaattaatcaagtgcgaaaggggagggagacgggcgttgtcccgtatcggtttcgcggggtcgtgtgtccccagcgcccgtcgccctgcgccaggcgcgcctacgggcgctggcggcgtagggcgaacgcggcggcgagcgtggcgctgaccacggcggcgagcgcggtgcagcggggcgcgcgggcgagggcgtcgcccgtctcggcgagcagggccgggggtgcttcttcggcgggcccgttgcctgctggcggctcctcgggggcgctggccagctcgttcaccacctcgtagcagtaggtgcgggcgttgctctcgacggcgacggcgaagggctcggcggtgcggtagcccggcggggtggtggcggggtcctcgcggacctcgtagaggccgtagggcagcgcgccgtcgaggccttcggggcggagcccctcggtggaggcccggccgtcctcgccggtgacaaggcgggctgccacctcgcccgtggagaggtgcacgatatcgaacgccacgccggcgagcgggatctgggtcgtcgcgcctgccgcgtccgccgaagcgccgttggcgccgcctccgccgacgctgtctgcagcgccgtccccgcccatgcctgcgccgagcttgagcagcgccacgtcgccgcgcaccacctgctcggccacggtggggacgcggtacacggcggcgttcggctcattgggggagggctcgaccgcgcacacgagcacgggcgggtcgggcagcaggtagccggcgggcggccgcacctcgcgcacgaccacggtgccgagcggcaggccatgggctccgcgcccgttcccggtcaggtcgcccgcgcccgcggtcgcgcgtccctgctcgtcggtgacgacgtcccaggtgcgcgcaggccgtgcgcccgccacggcgatctcctcgagcgaggcgtagcgccccgcgtagtgctcgaccgtgaacgccgcgcccgccaggctcgcatcgccaagcggtacggggacgcccgtctcgcggtccgctttctgcacgagggcgtcgacaggcgcgagcaggggcgcgtcctccacatggagggccggcacggcgccggtgcggcagtcctcctgcgcgaggtcgaccgggtaggttcccgggtcgggcaggtagccctccggcgccgccttctcgcgcacccagtagcgccccggcgcaaggacgcgttccgaacgggcgcgccccgaggagtcggtggtcagcgagagcgcctcgcgcgtgcacgcctcgtcggcgtacacgccgtacgccgcgccgtccaggcggtagcaggggttgccgtccgtgacctccggcgcggcggagcgcttgagcacctccaccgatccgaaggggtatagcttgaacccgccgacgttctgagcgccgtagggcgagtaatggttctcgtacatgccggcgccccggcagttcacggtgatctggaagccgccgtcgtccgcaggctcgccggtgaacgggtaggtgcccggcagcggcgtgccgtagacggagcccgagatgcagtagccggtggccgtgatgccgtactcggggaacgtcacttcgaacacgttgccgccgtccggcccgtcgatatgggcgttcgtgcaggccacgtagcagatgcccgagatgcccccgagggcttcggccggctggggagctgccagcgccaacgcgagggcgagggcgcatgcggcgagcatcgccgcgccgcacgcggcgggcttgcggcgcctgcggcccgagggggagagggggcgcaggcagggcgctgcctcgacagcaccgttttcctcatgaatgtgcggctgcgtgtgcgacgggcccatgtcggcccccttcctcgtcgttcgtgccgggtctgtcccggcgcctccatcctagcgccgtgaccttgcacgccgaccgtaattcgaccgtccgcaggtcgcgcggaccttgcgcgtttccgacgtgggaaccgtccggaccttgcgcgtttccgccgcccggaccgtcgggtccttgcccgcatccagcaccggtccagcccgttttcgcaggaagccctccgggcggtacccggaagccgcccggagggcttcctgccgggttccccctcccgccccttttgcgtgttattcgccgcaaaaacacgccgctagggtggcacatgctatcccgcatagctataatcaaatagccgattctatctactactggttggcatcgaacaacggtcctggccgcaaggtgctcgatggcggccagcagtcgatagaagcggtcggaggagctgtcaacgtcatttcgcgcagggggtgcgaacgtttcacgccaaggctcgctcagggggtggcgaaccgccgaacggcggaatgcccagacgagcggtcgggatgaaaatcgcggtccgatcaattaatactatcgggcttacccgctcgcggaatttagaacttccggtgtgatgtggatggaacgggcgttttatacactggcgtgcatgatccgcgcgagtgagagcgttcgggccaagcggaacttccgcgcataatcatgcgaacggcacgacagggttcaacggtaaggtaaacggacgagaagaagaggggaaggtagatggagatttccaagacgtcgaccggtctcaagggccttgtgagcccggataccgtgtcgaccgaggtcgacatccatcaagacggcgtcacgatggtcaagtcgctctgctatttctgccatgctaactgcggcgtgctcgcctacgttaaggatggcgacgtaatcaagatcgaaggcgatcccgattactcgaaccaaggcggactgtgctgccgcggcacgagcgcgctgctgcacgtcaaccaccccgcccgcatcaaccacgcgttgaagcgcgtgggtgccaagggcgagggcaagtgggagaagatcccgtacgaccaggcgatccaggaggttgccgaccgcctcaaccagatcaaggacgagagcggcgccgaggccgtggcttctgcgggcggcacgacgcgcaccgacgactgggcgcgccgccgcttcctgaaccagttcggcacgccgaacggcttccacaacgcgcttctgtgctggatccccacgttcatggccgagacctgcgtggccggttggtcgccgttcgagacggacctcgccggcgccaagtgcctcatcctctggggcatgaaccccggtgcctccacgctgggcggcatgaacggctacaccgacctgcagaagaacggcctgaagatcgtggtcgtggacccgcgctactccgagacggcttccaaggccgacctgtggctgccgctgcgtcccggctccgacgccgcgctcgcgctggccatgctgcacaccatcatctacgagggcctggtcaactgggagttcgtgggcgagtggtgcgacggcttcgaggagctgcaggagcatgtggccgagtacacgcccgagtgggctgcgcccatcacgtggctcgagcccgaccagatccgtcaggccgcacgcctgtacgccatgaacacgcccggctgcatccagtggggctgcacgtgggaccagatcggccgtgcctccaccaccggcagccacgccatcgccctcatgcgcgccgtctgcggcaacctcgacgtccccggcggcgacggcatgccgggccccgcgctcaactacctcaccgacgaggagatggagctcaacgagtgcctgcccgaggagcagaaggccaagcagatcgggtccaacaagttcaagctgacctcctggcccggctaccagatgatctccgacaacgcgaagcgcacgtggggcaagacgctgcccaccgagtggttctgcgaggcccacggcccgagcgtgttcaaggccatcatcacgggcgacccctaccaggtgcgcgcgctcatcgtgaacgccacgaaccccatcaactcctacggcgacgcgaagatgacgctgcaggcgctcaagcagtgcgagttcctggtggtcgtggactactggatgaccccgacggccctgttcgcggactacgtgttcccggcggccggcgcgctggagcgtcccaccatcgtcacgcactacggcgccaccgactccatcatgggcggccgccgcgccatccagcccaagtacgaccgccacacggacatgacgttctggcgcaagctgggcctggcctgcggccaggatcccgcgaactggccgtgggagaccgaggaagaggcgtacttccacatcctggagcccctgggcctgggcggcgtggagagctacaacgacttcgtcgactactaccgcatgtactatccgccgctgcaccagaacaagttcaaggccaacggcttctggaccccctcgggcaaggtcgagtgcaactccaccatcctgcgcgagctgggctaccccggcatgcccacctacatcggctgcatcgagaacgagatcgacacgccggagatcgcggaggagtacccgatcgtgctcaccacgggcggcggcttcatgccgtaccaccactccgagcacttccagatgcagggcatccgctacctgtatcccgacccgtacttctccatcaacccggagctggccgagaagctgaacatcgcctacggcgactggtgctggatcgagacgcgccgcggccgcatcaagatgcgcgccaacgtggagcccgaggtgcatcccaacgtggtgttcgcgccgcgcggctggtggttccccgagcgcgacggctcggccgacctggacaacccgttcggctgcctcgagtccaacgtcaatgtgctgacctcggtcgatgacgagcactgcgaccccatgggcggctcttgggccaaccgcggcctcatgtgcaaggtgtacaagtgcggcgagtacgacaaggagtacaagaaggaggacacccagttctccatccccggctcctcgcccgagccgggcgtgaccgtcatgccgagcgaccagaagctcgcccgcgagcccatcccgttcgagaagccgcagccggccgaggccgtgcccgagggctacgagtgggtgtggcagagcaacacgctgtaccagaagggcacgaatttccgcctggacgagtcgggctggctcatcaacccgcgcacgaagggctaccacgacgcccacaccggctggcgctacgatgccgccaacgagtgcctcgtggacgacgccaccggcaagatgtacaccatggaccgcgaggagatcgtgttcgcggcgggcgtgcgctgctatcccggccaggccgccccttacgaggtgcccgagaacctgacctggaaccaggagaagggctacgccacgctgggcgacctcccctacgtgtacgacccgaacagcggctggatgctggaccccgacaacggcgccttccacgacgccaactacggctggctctacgacgccgccaccggccatctggtcgacgaagccacgggcaagcattacgacatgtcgtatgcgcccgtcgaagaatagccgccgagtaggaagaaaggatagataaatgactcgttacgtcatggtcatcgaccagcgtcgctgcatcggctgtcactcctgcacggttgcttgtcgtacgtggaacaagcttccccttgacatcgtctacaaccccgtggtcaccgagggcgcccagggcacgtggccgaacgtccacaagtcctggcagccgcttttgtgcatgcactgcgagaaccccgagtgcgttccctgctgcccgtccggcgcgagccagcaggacgaggacggcaccgtgtgggtggaccccaagaagtgcctgtcctgcaaggtgtgcgtgaacgcctgcccgtacggcatgcgcgacgcctcgcacctggaggaccgcatgcaccgctacgtgcgcaagtgcacgttctgccgcgacaagcgccagctggacccctccgcccagccgtactgcgtgctgacctgccatcagaaggcccgtatcttcggcgatctcgacgatccgaacagcgaggtctccaagctcatcggctccgtgaagaccgagcgcctcttcgaggagttcggcaccgagccgcagatctactacattcctgatttgggaggtaaggcataatgaaacatcattattgggaaccgcctatcgccctgtaccttttcctgggcggtctggcgggcggcatcctgttcctggccgccatcttcaacagcttcgtggtccccggctacgccgaggtgttcgcgctgcccgtgctcgtttcgctggtgtgcgtggccatcggctgcgtgttcctggttgtcgacctggggcagccgggcgtgttctggcgcgtgtggaccacgtcgaagtccatcatcaagtggggcgccacgttcctcgtgatcgccgcggtgttcgcgctgctgttcctgctggcgttcatcggcgacgcctggccgatcttcgcgggcctgtccggcctgttgaagcccgctgcggacttcttcctgatcgtggccggcttcttcggcctgtgcatcatgatgtacaccggcatcatgctgtccaccttgaaggcgcatgcgttctgggccaccccggcgctgcccgtgctgttcaccatctcggccatctccacgggctgcgcggccatcgtgctttccatcggcggctggccggcggccatgacgctggagagcctggtcgtgtccgagatcgtgctggagatcctgcacgtggtggacatcgtgctggtcgttgccgagctcatcgtgctgctgaccatggtgctgtccttcgcgggtgccggcaacgagaccgccaaggcggcggcgcgccgctgggtgaagggctcctacgcgggcctgttctgggtcggcatggtgggcctgggcctcgtggtgccgctggtcatgtacatcggcggcgggcactccgccgcggccacgctcgtggcccccatcctggtgctgtgcggcggctgcctgctgcgcttcatggtggtcaacaccgatgaccgcgccgagatcccgggcgagaaccgttactacaaccgccttgccaagaacgacgcggagttcatcaccaagtggacgtacggcgataaccagttctaagacggccgcaaggccgcgagcgcgccggcttcgcgccgcgcgtgcgctgacggggggcccgacttatcggtcgggcccccgcctgcggttttaaccgagtatccagggggtaacatggaagactacgtattcgatgatgtgctggcgggaagcaccgtagcgtgcgctttccccggccttggcacgcgggtggcggcggccgacggcccgctgcgcgcccgcaccctgttcttccccggatgctcgcttatcaactatgcgctgccattggtgaaggcggtctacgacctgttggccggggccgggcgcgtcgagggcatctcgcttctgtgctgcgggaagatactgagcttcgagccggacgggaaggccgtgcgcgcagcgttcgaggaccagctgtgcgagcacgtggccgcggcgggcgtcgagcgcatcgtggccgcctgcccgaactgcgtcgccgcgctgcgcggcgcccttgccgaggacgagcgcacggccggcgtggaagtggtgccgctgccgctcgagctggatgcgctgggctaccgggtagatgcccgagtggcggagcgcctgctggccgaagagctggaggcgggtgcggacttctacgaggcgtgcgccgagggcgcccacccgccgctgcggttcagcgtgcacgactcctgccccgaccgggccacgggcgagttcgccgacggcctgcgggcgctcatgcccgccgagctgacggtggagcccgcgcatgcgcgccggagctcccaatgctgcggctcgctcgtgcgggcggccggccatgcggacaaggcgctcgcgcagtcgcaggcgcgcggggccgaggccgtcgaagccggcggctccgccatcgtggcggcctgcgtgagctgctcgttcctgctctcggtttcgcagtggcgcgtgccggtgttccactatctggagctgctgttcgactggcgcatcgactggcgtgccgccgacgcctacatgaagctgcgcttcctgttcgacgagccggcggcggacggcggcgaggcgcgcccgttcaaggggcttgcctccgaggccggcgacgatggggaggaggcgcgatgacggccgaggtcaaacccacgaactgccactactgcggctactgctgcgcgtttctggccaccgtggaggacgggcgcgtgacggacctcgcgcccgacccgtcgcgctacccttacgacgagcgcatcctggcgggctgccgccgctggcgcatgaacctggacgcattggacggaccggaccgcgtgaactacccgctgcgccgcgcaggcgagcgcggcggcaacgagtgggagcgcgtgagctgggacgaggcgctcgacgacatcgcggcgcgcctgcgggcgctggccgacgagcacggcccggagacgctcgcgagcgccatcggcggcccgcatgcctcgttctggccgctgcaccgcttcatgaacctgttcggcagccccaacaacatgggcatcgggcagatttgctggaacccgcgcatctggatggatgcgctcacgttcggttggaccgtggaggccgacatcgtgccgggggtgacggagtgcctgttcatctggggcacgaacccggcgcagtccgacaactcggcgttctggcggtccatcctggcgttcgcacgctcggatgcgccgctcgtggtcgtcgacccgcggcgcacgcaggcggcggccgtggcggacctctggctgcccgtgcggccgggcaccgactgcacgctggcgctgggacttctgcacgtgatcatcgaggagggcctggcggaccgcgcgttcgtggatgcctggtgccacgggttcgacgagctggccgcgcacgtgcggccctacacgcccgcgcatgtggccgcggtgtgcggcctgccggaggacgacatcgtgcgggcggcgcgcctgttcgggcgggcgggcgccgcggcgctcgtgtcgggccgcggggttgaccaggtgggcgcgaacgtggcgcccacgcaccgcgccatctgctgtttgcgcgccgtgacgggaaacgtggacaagcccggttcgtgcgtgctggccgaggggccggacttcgtgtcggagatggagctggagatgtccgacgcgcttgcgcccgagaggcgcgcgcgctgcctgaacacgcccttcacgccgctgcagtgctacgaaggctacgaccgcgcccgcaagctcaccgagaagctgggccgcacgctgccggagcgctacctgacctccgcgctgccgcacctcgtgctgcgcgccatggaggagggcgagccgtacccggtgcgcgcgctcatcgtgaacgccacgaacccgctgctcacctatgccgacacgcaccgcgtgttcgatgcgctcatgggcctggacttgctggtggtgctggactactatatgacgcccacggccatgatcgccgactacgtgctgccggcggccggtgccatcgagcgccccgtgctgcaggtgcacggcggcgtggcgaacatgggctacggcggccccgccgccgtggagccgtactacgagcgaaggtgcgactacgacgtgttccgcggccttggcctgcgcctgggccaggttgacgcgtggccggaggagacgctggccgacgcgttcgcggcgcagctcgcgcgcgcgggcatggactgggacgcgttctgccagttgggcatctactggcagccgccggcgtacgccaagcacgatctgccgggccccgacggcaagccgcagggcttcgccaccaccacgggcaagatagagctggcgagcgagttcttgccgacgctcggcgggccgcgcctgcccgaaccggccgcgccggcgacgcccctgtgctcgccggggctcgtggaggacgccgagcgcgcgggcggcgcgcacctgccgatgatcaccggctcgcgcaagcagccctacaacgcgtcgatgtacttcaacaacccggccttccgccagaagtcgccgcacccggtggcggaggtgagcgaggccacggccgagcggctgggcctggaaccgggcgaccgcgtggagatcgccaccgacaagggctcggcacgctttatactggagaccgcgcccctgcgcgacgacctggtgaacgtggactacggctggtggcatcccgagtgggagccgggcggccccgacctcggcggcatgtgggagtcgaacgtgaactgcctcacgtcgtgcgagccgggcgagccgctgatcggcacgtggtcgtacaacgccatcgactgcgtcatccggcgcatcgacgagcctttgagctgggaatagacgaattgccgtgcgcggagagcgcacgcgggagacaactggtaagaacgacgagaaggagataagttcctatggccgagaagaagcaagcgctgctgctgttcagcaagcccccggtgccgggcatggtgaagacgcgcctgacgaccgagcacgacggtttcctgagcccggcgcaggcggccgagttcttcaagcgcagcttgtacgacgtgagcgagcttgccatgcacgcgctcatggagctgcagatggagaacgatgcggccgtggcggccgacccgagcgtcgacaaggtcacgtacgacttcttcgtgtccacgacgcccgccgagaacgtggagctgatgaaggagacctacgacgccatcggcccctggcccatggagatccactatatgacggacaagggcgccacgttcgacgaccacttcgactacgcgttcaaggagatcttcgcgcagggctacgagcacatcgtgtccgtgggcggcgacatccccaccatgccgaagtcgcacatcgtgcaggcgttccagtggctcgactacttccagagcatcggcaagcccggcttcgtgcaggcgccgtgccaggaatgcggcacgtcgctcgtgggcttcagccacaacacgccgatggaccaccagggcgtctactacaacctggacggtcgcccggcgctcgacggctacatggagaagctggaggagcgcgacgtgccctccgcgttcctgtcgcccgtggccgacatcgacgagaagaccgacctcgcgcacgccatctcgtgcatgcgcgccatcaagcaggcggccgcgttccagaccgacctgttcgtgccccagcgcgtgctggactgggtggattacatgggcatccaggtgatcaccccgccgaacgacgagcacgatccgcgccagtacatcgaccaggaatagcaggagcgccgccatgggagcgaacgagaacacggcggccgatccggccgcgcagcgcacgccgctgcacaagaccacggcgctctgcccggactgcttggacgagctgccggccgaggtgtacgccgacgccgagggcgtcgtgtggatggagcgcacctgccccgaccacggaaggctggccacgcgcatgtggcccgatgccgagcactaccagtggctgcgctcgctcgcgttcccgatgacggcgccgcagaacacgctgcccgcctcggcgccgtgcccgcacgggtgcggcacgtgcagccgccaccagcggcgcggcacgctgctggagatcgaggtcacgcgcaactgcaacctgcactgccccgtgtgcttcatgagcgccgagacgggcgagggcgaccccacgctggccgagatctccgacatgtacgacgtcattgcgaacgcggtgggcaccgacggcgccgtgcagatcacgggcggcgagcccacgtgccgcaaggacctgcccgagatcatccgcatgggccgcgagaagggcttctggggcatcgaggtgaacacgaacggcctggtcatcgccgcgcgcgacgggtatctggaggagcttgtgtgggcggggctcaccggcgtgtacctgtcgttcgacgggctcacgggcgaggtgtacgagggcacgtgcgggcgtgacatcctggacgtgaagatgcgcgtcatcgagcgctgccgcgaggtgggcatccaggtggtgctgtccgtggccgtggtggcgggcctgaacgacgggcagctgggcgaccttctgcgcttctgcctggacaacgccgacgtggtggcggggctcgccctgcagccggcgttcacgtcgggccgcttcgacgccgagcgcgccctgcccatgagctcgggcgacgtgatcttccagctggccgcgcagtcagacgggctcatcgagccgcgcgacgtgtggccgctcgggtgctcgaacccgctgtgcgacacgggcgtgttcttcgtgaagggcgagcctcccgcgggcgtgccggcgcatccgtccgggttctacccggccacgcgcgccatgacgatggaggagtaccacgcggggtactcgcccgacagcccgcagggctcggtgttcctggacatcctggacaagaagggcgtcgaggtggcgagcgggctctccgtggtcatcatgaactacatggacgcggtgtccatggacacgcagcgcctgcgcgagtgctccatgatggtgacggtgcccgatggacgcgccatcccgttctgctcgtaccatctgaccgattccgccgggcggcgcgtgtacccgccgtggtgcaaggaggagctgcgctgatggccgactaccgaattgtgaacgacccgaaccggtgcgtgaagtgcgggctgtgcatcgcgttctgcccgtgcgaggtgctggaggccgacgaggaggggcatcccttcgcggcgcgcatcgaggactgcgtgggatgcaccacgtgcgctggcaactgcccgcagcgcgcgctctccgtagaggccacgggcgacgcggtgtacgatccctttgccgacgagccgcgggccgagcccatctcgcgcgagctgcgcgagcagtacgcggaatggcagcgcgtgatcatggagaagctgggcctgcgctggcagccggtggccgtgagcctgatcgacaaggacgagccgctgcccgacgtgcccctgccgcccgagaaccagcggttctgccaggccatgatggccgcgcgccgcggtgcgagcatcctcatgccgccgcataggcactcgtgcccggacggcacgtccatcttcggcatgaccggcgtgcccgagaagctggccaccggcgagatatacgtgctgttccacaaggtggtgaacgccgaggccgccgcccggatggtggccgagcgccccacgctgccgccgaagagccgccgcgccacctacgtggcacccctggcgaagacggtgcgcaagcccgaggtggtggtggtgacgggcacgcccgagcagatgatgtggctgtgcatgtccatgagctactactcgggccaccgcttcgacttccacgcgagcgggttcaactccatgtgcgtggaggcggtgctgtaccccctgacggagcaggagcccaacatcacgttcggctgctacggctgccgtgcggccaccgacgtggccgaggacatgatgttcatgggcctgcccgtggacaagctgcccatcgtggcgcagggcctgacggagctggcgaagaaggccatcccggattcgcgcatgaagatctacgttccgcctatcatgtagggaaggagctcccatgacgaacgagctgttcaccatacgcgatgcgcggccggacgacaaggccgtgctcgacgggtacgccaacctggagggcatggacgccatcccctccatcgagggcgtgcgcgtggccgtgaacgaggacgacgaggtggtggggttcgtccgcatcgcgctcgccgacgacggcacggcgttcgtgaaccccgtcatcacccacgagacgtggcgcgggttcggtgtgggccgcgcgctcatggaggaggccctcgagcgccacggcgagctgcgcctcgtgtcgcgcggcgggagcctgccgttctacgaggccctgggctacgagcgtatcggctgggacctcatcgagatgtccctcgtggacgactgcgaccactgcgagatgcgcgaggaatgcggcccggtgcccgtgcggaaggtgcgggaagggtaggccctccctgcgcggcggcccttcccgacggggccgtgttccgggcttcgggcgcagcggcgccggttcccgaaaagcaaacggcgctcacgtcggtgggcgccgtttacgttagtgcagcaggggcggggcgttgctaatgcgagcacaggggagcgtcggggaggtcgatgcccagggcgccggcggcgaggccgcggagctcttcgagggtgagctcgtagcaggccagggcgtcgatccagcggcgcaggcagcggcggcccttgtcggtgagcgagaacaggcgcttggccgagccctcctccggcgtgtcccatacggaggtgacgagctcggcctcctccatgcgcttgagggcgcggtagatgccggtggcgtcgggcttcttgccgccgaacatgggggactccgccgcctgctgcacgatgacgtagccgtgcaggggcttgtcggagcaggcgagcagcgtgaggatggtgggctgagacaggcggttgagcgacttgccgagctcggcgcactccttcatatcctcgtcggacttgggatggcagctgctccacatgggcgggacctctttctcgcgagaatggacttcgcccctgtgctccggcatcggctgcgcggagggtggacgcgtctccttaggtagaattgcaaacactatcatctcataactagttgcaatatgccaatattttcttggcgttttggcggggagagggcgaacggcgctcaatctcctcgtgcggaggcggggcggctgggagtgcgagcggcgccccgatcagccgtgaggaagcgggcggcggagcggtcggggcgctcgcgctcgcggccgccccgaccgccaaacggttgccccttgacggctgtcgggtgctcgacataatcattgacctgcgcaaactaaaaaacctcgcaccgttcgccgctttgatcgcaccgttagggagaccggtaggccagtcgccaagaacacgttgcccagctaccgagttcatccttgggaggggatgccgcctttctatcatggatgcatggaccggggcgaccgcggtagcggtgcgccgaggcgcgagagcgacaagggaggcgattgcatgcacgaggacgttcacagccatgcgcgcaggctcgacaatgcagaggcccgcgtcgtggagcgctctgttttcggtaagggtcccacccgtcgagccaaggcggctgccttcgagcgcaagccggttctgggcacgaagcgggaccaatcggttatcgatgctttcttcgccgcgcaggacaccagcccttcgcccgatgcggggaaggagggcggcctcccggcccccgacgacctcgaggacccgccctcgacctgaaggggctttgcagcaccgccccttcaggcatgcgagccgggcagaaaaggcgctagctgaacagggcgagcttcttcttgccgaggtcgatcttctcggcaagctcctcgagcgtgccgtagtacaggcaacccgcctggcagtgctgcacgcaggtcggcgccttgccggccgcctgccggcgtgcgcagcggtcgcagcggtcggtggggacgggcacgaactcgtactgccagcggcgctcgtccagctggtcggggcctatctgggtcagcttgatgccgaaccggtcgggcgccaggccgtgctcctgctggcaggctatctcgcaggtgtggcaccccgtgcagaactcgtagtctactgcaagcatttgcctcatgccgatcactcctctaccttgccgatggtgcacagctgcgacttgtacgacgctcccaagcccaccttgccgggacgcatggggacgagcttgttgatattggactccatcacgccgaacagcgtgccgtcctcgggcccgcgctcggggaaccaccaggcgtggtcggccgagacggtgtccttgcggatgcgggtggtgagctccgccttctggcggcacgagccgaagttgttctcgatggtcacccagtcgccgtcggctatgccgtaggcggccgccgtctcggggtggatgagcacggttgggtcgggatgcaggcggcgcatggacgggctctggcggtgctccgaatggaagaagccccaaggacgtgcgccggtggtgagcacgagcgggtacttctcggcgagctcgggcgccgacaccgggctctcgggcggctcctcgtaatcggctaggggcgacaggccgaagtgcagcatctccgggcagtagaagttgtagcggccggtggacgtggcgaagcccaccgtgccgtcgcggcgcagcaaccctttctcgtgcttgttgtactcgaactcggggtaggcccaggtgcgctcgcgcagcgtctcgtaggtatagccggtcttgcgcagcaggtagtcgtagaagccctgctcgtcatcccacttcttgtgagcctcgtcggtgaagcggctgcccgtctcgtagatgatgcgctggtccgacttgcactcgcccaagggctccacggcctgcgcgatggcgccgagcgcgtagggctggtgcccggtgatgccgatgcgctccgcgaagcacgcggcgggcagcagcacgtcggcgcaggcgagcgccgtgggggtgaggaacaggtccaccaccacgttgaactccatcttctgcagcgcgggcaggatgcgctggggctgggcgcccatgcaggcgatggcgttgttctgcatcatgaacatggccttgatggggtagggctcgcctgtctccatggcctcgagcagcatgtcggggctgatggcggccatggccttgagcgcagggtacttgaagttcatggtgcgtccctggtccttgaccggctctgagcacccttcccataccttctcgcgcggcatccatgtcacgctcatatcccatacggggttcgcggccaccatggtgccgggcttctcgaagttgccggtgagcgccatgaggtcgaagcacgccatgccggtgatgaagccctcggaggtgtggtccatcgccacgccccattgcaggcagcacgacttcgcgcggccgatcttgcgggccgcctccacgatgaggtcctcgggcacgccgcaggtctcggcggcgaaggcgggcgtgtacttcttcacgtgctcggcgaactcgtcgaagccgtagcaccagcagctcacgaactccttgtcttccaggccctcctcgatgatgacgttgcagagcgcgagcgcgagcgccgcgtcggtgccggggcgcacctggaaccacacgtcggccttgccggccacccaggtgagcttcgggtccatgaccatgagcttgctgccgcgcttcatgctctccacgatccagtggccgagcgtgccgtcggagttggccaccaccgggttgttgccccatacgaggatgtactcgggcgcctcccagcgagggtcgtcgtagcggtcggggaagaactgcgcgtagtcgcacacgaacagcccgcccgccttgagcgcggttgagaagatgcgcggcgcgtaacacgcctggcccgacaggaacccggtgccgtagttgggcgtgcccaggtactgggccatgagcggcccgtagccgttgatgtcgcggccggtgccctgcgtgacccagatggcctcgttgccgtactgctcgatgacggccttcatctcccgctcgatgatgtcgtaggcctcgtcccacgttatgcgttcgaaggcgttcttgccgcggtcctccttggcgcgcttcatggggtatttcaggcggtcctcatggtagagcatctccttgaacgccaggcaccgcgggcagaggcgcccctggttgtaggggttctccgggtcgccctctatcttctccagcaccccgtccctcacgtacatgagcacgccgcagttgtcgtggcatcccgggcccgaccgcgcgttggagcggatgaccgtgcagccgtcctcctcccacgtccacttgcgtccgctcgggtcgtcctgcgtgggcggcgtcggcacgccctgggcggggttcccgcctgttaacatctctgacatggctcctcctcacctggttcgtctgagcgtcgagggccgcggccgtgcggcgcggccctcgacgcggggtttacgcttcggcccggtacagctcgatcgggcccatgttgcggtcctcgtccacggtcgaggcctccagcacgcgcgtgaggtagccctcggcctccgcgtacacgcgccagccggctgcgcccacctggtggaaccagaagtcgccgaactcgtcggcctcggtcgccagcacctcgcccgtggccaggttctcggccgtcaccctggcgccggggaccacctcgtcggcctccgggtccaccacgacgccggccaggaagcgcctcggcaggttgaggtagaacacccggggcctgtccgcccccgcgcgcccgggaacgagcgcctcggaagccgcgatctcggcggcgaggtcctcctcgtcgccgaagcgcagggctccgtgcgggcacacgtccacgcagtgcggcgcctcgccggcgtccacgaggtgggcgcagccggtgcacttctggggtatggccagctcttcgttccagaagatcgcgccgtaggggcacgcctccacgagctcgcgcctcccggccgccttctccgggtccacgatcaccagcccgtcctcgcggcggtagaccgcctcgggcgccgcggccatgcagggcgcgttctcgcagtgctggcagcggtgcatgacgtaggacaccctcaccttcggcacctggccgcgcacgcgctcctcgatgcggcaccagaagtggcccgtgtcgggctggggcctcgaccaggggctccagtcgttgtccacgtgctcgtccttgcaggctatctggcagttgcggcagccgttgcacttggccgcgtcgaacacgaacaccttgcccatatccctactccccttccttgccgtcgaccacgcgggcggttgccaccaggccgcactcgggctcgtagtcgcgcccgaacgcctccgggtactgctcggccagcgcgaacacgtcgaccttctcgatgttcaccaggaaaccgctcgtcacctcgccgtgcgcgttcttggacgtggtggccgtgggggcgatgaggttgttcgccccgccgcggtccaggccgccctcgcccagcacgatggtgtcgcagcgtgcgccgtggtcctggtacacggccccgggcatgatacgctccgtgacgatgacgccgccgagcaccgcaccgcgctcgttgtacaccttcacgacgtcgcccgtcgaaagtcccagcttgcccgcgtccacggggttcacccataccggctcgtacttgtagccgtcggggcccgtcaccttgcaggtctcgatctcgcggaaccaggtgacgtcgtcatgctgcgcgtgcacgcggaagtgcgggtggttcgagacgagcaggaaggggtacttccgcccgcgctccaggtactggcgctcctggtggccggcgccctcgtcgatccagtgcgggatgggcccgcgctcgcggtcgtcggggaagtagtgcgagagcgtggttgagtagtactccagcttgcccgacggcgtgcgcagcgggtgcccctcggggtcgtcgtggaactggcggatgccggcggggatgtccttccagtcctcgcgcgtggggaaggcgtagtactgcctctccttgaactcctcgaacgtgaggtcctcgggaacaccgctcgtctcgaagcctaccttgatccactcgtcgtcggtcttgccgcccaggtacttgtccagcatgccctcgtagacgccgccgtactgctcgagcgcgcgggcaacctcggcgacgacctccttgtcggacttcgactcgccgatgggctggatggcttggcgctcgtagaacacgacgttccactggccggaatcgcagtcggtgccgatgtcctccgtctcgaacttcgtgttggagggcaggatgatatcggcgaacagggtgtcgttctccatccagggatgctgcacgaccacgcactcgatggactcgtggcgcagggcgtcctgcatcttgaagccgccgttccagcaggtctcccagcagggggagtccgaccacaccatatggatgcggctgccgccctcgggcgggaacgtgtagggcccgtcgaactggtcctcgcgcgggaagccggccgcgatatgcccgtaccactgcacgggcgggttcatgatggcctcgggaatcatggtcttggggatgaagctggccttcgtgccggtcacgtagccgcggtaggcggcgccgaggctgggtatgtgcaccgagggcggcagcggatcgagcgtggggatgccgaacagcgtccactccatgaacttgaactggttcgcgccgggcttgccgacgccctgcatgccgagcagcgccacctcgaggcgcgcgggctcgtgcgcgaagcaggagcggataaacgatccgccgttgcagtgcgcgatggacacggcgtgcgcggcccagtagcgggcgagggccttgatggtgtaggagggcacgccgcaaatgcgctcggcccacttcggggtcttcggcacgccgtcctcgccgcccagcacgtagtgcctgaagttctcgaagcccacggcatgcgtgtcgaggtaggcctggtcgtaggtgccctccttgatccacgtgtaggcgatggccagctgcagcgcggcgtcggtgttgggcagcacgggaatccacttgtcggcgtgcacggcgttggtgtagttcacgtcgggcgagatgtgtatctgcttgatgccgagctcggtgaaccagtagcacaggcggctcgccatgtagccgccccagccgagtggcgtggtctcggggtcgcagccccagaagagcaccgcgtcgccgtgctccgagatatccttgatgacgttgttctgctggttctgctggccgagcgggtccatgccccagacgtgcttggcgccccagtaccagccctcccagctgtcgggctggcgggcctgcagggtgaagccgccgcagaggtcgaggagctgggtgatgcagccgtgcgctgcgtggacgaccttcgtctcgccgtggccgtcgatctcgcacaggatggcctcggggctgtactcgtcgtgcatgcgcttgatctcgccagccacgatctgcgcggcctcgtcccagctgatgcgctcgtaaccgctcgtgccgcgcgtctcggggtgccgctcgccgttcgggtcccagtccacgcgcttcatcggatagggaatgcggttcttcgagtacacgcgcttcttgtagcacagcgacagcggcgagatgagcgtcttgaagcccggctcgaaggtcttgccgcgcgcctcgagcttccaggcgttcagctcctcgggcgtctggtgctcgtcgaagtggaacgggcggatgcgcaggatcttgtcctgctcctcgtcgatgtcgaccgtgcacgcgttcgcgccgagcccgaagctgtcgaagcccaggcccttcacgatgggcgtgcccttcacgttggtggtcatgcgttgctctcctctcctcttggcttcccttcgaaaccttcccgctctccccttacgcggtgggcgcgggcggcttgggcacgctcggcgccttcggcgccccgggcacgccggggaccggcggcggggtgggagcgcccgggggcgtggggatcccgggcatcggcgccgccttggcgccgcagctcgggcaggcgtcggccttcgggtcgacctcggcgccgcacttggggcacttcacgggtccgttgtcgacggtgggtggtctgaagcacatggttcgtcctctctgcgtgcagggccgcgtggtcgtggtgcggcggttgccggatgccccctgcaaagcgaccggccagtgtggagcggcgatcgaggcgggcggttgtgcgcttagcgcgggaacgctaaaatgcccgcatgcgggaagggcaatcgcctcctcccgtatgcgggcagtattcttcgttgggggaaaattatctaccgctgctaaggttgaattgcgggaataggccggaacattatcatactctgatgttgaggagcggggatgacaccttattcacctgcggaaacagcttcaaccgagacaaggacgcccgatgatctgcgcctgacctacgtccttgccaccatcggcttcgcgttcctcatcgggtgggagctgtcggccaccttcagtccctccctcgccctcctcgggttctgcgatgtgcgggaggccacggccctgcgcatcgtgtcggtgctgacgctggcggccacgttcgcgttctgcgcatggaaggccgattgggctttcgagaaccgcaaccgcctgtttgccatcggctcgctgctcgcgctcgcggcggtggcgaacgcgttcgtgaacacggcgttcgcgggcatcccgcttgccgtctcggtggtctcctgggccctgttcggcgttgcccagggaagcatcatgatgtactggtgcgtgttcttcagcctgattcccacccggcgtaccgcggtggccatcgggctgggctccatcgggggcacgctgctgttcgtctttgccaacgcctcggacacccagtggctcaacctgtcggagatcacgctgttcatcgtggggtcggtggggttggcggcctacctttccacgcgcatccccgccgagcgcatcctgcccgtgggggcatttcgccgcacgaaggtgctgacggtgccggccgcgctgtcggttgccagccagggggcggtgtacgggttcatggccatcgagctgtgctccatgggccaggaggtggccgtcatcgggggcgcgagcgggctggtgggcacgctggtggcgcttctgtgggcggtgctcgggtccaaggtggacgtggacatggcggtcgtccagcgcatctcgctgcccgtcctcatggccggcatgctgctgtttccgttcttcgacgggccggggcgggtggtgtgcggcggcatgatcatcgccgcgctcgcgcattcgaccatcgtgggatggtgcaccacgagcatcgacaactacgagttccggctgcatccggtggatcggttcgccctgcgccagacccccagctacctgggtttcctggccgggtcggcggtggcctacctcgcggtgttcgcgtatccgcttgcggggacgcaactcgacctgctgatggtggcgttcgccttggtgctggtcgtggcgttctgcgtgtacgggggcgacgacgcccaggtgcggaagcggttgaacgagctgctggcgcctcctgccgcggaacgggctctcgaagccgcaggggatgccggtgccgaccagtcggggcctggcttcttcaggaaacgctgcgagctcgtggcccagcgctacggccttacgccgcgcgaggaggaggtgttcctgctgctggccaaggggcgcaacgccgagcacatcgccgagcagctggtggtgagcccggccacggccaagtcccacatctaccacatctaccgcaagcttgatatcagctcgcagcagcatctcatgaacatcgtggagggctacgacggggagtgaggctcgggtgcgcgcccggccgtctcccgcagagcggtaccggcctgcctgcaggaagtccttgccctaggggggtcgccgcttcccggccggcacgaagaaggaccccggaaccgtagcggttccggggtccttgcacgcggggtgcttgcgaaagcgaggggcgccttacaagcccatgacccccacgatgaacggcatccaggcggccatgatgagcacgagggccaccgagggaacgatgccggtcttgaacatgtcgccgaaggtgtagtagccctcgccgtaagtcagcatgaccgtggggttcacgggcatgaggtagttgccggcaactaccacggccagcgcgatggtgggcacggccggcgacacgccgaagccggcgcacagcgtgatcatgatgggcaggaagatgcccaggatggccacgccgatggggcacacggtgtgcagcaggtagatgagcgcgagcaggagcgcgaacgccgcgaagaagcccaggtccatgacgccgctgccggagatagcgccggcgaggaacgccgcgccgcccgtggcctcaaccacgccgcccatggacatgatggtgccgcacatgatgacgatgccccacggcacggagccctggaactccttccaggtgagcaggtccatgcccggcaggaacatgacggtcaggccgatgagggcgaccaccgtggcgttgaggacgggaacccagttgcccacgatccacagcaccagcatggcgccgatcacgaggatggccttcacctcgtaggcctcgatcttcttggcgccggcggcctggtcgcggatgccctgcaggcaggagtcggcgatgggctcgggcttgaggatggccgtgatgaagaaccagcagatgggcgtcatgatgatgacgacgggcagggcgacgagcacccagtcgaggaacgagatggaagtgccggtggcctgctgcaaaatgttcatggccacgacgttgaacgagctgccggcaggcgtggccatgccgccggtgacggcggcgatggggatgccgatcatgaggcagcggcccaggttcgactgcagcggcttggcatcggcggccttgaggatggtgagcgcgaagcccaggaacagcaccgtgcagggcacgtcggacatgaccgtggacacgagcgtggtggcgcacatgaagcccagcacgagcttgcgcgagttggcgccggtccagcctatgagcgcgttgatgaggcgcacgccccagttcgtcttgagcatgatgacgggcatcgagaacaccgcgatgatgaagagcagcgcggggctggcgaagccgccgatggccttgcccaggttgtcgaccacgccgagcaccgggcacagcacgacgacgagcagggcggtggcgcccaggggcagggccgaggtgacccacagcgccacgagcgcgcccaggatgccgagcgcggtggctccttggtgcgagagggcctcggagcccggaaccaggaagccgatggcgaggcagacaatcgccaatcctatcccgatcaggcgttttgccattggaacgttggtgttttccatgcgttgtacctccttgttgagagagtgcggtgcatttttccgccggtgcggagccgggttcccagtccggtgcagagctctcgatcgccgcggccccctgccgcgtgccccgcattatagagaccgccttcgacaaggggcaaatacgtatgttgcaagaagcggtgcctgctgccgtagggctgcaatgcgagaatcgaaaccctttgcttcaacatctgcatactgtggagcgcccaccctcccgacggcgggcaggaggcggcgcttcagtatctgggtatgagggctgcggggcagaaacgcagatttcaacatcggctgcggaagattttccaatccatccgggcgatgctggacgaaggaggacaagactgcaatcgatagggaggcggcatggactacgaggcgcgacaaggggaggcgggcgcggcacccgctgcggcggcgcggggcgcgaggccgaagaagctgttctatggctatatcttgatccccgtgctggggttcatgtacttctgctcttcgggcatcgttttgcccacggccaccatcgtcaacccgctcatgctccaagatgcgtcgcttggcatgaacgccaccatgctgggaacgggtttttcgctgttcgtgctggtgcaggggctctcggcaccgctcgtgggggcgctcatcgcgaagaagggcgcccggttcagcatggcgctcggtgcagcggtcatgctgctggccatgctcgcgctgatattcctcgtgtcctcgccggtggcgtacttcctggtgttcggcatcgtgacgagcgccgccaccatgatggtgggccagctggccgtgcagagcacgatcggcgactggttcgtggcgcgccgcggcgtcgccatgaccgccatgatggttctgggagcgagcgcgtcgttcgtggggccgcccgtcgtgaacgccatcgtgggcgcaacgggcggtacgtggcgcagcggctggtacctgctggtgggcctgagcgcggcgctcatccccgtggcgcttctgcttgtgaagaacaagcctgccgacctggggcagcatcccgacggcgtcgccgacccgagtgtgctcggcggtagcggcaagggcttcaaggtgtacaagaacaccgacgccgtgccgttcaagcgcgtggcgaggacaccggccttctggctcatctcgctggcggccacgggcgggttcgcgtcgtatacgctggccacctcgcaaagcgccctgcacttctcctcgctcggcttcgacagcgggcttgtggtggcgggcgtggccgtcatgggcggtgtcagcctgctgggcaagctccttctgggcatggtgtccgaccgcatcgagcccatcaggctcatcgtggcgtccacggtgatcttggtcgtgggcatcctggccggcgcggcggcgcagaacgaggcgatgctcttcgcgttctacgtatgcgtgggcttcgggttcggcggcgtcaatgccgtgtttcccacggccatggccaactacttcggggcctcgtcgttctccaagaacctgggcacgggcatcatgatcaccacggtggtggcctctgcgctgcccattgcgagcggagccgtgttcgatgcgacggggacctgcacgatcgcgttctacctcacggcgggcatcgtcgccgcgtgcgcggcgtgcgggctcttcgtgcggattccgcgctgcgatacggagacggaggcggcggtggaagcggttgcgcagtaagggaccccgcgcatccccggtcatggccgtgcgagggcgggagcgccgacatgctggcgggagccgcgcacagcgccgttcgatcgatcaggcgtcggcgggggcatccgccgagcggaaccgctcggcgtgctcccgtagaagctcggcaaagtactcgaggtcggggcgtccggggtcgctgtccatgagcgcgaaggcgtccacgtagcgcttcttatccgcgaagggaaggatgaccacatgctgcttgagcatgtcggacatgaggggcttgtacttccggtccaccttggtgagcaggtggatgccgtcgcctgggtcggtggcgtagaattccaacgggttgtcggtgggaacgagcgtgatgttgggatagaagcccacctcgcggcacagcgcgatgaagtcctcgcggaaccgctcgctgtagcggtttgcctgcaggatgaagcgggattgcgcaaggtcggcaagcgagagctgccccttggccgccagcggcgaggtgcgcgagacgccggccacgagctcgccgtggaactcgggaatccagatggcctccaccgagtcggacacatggagctccgtgggcgggttctcggagatgatggtctcgaaggcgacgtccaccttgccggcatccaccatctgctgcccgcccagcccggagttgtccatgttgacgaactccacgcgcagcccggcgaagcgctccttggcgcgggcgacgacctcgttgatgcccacgtagagcgcgttggtgtgcagcaggtcgaggatgaggatgcgatcgctgccgcccgcaggaagcgcgcgcagctcggcgagcatgttcgcctggtcgccgatgatcttgcccgcatgcttgagcaccacctcgccggctgccgtgaggctcaaaggacgggtgtcgtagaagagccggcatcccaggtcgttggagagggcgttcatgtgccggctcagcgagggctgcgacatgttcaggtcgcgggcggccgacacgaagctcttgtgggcggcgagcgccatgaattcccggtacacctcgatgtccatgaaagacccaccgtcctcgcgtcgactcggtttatgcagaatgtgaaaagtaggataccagaagatgaatgggcatgcattcgggcatgggaagggctgctgcaacatacgtatttgggccatgccggcgcggcttcctataatggcggcggccggcagggactaagcgcgccccatccggtttccgtccggtggggccgcctcgcaccgacccccccttcccagcaggcagaccgccgattccttcgaacgataggagcaacccatggacttcaagaagaccgaggagcaggagcttctgctcgacagcctgaaaaccgtcatggagcggggcaacttcgaggactacttcaaggagtgcgaccgcaaccacgaatacccccagaaggccgtggacgccctcgtggaagccggctttaccaccctcggcatccccgaggagttcggcggcacgcccaccgacacgctcacccaggtcatggtggccgaggaagcgcacgcgctgggctacccgtcgctgtgctggatcaacttcgccaccgaggttgacgacatcctcacgttcggcagcaaggagcagcaggagaagatcttgggatacgcgctggagggcaggaagcccttcacgctcggcttcaccgagccgcaggcgggctctgacagcgccgccatggccaccacggccacgaagcgcgacggcaaggtgtacatcaacggcaacaagacgttcaacacgagcgccgaccgcgcaccctacatgctgtgcgtgtgccgcagcggcgtgaacgagagcccctacaaggacttcagcatgtacctgttcccgatggaccgcccgggcgtggccatcgagaagctcgacaagataggcaacaacatgtgcggcacctacgaggtgcacctcgacgacgtggagtgcgaggagtccgacctggtgggagaggaatgcaagggcttctaccagctcatgaagaacttcgaggtggagcggctgaccatctgcgccgccaacgtgggcatggcccgctgcgcgtacgacgaggccctgcgctacgccgcccagcgcatgcagttcggcaagatcatcgggagcttccagctggtccaggagaagctcgtgggcatgaggataaagatcgagaacatgcagaacctgctgtacaagaccgcgtggaagaaggacaacggcgagtccatcatgatcgactcgtcgctcgtgaagcgctacaccggccaggccgccttcgaggtcatcgacgatgccatgcagatcatgggcggcatcggctacacgcacgactgccgcatctcgcgtttgtggcgcgaccagcgcgtctaccgcatcatggcgggcaccgaggagatcatggtgcacacggccggccgcgcgctcatcaaggaagcgcagtaggaacgcccatcgacgaggagggattcgcgaaccatgaacatcgtggcatgctacaagatcgtccccgatgcccaggacatcgaggtcggcgccgacggggccctgcgcctcgaccgcgcacagtgggtgctcggcgagtacgacctggcggccatcgaggcggcggcgcagctggccgccgccaccgacgggagcgccgtgctgctctccgccgggggcgagaagctgaacgacacgaagctcgtgaaggccgccctgtcgcgcggggccgacgagctgtaccgcgtggtggacccggccctcgagggggccgatgcgttccagacggcctcggtgctggccgcggcgctgcgcaagatcgatttcgacctcgtggtctgcggcgagggctcggcagaccgatactcccagcaggtgggcctgctcgtaggcgcgctgctgggcctgcccgtggtgaacgcaacgggcagcgtgcgcgccgagggcgacgcgcttttggtggagcgcgtgctggagaacgaggtggaggtgctcgagatcgcgccgccggccgtggtgtccatgacctccgatgccgtgcttccgcgtatcccgcagctcaaggacatcctcgccgcgggcaagaagcccgtgaccacgtggagcctcgacgaggtgggcggcattcccgaaagcccggttgaaaccgtttccgtgaaggcgcccgcgagcatcgcgcgcaagggaatcgttctcgaaggggcgacggacgagaatatcggcgagctggtgtccggcatccgggcatcgcgataaggcaggtggagagcatgagtgctttgagcaaggtatgggtggtgagcgaggctcccgagcgcttcgcaaagcttggtgccgtgggccgtcggctgggggagcgggtcgaggccgtggccgtgggcgagggcgcggcgcaggcggccgcaagctgcggggccgaggccgtccatacggtcgcggttcccgagggaggcctggtggaggactgcgcggcggcgattgccggcgcggtgggggagcacgctccccgcgccgtgctgttcgccgcgggcaagcgcacgcggctcatggcggcgcgcgttgccgcggagctgggcacgcgggtgctgaacgacgtggggcgcatctgggtggacgacgacggcgccctgctggccgagcacatggtgtacggcggcaaggcgtttgccgtcgagcgggtgcgggagggctgcgcggtggccctgctcactgagggcctgctggtttccgagccggccgtcgaaggcgcagctcgggaagcggcggtttccgagctgccggccgcgtccgccgcggcgtcggcgaggctcgtcgagcgcaggccgcgcacggtggagtccgtgaacctcgcggccgcccggcgcgtggtgagcgtggggcgcggcgtggctgcgcaggaggaccttgcgctcgtggacgagctggccgctgcgctcgaggccgaggtgggctgcacgcgccccgtggccgaggggtcgggctggatggcgcgcgaacgctacatcggcgtgtcgggcgccctgctcaagcccgacctgttcgtggccgtgggcctgtcgggccagatccagcatatggtgggcgccaacagcgccaagaccatcgtggccgtcaacaaggacaagaacgccccggtgttcaagcagtgcgactacggtatcgtggccgacctgtacgaggtgctgcccaagctctcggccgcactcggggcgtagggcgccgcgccgcggcaaaccgtgccgggcggcagcgagccgcccggccattccaaccgattgcaaggaggagcaaaccatggaccaggagtttttcgcgggtttggccaagaacgtgagcgacgggcccacccccttcgtcaacatggcccagctgcaggcggaggccgtggaggagcgccacgtgaggctgcgcctccccgtggccgaacgccacttgaaccacgtgggcatcgcctacgccggcagcgagttcgtgctggccgagatagcaggcggcacgctgttcatggccacctacggcaccgacgagttcgtgcccatcttgaagggggtggagctcaagttcctgaagcccggcacgaaggacctcgtggtggacctgtcgctcaccgagaaggaggccgagcggaagatcgcccccgtgcgcgagcgcggccgcggcgactacttcctggagataccggtgttcgacgtggacggcgagcaggttgcgcagatggacttcaactactacgcgcttcccgctaagaaataacctgcgaccgcatgggccatgcgcgcccgcgggcgcgccgagcaaggaggagacacgagtatgaagcgctatgatgcgatcgtgataggggcgggcatcggcggccttgcggccgcgctgctgctcgccgagagcggcaggagcgttgtgctcttggagaagcgcaaccagccgggcgggcgcataggctcgtcgaggcgcgatggcttcacggtggatttcggcgtccacctgatctcgcgcggcgagaagggcccgctcgtccagcttctggagcgctgcggtgttgagcacggcatcgagttcaccaaggtacgtcccatccagaccacgggcggggagagcttcaagttcccgcacgacctcaaggggcgcgtgcccgacgccgacttcgaggccgtcgtcaagatggtcaccgatgtcaagggcatgagcgacgaggagacgcatgcgctcgacgggcagacgctcgaggagttcctgagcacctataccaccgacccgttcgtgcatgcctgcgtgagccaggtgggcttcatctactgctgcatccccgagtaccgcctgtcggccggcgagttcgcccgctgcctcaagtgggaggccgaggcgcgctcttcgggatacccgacaggcgggtgcgtgtccatcatggaagcgtatctggcgggactcgggcgctatggcgtggacgtgcgcttcggcgtgccggtggacaaggtgctggtggaggacggccgggccgtgggcgtggtggcgggcggcgaggagctccgcagcgacctcgtggtgtcgaatgcgggcatcaaggagacggtgcgcgacctcgtgggcgagggcgccttcgacgccgagtacgtgcgctacgtggacggcctggagatatcgttcgtgtcgatcatcgcgcgcttcgcgctcgacacggtcatcagccccgagatcaagatgctctcgggcttctcgtcggtgcccgtgagggagtacaacgacaagctcatgcggggcgagatccccgaggagctgaactcgttcatcgtggtgccctcgagcttcgacccgtcggtggcgcccgcgggcaagcagctcgtgatgatgaccacggccgtccccgccggcatcaaggacgagtactgcccggccattttagacgcgctcatcaaggtggccgaaagccacttcccgggattgcaggagcacgcgctgttcgtggagcgggtgtacccctccgacgccgcgcgcatcatgggcgaggacggcgcgggcatcggcatcgcccagcaggcagggcaggccggcgtcgacaggcctcccatcaagacgcccctcgaagggctctacatcgtgggtgccgaggcggggggctcgggcgtgggcacggagcttgccgtgaacagcgccatcgagttcttcgacacctacgtggcgtaagggaaatcgtccgtccaggattcgcaaaggagatggttccatggcaaagcatgccgacataccggagttcgggaacctgcagggcgtgaaggtggtggtgtcggccgtctcgacggccggccccttcgccggggagctgttcgccgagaacggcgccgacgtcatctggctcgagccgccccgcggtatcgacccctaccgttggacgcaggacggctggggcgtgcagaacgagcgccggaacatgcgcaacctcatgctcgacgtcgtctcgccggagggtcatgacgtgttcctgaagctcgtcgagaccgccgacatcttcatcgaggcttcgcgcggcgggcagtgggagaagtggggctataccgacgagcttctgtgggagcataacccgaagctggtcatcggccacatgtcgggctacggcctcacgggcgaccccgcctacgtgagccttcccggctacgacttcaccgtgaacgcgttctcgggcctcatgtacctgaacgggtacaaggacggggcgccctacatgatccagaagttcgtgaccgactactacgcgggcctgttcgcctacggctcggcgctcgcggcctacgtgggggcgttgcgcacgggcaggggcgagagcttcgatttggcccagtacgaggcggccgtgcgctgccaggcggggctgttctgcaagtggttcgacaagcaggtgcaggaggagcgcggcgccggcgccccgcgcgacaacatctccgcgggcgcgggctactacgagtgcgccgacggcgagggcgtgtacctgttcacggccggccagtccaccacgaggaaggccgtcgagttcttcgggctcgagtacggcagcgacctcttccccgagggcataccgtcggtgggcatcgaatcgccgggcgcgcccgtgttcgacggcgctatcgagaagtactgctcggagcacacggccgccgagttcgccgaggccatggccggcatcggcataccgtgctccgtggtcatgaactacgagatgatggagaaccacccccattacctggcccgcggcacgtggaccgagtgggacacggtggacggccgcacggtgaagggcgtggcgtcggtgccgcgcttcaagaacaacccgtcgcagatctggcgcggctgcccctcgcagggcatggacaacgacgacgtgctggcggaaatcggcttcgacaagggggagattgcggcgttctacgagaagggcatcctgcgcaagaccgattacgtgggcgggctgtgatggcgtcgctcgtctcgctgctggacgaatcggcgcgggcctatcccgatcagacggccctgtgcttccgtgaccgggagttcacgtaccgggagatgcgccggcgcgtcgatgcgcttgccggcgcccttgcggggctcggggtgggcaaagggggcttcgccgccgtcgtctcggccaactcgaacgtgacggtggaggtgctgttcgcctgcgcccgtttgggggcggtgtgcgagcgctacaacgtgaggctctctccacgggtcatcgcccagctgcttgcccggtccgaggcgcgcgtggcgttcgtctcggccgccctgcgcccggctttggccgaggcgctggttgggatcggccggacgctcatgatcgtggacgtggacggcggcgcgggcgcggagtgcggcggcgtgccgcgctacgaggagttgctcgcttctgccgatccggtgccgagcacaggcgacgtggacgacggcgaccccgccatgctgctgtacacgagcggcacgacggggctgccgcgcggcgtgctgctttcgcatggcgcgcttctaaggcgtaccgccatcgatatcgagggcatgcgcttctcgcacgacgacatcctgctgtgcgagctgccgttgttccacgtcacgttcgtctcgacgctcgccacgctggcgctgggcgcgcgcctcgtgatagccgattcgcacaagccggccgacatcgccgcggacatcgtgcgcacgggcgccacgcgcacggcgctcgtgccgtgcctcatgcgcgggctcgccgactacgtggcgcgggagggcatcgagctggacacgctcgagctcgtcatctacgggggcgagccggtggagccggagcttctggagcactgccgccgccttctgccctgcggttttctccaaggctacggcatgacggaaacgacggctgccataaccatgctgcttcccgagcaccacgagcatccgcggcttctgccaacggtgggaaaggcggtgccgggcatggagatacggatcgtcgacgacgaggggcgcgcctgtgccgcgggggttcccggcgaggtgctcgtgcgaaccgatacgctgatgctcgggtactaccgcgaccccgcgcgcacggccgaggcggtgcaggacgggtggtatcgcacgggcgatatcggctttctggacgcagagggcttcctcacgttggtggaccgtaagaacaacctggtcatatcggggggcgagaacgtgtatcccctcgaggtgagccggtgcatcaaggcgcttgccggggtggccgacgctgtggtcgcgggagtgcccgacaagcagtggggcgagtcgctggctgcgttcgtggtgcgtgccgaagggtcgcgcatctcggaggctgatatcgtggcgcactgcgcgcgcgagctgggcggctacaagaagccgcacgccgtgcgcttcgtggacgatctcgggcgcagcgcatcgggcaaggtgtcgcgcgaacagctggaggagctcaagggactgctgtagtgcagcgcgcacgcgtgcggcgcgtccgcggtgcgcgatgcgaaggcaacgacgagaggagaggatgcaggcatggcggatttcgatgccgtggtcgtgggagccggttgcgccggctccgttgcggcctgcgtgctggcccgcgagggcaagagcgtgctcatgatagagcggggctccgatgccggggcgaagaacatgaccggagggcgcttgtacgcccatgcgctccgggcggtgtttcccggcttcgagagcgaggcgccgctcgagcgcaagatcgtgcgggagcgggtgtccctcatcaccgaagacgagagcacgacggtggagttcgcctcgccgcgcctgggagaggacgaggcggcctcgtactcagtgctgcgcgggccgttcgaccgctggctcgcttcgaaggctgaagacgccggcgcggagtgcatctacgggatagccgtggaggatcttgtgtgggacggcgggcgcatcgtgggcgtgcgtgcgggcgaggacgagataacggccgacgtgaccatcctggccgacggcgtgaactcgctgctgtcggagaaggcgaagctcgccaagcgcccggcgccgcaccagctggccgtgagcgccaaggaggttgtggagcttcccgagcagaccgtgaccgaccgcttccaggcgaaccccggggagggcgcggcctggctgttcgcgggagctgcgacgcatgggcacgtgggcggcggcttcctgtacacgaaccgctcgtccgtgtccatcggggtggtggccacgctgtccgacctctgcacgtcgtcgaccccggtgtaccagatgctcgaggacttcaagaaccatccggccgtggcgccggtgctggccggcgggcgcacggtggagtactcggggcatctcatccccgagggcggcttcggcatggtgccgcagctgtgctgcgacggctgcctgctcacgggcgatgccgccatgctctgcatcaacctggggtaccaggtgcgcggcatggactacgccattgcggcgggcaggatggcggcggaggcggccctcgaggcgctggatgcgggcgacgtctcggctgcgaggctcgcggcgtaccgtgccaagctggaggacagcttcgtgctgaaggacctggcggcctatcgcggcttcccggcgttcatggagggcaccccgcgcatcttcgacggctacccgcagatggttgcggacatcatgcgcggcctgttcacggtggacggctcgccggtgcggccgctcaagggcacggtcatggggccggtgaagggcgtgggcgtgctcaacctgctcaaggatgcgcggaaggggatgaaggtgctatgagggaggctgcggtcaacgtagacgagaagcttgctgttgacaagttcgaggtggacgaggggaacccgcacatcgtattgcgcggagagcccgatccggccgcgttcgacaagctggtgctgtgctgcccggcggggctctaccggcgcgacgaggagggcagcccgagcttcgactgcgcgggctgcctggagtgcggcacctgccgcctgctctgcggcgacgccctcctcgagaagtgggagttcccccaagggggcatgggcgtgtcgtaccgttacgggtgatggggagcgcgggctctccgcgacgtcggggggcgcccgcagcggtaagtgcggcgggcgcagcctcctagttgtcgcgcgccaggcgccggtagagcagggcgaaggccacggcggccacggccacccaggcgagcgtggtggcaacgggcgcgatggcatcggacgagaacagctcgccctgcgccagaagcatccccagctcgttcatgccgccggtgggcaggtagggggcgatgtccgagaggccgtcgaccatctgggcgaacatgggggcgatgcctgccacgaggatgggcatgctcagcacgccggccgacatctggtcgcgcgccaccagccccagcagaagcgacagcagcacgatgggcaccgatccggccacgccgatggcgaggaacgccggcaggccggccaactgctgcccgatcaccaggtagcaggccgcatccaccaaggcgatggccagcagcgtgaccagcccgcgcgaggccagcatctgctcggcgctcacgttcgccagcatgagcgtgcgcagcgtgtgcttctccttctcctcggcgatggcgttcagcgtggccatggaggccaccatggtggcggtgaacagcagcgaccacgacacgagcatcgaggagaacgcctcggccgcctcgccttccatgcccccgcccacggcgttcttgtagaagagcatgaacccgacgggcagaaggcagcatacgagcatggtggggttcttcaccacgtccttgaggtccttgccgagcagcgccccggtcttgcgcaacgtggcttccatctaaaactcccttcccgtgagctccaagaacacttcttccagatcgggctccaccgagtggatcgagaggcacgtgcccgaggccagcgcctccgccacggccggcgcgccggcggcgtccttcgtggtgcgcacgacgcggccgctcgccaggcgcatgagcacctcgttcctcgcgaaccgcaggcgcagcgcatcgggcgcgtcgcaggcgacgagcgcgccctcgttcaggatgcccacgcggtggcacaggtcctcggcctcggccatatcgtgcgtggtgaggaacacggtggtgccgtggtcgttgagctcgtgcagcatcttgtgcacctcggcgcgcgcggcggggtcgaggccgctcgtgggctcgtcgaggaacagcagctcggggccgtgcacgagcgccgccatgagcgcggcgcgctggcgcatgcccttcgagcagttcttgacgagggtcttgcggtcgtcggccaggttcatgcgatcgagcagcgtggggatgttgtttcccgtcacgccgcgcaccttcgcgtagaagcgcaggttctcctcgatggtcatgcgctcgtagagggcgctcgtgtccgagaggatgccgatgcgctcgtagtcgctgttcgtggcgtgctcgatggcgcgcccgaacagcatgatgcggccggagtccttcaccagctggcgggtgagcagcttgatggtggtggtcttgcccgcgcccgaggggcccaggaagccgaagcactcgccgcgctccacctcgaaggagaggtggcagagcacgcgcttcgccttgaagctcaaggacacgtcgtccatggacagcaggggattcatgggtgattgctcctttcgtttcggacggtgagcagtttcccgtgagacgaagcgctgatcaagggaaacgcgacgccgggagcgcgccgagcgacgagaggagcagggggagggacgaaaggagcactcgggcaggggggacggggcgtgacagggggcgtgacagggggacggggatgatgtcacgctcccgggatcttttcgagcccttttcgcgtcgaggagcgtgacatcatccccgtccccctgtcacgcccctgccgcgccttcccctactcgtcgcgggggatgcgcggcgcgaccgcgacgagcgcgacgacgctcgcgacgatccatgcgagctggccgactgccggcaggatggaaccgggggcgagcagcgtcccctccgccagcgcgtagacgagcgcgaacccgccgccggtgggcaggaggggcaaggccgaaaacgtggattcggcgtacatgaagaacaagggcgcgatgccgatgaggatgatgggcaggctggagaagctggccgccatctggttgcgcgagacgagacccagcgccagcgacagcgcgatcagcggggcgccggccagcacggtgatcgccatgaaggggagcatcgaatcgaaggaggctcccgacaccaggaagcaggccgctcccgcgagcgcggtgtacagcgtgccgacgatgccatgcgcggcgatcatctgggcgcggccgacgccggccagctccatcgtgcgcagcgtgtgcttttcgcgcgcctcggccatagggtagacgatcgtcgtgccgggcaccatgctggtggagaacagcatgcccatgacgagcaggaacatgctcgcgtcgtcgtgggcgacgggctcgatgatgatgaatcggaacacgagcaggaacagcggagggaacaggcagcacgcgagcagcccggggctcttcaccacgttcatgaagtatttccgcacgagcacgctcaagatgcccgggcgcgcggcggcctgcttctcgttcaccatcggtagcgctcccgcatctcgtcggcacgccccttcgccagcgggatggacgtgtgcgcagcgtcgcccagcgtgaggttgaagctgttgcgcgtgtagcgctccaccttcgccaccttctgcacgttcacgaggaacgaccgatggcagcggaagaacccggcgcgcgacagctcgtgctccagctcgtccatcgtgcgcggcgtttggtagcgttcgccgcgcaccgagaggtacgtggccttgttcatgctctcggcgaagtcgatgtcgcgcgggtcgaacagcagcgtggccgtctcggtgtgcgcggggatcttgagcacgcgcacctcgtcgccctcgtacgcggcgcccccgtcctcgtcttcgccgtcgtcctggtccaccgcgatgaagcggccctcttcgtgccagcaggccacgccgggcatgagcagcgcctcgcgcagcggctcgaccgtcgtgatgaagcggcagccctgctccatccgctcggcgatccaggcgagcgcgatggaacgcccttcggcgtcgaggtcggacaacgggcgttcgaggaagcatatctccggctcgaagaggctagcacgcgccaagttcacgagcgcgagcgtcgagggagcgaggccgccgatcttgcgcttcgcgacgccgcgcaggttgaagtgcgagatggcgtcctcgtgatgcatgttgttgcgcgcgatgttgccgtagaatcgcaggtgcgaggccacggagtcgcgctcgaagccgcggtcggtttccaggacgaacgcgcagcgctgcgtgcggtagcgggcgcgcacggccgccagcagggcggcggacgtctcgcggctgcattcgatgtgcacgctgcggccgtcggccaccagctcgtcgatggaggcgaattcggtcatggggcgcttccgctattccgcgcgcatcgccgggaggatctcgagccagcagccgtcggggtcctcgatgaagtagatgcccatgcgctcgttcacgaagcacacgcaacccatttcctcgtgcagggcgcgcgcggcgtcgatgtcgtccacctcgaaggccaggtgcgtgtcgcggcccccgttgacgtagggctcgatgcgcccgcggttccatgtgagctccacctggaagtcggtctcgtcgttgccgatgaacacgttctcccacgacctgtcctcgggccccatgcgccgctgcatgacgaggcccaacgcgcgctcgtagaacgcgagcgacgcgtccagatcgaggacgtggatgcaacggtggatcatcttcgctttcatggcggctccttcctcggtgcgccgtcgggcaacgggcgcggtgcgtctcggcgacggctccgttgcgcgtcggtttcggttcggcgacggcgcttccatcggaagtataaagcaacgagcgagatcgttcgcggccagcatgcgtttccatgccgtctccgaacgtcgggcgaaggggaattcccgccgccgacgcggggcagctgaagagaaggacgtggcaggatgcaggatgtgcaggagagcccggcggcgggccccacggggacgtgcccgatggagcccgtcgacgcgagcgggctgggggagcgggaggaagctccggaagccccctacttgagcgcgcggggcctcgagctcgagacctacgccggcttcgtctaccgcaacgtggacctcgacgtgttcaagggccgggtcacggccgtgcgcgggcgcaacggcagcggcaagtcggcgcttctgctcacgctggcgggacgcatgaagcccacgggcggcatgctcttcgtcggcggcctcgaacttccgcgcgagcgcgccaaggccgagcggcacgtgggcctgggcctgttcaagggcctgaacgacctgccggagaacctgagcgcccgctccgcggccaaggccgagttcgacctgtacggcctctccgcgcgcgacggggccgtggaggagcatctgtgctggtggggcctcggcgacgtggcgcgcgtgcgggtgcgcgacctcacggccgagaagctcgcgcgcctcggcatcgcgctcgccttcgtgggggacccggacgcggcggtggtggacgacgtcgaggaccagctcaccctgtcgcagtcgcgcgggctcatggagctgctcgcgcgggcggcccgcgagcgccatgcggccgtggcggtggcggtggtggagcgcgacctggcccgcatggccgattcgtgcgcgtacctggcgaaggaaggggagtgacatggcgttcgaaggcgtgcgcttcgcgagcctggaatggcgaaacctcgcggcctcgaaggtgatgtgggtggtgatcgcggccatcgcggtgatcccgctcctctacggcgggctgtacctggccgcgttccaggacccctacggacgcctgtcctcgctgcccgtggcggtggcgaacgaggacgcgggggccgtgatcgcggccgagcagcgcaacctcggcgacgaggtggtcgacgagctcaagcgcaccgacaacggcctgggctggcacttcgtgtcagccgacgaggcccgggcgggccttgcggacggcacctacttcatggcgtgcatcatcccctcggacttctccgcctccgtggcctcggtggacggcgacgcgccgcgccgggcccagctgaaggtggagtacaacgagagcgagaacatgctggcgtcccagataggccagacggtgtggcggcaggtgcgcacgcgcgtgagcgacatggtggccgagcagtactggacgacggtgctcggccgcgtggccgattcgggcaagcagatcggcgctgccgcggcgggagcgcgcgacctggagggcggcctgtccgccgcgcaggacggcacccgctcgatcgcgacgaacctgggcacgctcaagaacggtgccgtcgagctcgacgcggggctcggtaccctggcaggcggcgcggtcgcgctcgacgcggggctcggcacgttggtgggaggcacgggcgcgctcgaggcaggggcgggctcgctcgcgtcgggcgcgagccgggcgtcggacggcgcgtcggagctgcgggacgagggaggcgcgccgctggccgccggcgcgcgcaagctggcggacgagacggccgggctgccggcccaggcggcgcggttggacgacggcgtgcaggccgtcgtgggcagcgtgggcgagctgtccgcggcgctcgggacggacagcgaaccgcagacgctcgtcggcgggtcggccgccctcgcctccgggctcgaggagctggcggatccgcaaacgggcgctcctgccttggcccagggcgtgggggagctctccggtgcgctcggcacgctgcaggacggtgcgtccgcggcgagcgcggcgctcgcggacgtggacacggaggccgtgctggcaagcgacatgacgccggagcagaaggaggccctgatcacgttccttggcacggcgcgggcctacctcgacggggccgaggggcgcgcgggcgtggtcgacgggctcgcgcaggcgaagggggaggtggacggcgtgcttctgcccggtgcgctcaaggccgccgacgccgcatcggagctttcggcgggcgcgcgcaccttgcacgaggggctggtgcggacgcgcgacgagctggcgtcgcaagcttctgacctgcaggcgctctctgcgggtgcggcggccctcgcccaggcggctccctcgctcgtcggcggcatcgaccgcttgagcgccggcgcgcaggatgtgagcgccaacctgtccgtcctcgccgccggggccgccgacgccgcgtccggcgctgcgcggctcgacgccggcgcggccgaggtcgcctcgggcgcgcggtcggccaaggacggcgccggcgagctcgcccagggcgcgcagtctgcgcaaggcggcgcggggcagctcgccactggcgcgggacagctgcgtgagggggcgggccgcctggtcacgggcctgcacgaggcaacggagggcgaaggcgagctggcctccaaactggctgcgggcgccgaggaggccgccgatcagactcgaaacatccccgcgaaggccgaggccatgagcgacccggtggagctcgacaacgactactacacctcggtgaggaactacggcaccggcttcgccccgtacttcatggcgctggggctctgggtgggcagcctcgtggcgggcttcgtgttcaagccgctcaacgggcgcctcctgctggcgggcgcgaaccccgtcacggcggcgttcgcgaactacctgcccatggcggcgttcgccctcgtgcaggcggcgctgctcatggcggccatccagttcggcctgcagctgcagataggcaacgtgcccgcgttctggggcatgggcttcctcaccgcgctcgtgttcgcggccctcatgcagctgctgctggcggcgttcggcttcccggggcggttcctcgccatcatcctgctcatgctgcagctcaccacgagcgccggcaccttccccatccagacgacgcccgcgttcttccaggcggtgaacccgtacctgcccatgacctacgtggtggaggcgctgcgtcagatcatgaccgggctcgactacggcgtggtgggtttcgactgcctcgtgctcgcagggttcggcgcggccgccttcgcgctcacgagcatcgtggcctggcgcaagcgcaccgtgcgcatgcaggacctccaccccgtgctgaagctggggtgagggggggcggtcctgcgctgccgggcctccctgaaaacatgcgtttattgagcggattcggctccagccggccgtgaaaaagaagggcgggctgctcttaccttagaatagcgctcggaaaagcgacgcgcgtgaggagcagattatgtgcggaatcgtcggatacaccggagcacgtcccgtcaaggacatccttatcgagggcctgaccaggctcgagtaccgcggctacgactcggcgggcatcgccgtcgagcaggacggggcgctgcgcgtcgtgcactgcaaaggcaaggtgagcggcctcgcgcgcctcgtcgagcccctggacctcgccggcacctgcggcatcggccacacgcgctgggccacgcacggccgcccgagcgaggcgaacgcgcacccccacacctcctgcgacgggcacgtggccgtcgtgcacaacggcatcatcgagaacttcgccgagttgcgcgaggagctggaggcccgcgggcacgcgttctcgagcgagaccgacaccgaggtcgtcgcgcacctggtggaggaggcctacgcggagagccgcgacctcttggaggccgtccgcgaggcgaccgagcgcctgatcggcgcgtacgccgtcgcggtcatcagcgatcaggagcccggcaccgtcgtggcggcgcgcaaggactcgccgctcgtggtgggcctcgccgacgacggggcgtacgtggcctccgacatcatcgccatgatcgacgccacgcgagacgtggccgtgctcgccgacggcgacttcgccaagctcgagccctcgggcgcgacgttcttcaacgtgcgcggcgaggcctacgagcccgaggtcacgcacgtcgattgggacctcgacgtggcggagaagggcggctaccccgacttcatgatgaaggagatccacgagcagccgcgcgtcatacgcgacacgctggccggccgtttggtgaacggcgcgctgtccatcgacgagctggacctctcgcccgaggagctcaacctcatcgaccgcgtgtgcgtcatcgcgtgcggcacgtcctaccacgccggcctcatcgcgaagaacctcatcgagggctgggcgcgcatcccctgcgaggtggaggcggccagcgagttccgctaccgcaaccccatcatcacgccgtccaccctggtggtggccgtgtcgcagtcgggcgagaccgccgacacgctggcggccatccgcgacgcgcgcgtgaagggagccaaggtgttcggcatcacgaacgtggtgggctctcccgtggcgcgcgagagcgacggcgtgatctacacgaaggccaacaaggagatagccgtggcctccacgaaatcgttcttgggccaggtggtgtcgctcacgctgctggccatgctgctcgcccaggccaagggcaagctcaagacgaaccaggtgcacctgctgttccacgagctggccgacacggccgagcaggtggagcgcatcctggccgacaccgccgccatcacgcaagcggcgcgcgcgtgcaaggacgcctcgagcgcgctgttcgtcgggcgcggcatgggcgccgccatcgcgtgcgagggcgcgctcaagctcaaggagatcagctacctgcacgccgaggcctacccggccggcgagatgaagcacggccccatcgcgctcatcgacgagggcttccccgtgatcgcggtggccacgaagagccccgtgtacgacaagctcgtgtcgaacctgcaggaggcgaaggcccgcggcgcgatgatcgtggctgtcgccaccgagggcgacgaggacattcgcgcgcacgccgaccatgtcgtctacatcccgaaggtgcgcgacgcgttctcggccgtcacggccagcgtgccgctgcagctgttcgcgcgagccatcgccgtcgagcgcggctgcgacgtggaccagccccgcaacctggcgaaatcggttacggtggagtagcttttcgacctgcgggtccgcggaaggggccggcgacgcccagtcgcccgggcagtcctcgcttcgctgcggaactcgcttggcggacgtcgccggccccttccgctccaagcggggcggggcttcgactgaagggtcgccgggttgcggcatggagggaagagagaggaattacctgtgagcgatactgagttggacgaggcgttccccgcggccgaggggcaggtggggctgggcgtggacatcgtggagatcgcgcgggtgaggcgcatcctcgagcgcacgccgagcttccgcgagcgcgtgttctcggaggaggagcgcgcctactgcgacgcgacggcgaacccagaggtgcactacgccacgcgcttcgcggcgaaggaagcggtggtgaaggcgctcggcaccggctttacgcgcggcatcggcgtgcgcgacatcgaggtgcgccgcaacgccaaggggcggccctccgtggtgctgtcgggacgggcgaaggaggtcgcggccgagcagggcgtgcgggagcttccgctgtcgctgtcgttcacgcacaccgacgccgtggcctgcgccatggccatcaccgaggactcgctgcgcgccgccgagaagcgcgtggaccctatggaggagctgtcgcgccagttcaaggaggctcgcagcctgctcgacgagatggacgccccgccggccgcgccggcgggcgcggcctctggcacgcctggcaggtaggacgtcgccgcagaggactgtcggcgggggcgcggcggccaggcgggcgactgccgaacggtgcaccggggcatccgctttccccttttaccgtggggatgcattgaacttgtgcggcgaacccattatgttggatcaaggcacgagagagcggcggagaggcgaagaggtgagcgcatggcgccaggaaacggttcgcaaggcaggcacgcaggcaacgacgtgaagggcgaggagccgtcgcgcggtttccgtcccgcgtccgtcccgcgttcccgctccgctccgcggcggccgaagcccggccgcaaggagggcatcatcgccgcttgcgccgtggcggccgtgctggtcgtcgtttatctggcaggcgcgttcacgttcatggaccgcttcatgccccgcaccaccgtcatgggcgaggacgtgtcgttcaagacgtccgccgaggtgcaggacctgctggccgacatcgcgaagagctacgcgctcgacgtgtcggggcaggggttctcgctcaagctcacgtccgcggacatgggcaccggcatcaacgtccaaagcgtgacggacgccatgcacgccgacgcgaacccctgggcctggccggtggaggtgttcggctcgcgcgacgagaccgacaagctggccacctcgaacggaaagctggagcaggccgtgcgcaccgccgtcgacgcgttcaacgagggagccgtcccgccgcgcaacgccgggcttgactacgacgcgggcagctcgtcgttcgtggtgagcaccgagacggcgggcacggcgctcgatgccgaccaggtgctcgcggccgtgagcgcggccgttgcctccctcgcgccctctgcgacgctcggcgaggacgcgttgcaaaagcccacgctcttcgccgacgacacgcgcttggcgaaagccgccgacgacgcgaacgccctgctcaaggccgacttcaacctgaagcttgccgacacggtcgttgcgcgcgtgaacgccgaccagatagcggactggatgcgtctgggcgacgacgtgaccgtgggagttgacgaggacctggtggcggcctgggtgcaggacatcgcctcggcgtgcaacacctaccaggcgcggcgcacgttcacgcgcgccgacggcaaggaggtcaccgtgtcgggcggcgtgtacggctggatcgtcgacaaggaccagctcaagaaaaccgtgatggacggcgtgcggtccgcccaggcgggcgatgtggccatcccctgcgagcaggaggccggcgcctacgacggcctgcacggacgcgactggggcaagcgctaccttgacatcgacctggccgagcagcatgcacgcttctacggcgacgacggcagcctggcgtgggagtccgatatcgtgtcgggcacgcccgacggcgagcacgacacgccagagggcgtgtacgtcatcaacggcaaggagagcccttcgaagctcatcggccagatggagcccgagacgggcaagccggaataccagacggaagtgaaggcgtggatgccgttcgtggagaactacatcggcctgcacgacgccgactggcagcctgcattcggcggctcgcggtacgcgtctggcttcggcagccatggctgcgtcaacctgccggtggagaaggctaccgcgctgtacgacctcatcgccacgggcgacgtggtggtctgccactggtaggccgctcggccgcgagcgcgcacggtcccccgtttgaacccgccgcgcgtgccctacgcgcccacgagttccgcgaaggcggcgggcaggcactccacgacgtcctccgcgcacacggcgatggccgaccagcgggcggccgcggcgagccctgcccgcgcgtgcagctcggctcccagcacggacgcctcgagcgcgtccatcccctgggccagcagcgccgccaccatgcccgccagcacgtcgcccgtgcccgccttcgcgagcgccggcgtgccgtgcgccatgcgcacggtctcctctccgttggaaatgaaggtgaccggccccttcaccaccgctaccacgccgtaggcgagcgagagcgactgtgccagcgcgcaggggtcgcccgtaggcaggtcgaacgcgcgcgcgagccgtgctgcctcgccgccatggggcgtgaccacggtggcgtggccgttcaggaagcgccgcttcagcaggcggcgccccttctccgagacaagggcgcccaggccgctgccgtccaccagcacgggcgcctcggcgtgcttcaacacgaagtgcacgagcttggaggacgcgccgtcgtccgcgtcgaacccgcaacctacgaggtaggcgtgcggcttgtccggcagcgagggggagagcttcggcgggaggtccgagcgcgggcccaccacgagggaggggcggaagccctgcacgagcggaacggctgccggatgggtgaacacctgcgtgtagccggcgcccatgcgctggctcgcgtaggctgccaagcatgccgcgccggggtagcgctcgctgcccacgacagcggtgagcgtgccccgcgtgtacttgttcgcgtcgtcggccggcaggggcacaagggccaccagctcgtcgttgccgtattcccgaacgtcctgcataggcgaccaccttgtccgtcgaagggttccctcttcccattctaccgcgtatcgacgaaaggcgcgaacgctcgacagaccgttgccgtgcgaattcggaccgttacggtgcggaaacggttgaccaccccgctcagcttgtttttctcattcgctacaatcatatgatgagaaaaaaggcgcatcggcgccgaacgattcgaaggaggcatcgtggatacgacgaggaagcatgactggggtttgatcgttgcgggcattctgctggtgctgtgcgccttcttcttcgtggtggcgccggggctcacccttgtcaccatcacggccatcgcgggcgcggcgttcctcgtgtccggcatattcgacatcatcaactacgtgcgcttccacaaggtcatgaacctgtcggggtgggccatcgcctacgctgtgctcgacatcgtcatcggcctcatgttcctgatccatccgctggcgttcgcgggcgtcatcccgtgggtgatcggggcgttcttcatcatcttcggcgcgttcgaggtcgtcggctcctttcgcattcgcaagacgggcgtgcctatgtggggttggatgctgttctcgggcatcgtgagcgtgctctgcggcatcacgttcttcgtggcgccagcgtcgttcagcatattcctctcggtgttcatactcatgcgcggcgtgtcgctcgtattctacggctggaacgcgaacaagggcatgctggcgtagccggcggccgggccttgccgcaacctctgatgaaaccatggggcgggtgcgctgcccgctgcgactcgtggtagaatctcgattaaatggcgaaggccccgaatgcgttcggggccttcttcccgatggaggaagtcaagacggcggtggagaacatggcagaagaacagcagaacctcctggacgagcgggcgctcgccgaggcgacgagcgatccggccgcgcgtatcgacgcgctgcggcgcgagatcgagcaccacacctacctgtactacgcccaggatgctcccgagatatccgacgccgcgttcgactcgctcatgcgcgagctgcgcgagctggaagcggcccatcccgagctcatcgatccgtccagtcccacgcagcgcgtcggcggctacgtgggcgagcagttcgcccccgtgcgccacgagcggcggatgtactcgctcgacaacgccatggacctcgaggagctggacgcgtggatcgagcgcgtggtggaggcgttcggccgcatggtgcccgtggtatgcgagctcaagatcgacggctcgtccatcgctttgacctacgaggacggtcgcctcgtgcgcgcggcgacgcgcggcgacggcaccaccggcgaggacgtcaccgccaacatgcgaacggtgaaggacgtgccgctgcgcctgcgcgaggcgtccctcgacgggctgcgggacgcggaggcgccgattgagctgcgcggcgaggtgtacatgccgaagtccagcttcgacgccctcaacgtcgccgccgaggccaatggcaagcaggcgttcgcgaacccgcgcaacgctgcagcggggagccttcgccagaaggatcccgccatcacggcgaaccgcgacctgtccacgttcatctacgcggtggccgacgagcgcgccctggccgtcgagggccagtgggagctgttggcgtggctgcgcgaagcgggcttccacgtgaatcccgacgtcgagctgtgcgagacgcgcgaggcggtgcacgcgttctgcaagcgtgccatcgagcgccgcgaggacctgccctacgagatcgacggcgtagtggtgaaggtgaacgcgttcgcgcagcaggagtcgatgggctacacggcccgcgctccccgctgggccgtggcgttcaagttcccgcccgaggagaagacgacgctgctgcgcgacatcaccgtgcaggtggggcgcaccggcaagctgacgcccgttgccgagatggaccccgtgtcggtggccggatccaccgtggcgcgcgctacgctgcacaacgaggacgaggtgcagcgcaaagacgtgcgcgtcggtgacaccgtcatcgtgcgcaaggcaggcgacgtcatccccgaggtgctgggccccgtgctggcgctgcgccccgccgacgccgttcgctgggagatgccgcgcacgtgcccgtcgtgcggctcgcctgtcatccgcgaagagggcgaggtggatttccgctgcatctccatcgactgcccggcgcaggcgctcgagcggctgctccattgggccagccgcggcgccatggacatcgacggcatgggagaggaaatcgtgtcgcgcctcgtggagagcggccgcttgaccgacgtggccgactactacacgctggacgaggtggagctgtcgctcgtcgacatgggccgcgtgaacaaggaaggcgagcccatccgcctcgggtccaccgtggcgaagaagctcgtggccgccatcgatgagagccgcgcgcgcccgttcgcccgcgcgctgttcggcctcggcatacgccatgtgggcaagaccatcgccgagctgctggcggcggcgtacccgtccatcgaggcgctcatggaggcctcggaggaagacctggccgctatcgacggcgtgggcccgaagatcgcccgcagcgtgtacctgttcctgcgcacgcccgacaacgtggccgtcatcgagcgcttgcgcaagcgcggcgtggcgatggcagacgaggcgggcgaccctgccgagcagctgccgcaaacgctcgagggcctcacgttcgtgctgacgggctcgctcgtggagagcgggatgacccgcgacgaggcgggcgcggcgctcaaggcgcgcggcgcgaaggtgtcgggcagcgtgtcgaagaagacgagcttcgtcgtggccggcgaggccgccggctccaagtacgacaaggccgtgacgctcggcgtccccgtgctggacgaagcggccctgctgcgcatcctcgaaaccggcgaggttcccgagtagggcggccgcctgcgggcgcgcgcgacgcgggcggcgatgcgggcggagaggcgcacgggcggtggcgatgcgggcgggcgcgatatgtgcgctcgcgatgcgggtggtcgcgattcaggcggagatgcgtgcggttggtcgcgattcgggcggtcgctgctacaaaaacgcccttttcggcgggcaagcgcggcgctggcggcttcgaagcgggtttgggcgcaagggtatcacgcctgaccggggtttttccgagggctgtttttcgctcgggctgaaacgcgtttcgtacccgccgaaatcggcgattctgtagcgctgaaggcgagatttcggctggtttgggccgttcccgcaagcatgcctcgatggttcatgcgaaccgcccgttagcttgttcgcccgtgcgctgctccgcgttcgcctttcggtgcctgccgctcgcctaaggaagttacggaaatggaaatcgtaacaccgtcggtgtgatctatctgctatagtgtgttacacagttcagtttcgtaacacatttcgaggtgctgcgccgggccgcgagggagccgtcgcagcgggtgggaggattcgcatggcaacactcacacggcgcgacttcgcgaagctgacgggcgcaggcgcggccgcgctttcgctgggcgggatcttggcaggctgcgcgggcggcgggaacgagaagccggcggcagggacaggcgcgacgggcacgggcgaggcggccccttcgcaggtgatcgtgtccatgaccacgggctccgagccggcggcgggctttgacccgctggtctcctggggctgcggcgagcacgtgcacgagccgctcatccagtccacgctcatcgccaccgacaccgaccttagcttcaagaacgatctcgccacgtcctacgagtgctccgatgacggcatgacctggacgtttaccatccgcgacgacgtgcgcttcaccgacggcgagccgctcacggcgcgcgacgtggcgttcaccttgaacggcatccgcacggccgaggcctcggaatgcgacctgtccatggtgcgtgaggccgtcgcgccggacgacgccacggtggtcatccacatggagaagccgttcaacgcgctcctgtacacgctggccgtcatcggcatcgtgcccgagcacgcctacggcgagggctacggcgccaaccccgtcggcagcggccgctatatgctggagcagtgggaccgcggccagcaggtcatcctgaaggccaaccccgactactacggggaagcgcctaagatcgagcgcgtggtggccgtgttcatggaggaggacgcctcgctcgccgcggcgcagtccgggcaagtggacgtggcctacacctccgcgacgttcgccgcgcagcagccggcgggctacgacttgctgaactgcgcgtcggtcgattcgcgcggcatctcgctgcccaccatccccgcgggcgcgacgaagaccgacgagaagggcgaggctgccgccggcaacgacgtgacgtgcgatgcggccgtgcgccaggccatcaactacggcgtggatcgcgagcgcatgatcgacaacgtcatgaacggcttcggcaccgtggcctacagcgtgggcgacggcatgccgtggtcatcgcccgacatgaagtgcgcgaccgacgtgggcaaggcgaagaagctgctcgacgatgccggctgggcgccgggcgccgacggcgtccgcgagaagggcggcgtgcgcgcctcgatgaacctgtactactcggccggcgacaccgtgcgccagggtattgccgaggagttctccaaccagatgaaggagctgggtcttgaattcgccataaagggcgtgagttgggacgatctgtacccgcaccagttcaccgacccggtggtgtggggttggggcacgaacgcccccatcgagacgtacaacctgttctactccaagggtacgggcaactacgcctgctacgagaaagccgccaccgacgcgtacctggacgaggcgctggcccagccccgggtggaggactcgttcgagctgtggaagaaggcccagtgggacggctcgaccggcatcgcgccgcagggcgacgcgccgtgggtgtggttcgcgaacatcgaccacctgtacttcgcgaaggagaacctgagggttgccgagcagaagccgcacccgcacggccacggctggtcgctcgtgaacaacgtcgaccagtggtcgtgggcttaggggtttcgttgccgacgcggagggggcggacggcgccccgtcgctcggacagtcctcgcttcgctgcggaactcgcttggtgggcgccgtccgccccctccgctgacttcggaggacctgcgggggggggctggtcggcgttttccctcgctgaggggtgttgttgtcaggttttcggacaggtgaggttatagtagtttccatcatggcccgattcatccttcggaacatagtgaagttcatcctgctcatggttgccgtgagcatggtgacgttcgtgctggtgagcatatcccccatcgatccggtgcaggcgaacgtggggcaggcggcctacgtcaacatgagcgaggcgaagcgggcgcagctggccgagtactggggtgtgaacacgcccttgtgggagcgctacgccagctggctcggcgaccttttgcacggcgacctgggaacgtcgttgcgcttcaacgcgccggtggccgacgtcatcgccacgcggacggtgaactcgctcgcgcttatggccacggcctgggtggtgagcggcgtgctgggcttcggcttgggcatcctggccggcgccaaccgcgggcgacccatcgaccgtatcgtgaagggctactgctttctgctggcgtccgtgcccacgttctggctggggctcgtgttcctcatcgtgttctcggtgtggctgggctggttcccgttcggtttctcggttcccatcggggtgtcggccgccgacgtgacgcttgcggacgcgttgcaccatctggcgctgcccgcgctcacgctctcggtggtgggcgtggcgaacatcgcgctgcacacgcgcgagaagaccatcgacgtgctggagagcgactacgtgcggttcgcccgcacgcgcgggctttccacctggggcgccctgcgccaccatgggctgcgcaacctggcgctgcccgcgctcacgctgcagtttgcctccatctccgagatattcggcgggtcggtgctggtggagcaggtgttctcgtatccgggcctgggccaggcggctgtgacggccggtctgggcggcgacgtggcgctgcttgcgggcatcgcgctgttctcggcggcgttcgtgttcggcggcaacctcgtggcgaacgtgctgtacggcgtggtggaccctcgcatgcgcaagggggcgaaggttcatgcgtagcggaaaggaaacctgcgaggccgccggtggggtcggcgacgcccagtcgctcggacagtcctcgcttcgctgcggaactcgcttggtggacgtcgccgaccccaccggctccaaggtggttgcagccccggtgctctacgcttctcgcgcggctcggtgggggaacaggaagctcacgctggcagcctttgtggcggcggtggtggcgctcgcggctattgtggtggcgggccttctggtcaccgacgctgccacggccacggacttcgcgcagaagaacctcgcgcccagcctggcgcatcccttcggcaccgactggatgggccgcgacatgctgctgcgcacgcttgcgggcctgtccatgagcgtgctcgtgggccttctggccgcaggcgcgtcctcggtcatcgcgctcgtgctgggcgcggtggcggcgctcggcggcaagaaggccgatgccgtggtaacctggctcatcgacctcatgatgggtatcccgcacatcgtgctgctcatcctgatatcgtttgcgctcggcaaggggttctggggcgtcaccatcggcgtggcggtgacgcattggccgagcctggcccgcgtggtgcgcgccgagatcctgcaatgccgcgagtccacgttcgtggccgttgcgcgcaagctggggcagagcccgctgcgcattgccttgaagcacatggtgccctatgtgctgccgcagttcatagtgggactcatcctgctgtttccccatgccatcctgcacgaggcggccgtcacgttcctcggtttcggcctgccgcccgagcagccggccatcggcgtcatcctgagcgagtcgatggcgtacctgtcggccggcatgtggtggctcgcggtgttcccgggtctcgcgctcatcgccaccgtgctcttgttcgacgtggcgggctcgaaccttcgcaagctcatcgacccgcacagctcgcaggaataggaggcgcggatgagcgagacgcagaagggtgcggcgcagaaggcggcgcaggcggaagagacgcaggcggaagagacgcgggcctgcgggcgcgcggccgagctggacgagctggccgacacgctgttcggagggcacgaggctctcgagcacgccgacgagcaggagcaccaccaccatacgcacgcgcccgcgtcccaccacgagcatggccaccacctgctgcaggtggaggacttgagcgtggggttccgcatgtacgacgaggacgccccgttcttccgcgcaaggcagcgcttcgtggaggtgatcagctccctgaccatctcggtgcatgcgggcgagatcgtggcggtggtgggcgcgtcggggtcgggcaagacgcttctggccgatgccgtgctgggcttgttcgagccgaacgccaccgtgcgcggccgcatctggttcgatggcgagctgcaggacgccgcggggctggccgcgctacgcggcaacggcgtgtcgcttgtgccgcagagcgtgaacaacctcgacccgctcatgaaggtggggcggcaggtggagggcttcgcgcaccccgacgtgccgcatgccgagcgccgccgccgtcgggcggagctgttcgagcgctacggcctgtcggaggagacggcgcagctctaccccttcgagctttcgggcggcatggcgcggcgcgtgctcttgtgctgcgcgctcatggacgatccgcgcgtcatcgtcgccgacgagcctacgcccgggctcgacctggatctggccgtgcgcgccctcgacgacttccgcgcgttcgccgacgcgggcggcggcgtcatgctcatcacccacgacatagagctggccctgcacgtggccgaccgcgtggccgtgttcaaagacggcaccgtggtggaggagacggccgtcgcgaacttcgcgtcccccgacacgctcgcgcacccgttctcgcgcgcgctgtggcatgcgctgccggagcacgggtttcgcgaccgcaacgttggcgaggggtctggcaagggaggtttccatgcttgaggcgcggggcatcacctacgcgtatcccggtgcggcgcgcgcgctctaccaaggcttcgacctggcagttgcgcccgacgagcgggtggccctctgcgcgccctcgggcttcggcaagaccacgctctgccgcctgttggccggctacgagcgcccgcaagcgggcgaggtcctggtggacggcgagcccttgccgcggcgcggtgcgtgccccgtgcagatgatatggcagcatcccgaggccgccgtggacccgcgcatgcgcatgggcgcgaccctggccgaggcgggcgaggtgcccggccgtctgctggacgacctgggcatccagaaacgctggctgtcgcgctatccgcacgagctgtcgggcggcgagctgcagcgcttctgcatcgcccgcgcgctggccgcgaacccgcgctacctcgtggccgacgaggtgtccaccatgctcgacgccctcacgcaggcccagatatggcgcttcctcgtgggcgagacgagcaggcggggcatcgggctcgtgttcgtgtcgcattcccccgccctcaccgaccgcatagccacgcgcgtcgtgcgcctgggcgcgtagggccgggcgccttcccgtttccccggcctttcccgcttgccgcgccttcctccctgcccgatccgccacccttcgtcgttgccggctttctgctcaattcgcgatatttgtaattgactatatactatcaaaagaataatataggggtgctcatacgccgatcaggcgcctgtcagggggcgggggccggcggcaccgcgtgagtcgagtcagagagaaccagggaaggggatcttatgaagaagcacctccgcattgcgatggcggctgcgtgcgcgttcgccatggtgggcgcgttcgcgctgttcggctgctcgtccaccgagcagaaggccgacgagccgaaagccgacgagcccaaggccgagagccacgaggccgtggagctgcagctgttcgccgcgaactcgctgtcgaaggccatggacgccgtgcaggagctctacacgcaggaccacgactgggtcacgttcaaggacacgcagtacctgtcctcgggcgagctcaacgagcagctggccggcggcgcgtacgccgacgtgctgatatcggcctccaaggccaagatggacgaggccgtggacggcggctacgtcgacgaggcctcgcgcttcgatatgttcaggaacgacctggtcatggtgacgggcgagaactccgagctggccgcgaagtacggcgccgaccagagcttcacgctggccgacgtggcgacgggcgactacgccgtggccgtgggcgacgagtccgtgccggccggcaactacgccgaccaggcgctgtccaccgtgggctgctacaccgacccgtccggcaagaccggcagcgatatcacgggcaagggcggcacgttcgacggcacgccgctcgacggcaaggtgaacctgcagacctccgtgggcaacgtgtgcaagcaggccgagtccggcgccgtggacgtggccttcgtgtacagctccgacgtgtaccgcttcggcggcgtgaaggtcatcggcgtcgtgccgaacgacacgcacaagaagatcatctacccggccgccgtctgcacggactcgaagcaggccgaggccgccgccgagttcctcgattgggccacgacggacgccgacgccaagaagctgtggcaggagtggggcttcgagctcgttaccgagtaaagggtcccgcacatacggtatcatgtgggaaaggatgggcactcgactgcccatcctttccgcgcgataaggaacaaccatgagaatctcccgaacagacacctgcgcgcgcccggttgcacggacggcgcagggctgcgcgaacagggttgcaccccctctcccctccgcgcccgcgacggctcgaccggctttcgtccagcggcgcgccatatcgggcgccgcggccctcgccctggcccttgccctgatcctctcctcggcgcttgcgcccggcctcgcgttcgctgacaccggcgatgagggcgatcccgccgcgccgaaccctgccgcagcgggtgccgacggcgcgcaggacgcctcggccgcggacgatgccgtgagcctggccgccgacggcacggccgcctccttggacggcagccccttcgccctcgagggcttctcgcgctcgcaggtgggcagcaatagcgacatcggcggcgcctacgccggctaccgctacctcgtttccgacgagccgggcagcctgggcgtcatcgcaaccgatgcctgcatcgtcgtgtacgtgccgcacggcgtcgccgaggagaacgggttcgacaagagctcctcggagagccgatcgtacctcaagagcctgctcatcgccttggactccgagaacgccaagggcggctcggtgctgacgcgacagggcaactggatattcacgaacgagccgatcgtggagcacgagggcgtcgaataccgcttcgaccaggagctcaagcccggcgagttctatgcgtgcgtcatcggcgcggacggctcggacgtgaccgacgccgcgaaccccgctcacgtgcggctcacccacgccgacttcgccacgatggcccccgcggacagcgtggaggtggtgggcgccgccaccggctttgccgcgctcgcggagttcctgggcggcatcgacttgagccccttgtgggtcacgctcaagaccacgctcacggccatcgtgttcatcttcatcttggggctggccgcggcgtacttcagcctgcgcatccccgcgcgggcgcaggacatcgcggactccatcttcaccatccccatggtgctgccgcccacggtgtgcggctttctgctgctgctcgcgttcgggaagaacacgggcgtggggcagtggttcatcgacatcgggttcccgctcatcttcagctggcaggccacggtcatcgcggccgtggtggtggcgttcccgctcatgtaccgcagcgcgcgcggcgcgttcgagaacctggaccccaacatgctggacgccgcccgcacgctcggctggagtaacgcgaagatattcttcaagctgatgttgccgctgtcgtggtcgtccatcgcggcgggcacggtgctctcgttcgcacgcgccctgggcgagttcggcgccacgctgttcttggccggcaactacttaggcatcacgcgcaccattcccatcgccatctacttcgagtggatgaacggcaacaccgacgtggccatcttctggacgatcgtcatcatgctgttcagcttcgtggtcatcctgttcatcaacctctggggtaggcgcacgacgaagtaccgcaggagggccgaggcgtgagcctggaagtcaacatcaagaagaagtacccctctttcacgctggacgtggcgttcacggcgggggacgagacgctggggttcctcggtgcgtcggggtgcggcaagagcctcaccatgcgctgcatcgccggcatcgagacgcccgacgaggggcgcatcgtggtgaacgaccaggtgttcttcgattccgcgcagcgcgtgaacctcacgccgcaacagcgcaagacggcgcttctgttccagagctacatgctgttcccgaacctcaccgtggccgagaacgtgggcgcgggcatcgagcccgccgtgccgcgcggcgtgcgcgatgccatcgtggccacggagctcaagcgcttcggcctggagggcttcgacaagcgctacccggcgcagctctccggcggccagcagcagcgcgtggcgctcgcccgcatgctggcggcgcggccgggcatcctcatgctggacgagccgttctccgcgctcgacgcgcacctcaagggcgtgctggagcagaacctggtgagcctgttcgacgcctacgacggcaccatcctgtacgtgagccacgacatcgacgaggcgctgcgcttctgcgaccgcatcgccgtggtggaggccgggcgcatcatggagacgggcacgggcgacgacctggtgaaccgcccgcagtcgctcgcgggcgtgaagctgtcgggctgcaagaacgccacgccggccgagcggatgggcgagcaccgcgtgaggctgccgaagtggggcatcgaggtggcaaccgccgcgccggtgcgcgaggacgtcacccacctcggcgtgcgcgcgttctacctcgagcgcgcgtccggccccggcgagaactgctaccgggtgcgcgtcgaccgcgtgagcgactcgcgcttcgaccgcacggtgcttctgggcttcctcgaccgcgtccaggacgaggcgcccaccgtgagcgccgacgaggacgagatgaagtacctgcaccagcatctgttctggcgcgtggacaagctgaaggccggccccggcgagctgccctccgagggcgacgagctgtggatccgcatccctcccgacaaggtgtacctggtgtcgcggtaggcggcgcggcgcacgcgcccgaacatccctgtttcagcctctgcccgttcggcggatggcgcgtgcgctgcattgcccctaccgcgataccgcggcggcaagcgccgaccagccgccgtctccccatcgtccgaacatcgaaataacaataaaaaacaacattcccttgagaaaatttcgcccgaaaatattgacggggggatggtgtaaacttattcttcaaggtagatcgacgcagcaaattttcatttatatgcgtgtgaacaggttatttataacggattcgatcttcaaggagcagcatcgcccctctttcgcgaagaggtggaggcgatgcggtcagagcatgcgcgacgacgtatgggcacggggaaagggcggaccgcatgaagtggaagaaacaggccaaccaatcgctggcgatcgcactgaccttcgccctcgccctcacgatgaacgtcccctttgccgcgtggggtgccggcgattcggagtcggtggcagaggttcagcaatccgacgatgaccgtgtcgcatcggcgacgcagccgttggaaagtcaagcgacgcccgaggacgacaatcggagcgaccccgccaataacggcccggtacccgaaaacgggaacgccatggtcggggagccgtcgacccgcgcgcttccgtcggcttctcctgctggagaaacggtaggcgcgatcggaccactgcgcatcttctatactctcgactctggtggtgagcgacagatcggcagcggcttgaacgatgatgagaaaagcgttctcgatgagctgaatcttgacccagcggcgttcgaggttctgcatctccgtcttgtcgcagcggagggcttctccttcgagaagggctcaggctaccagctcacggacgtatcggtttcctggcaggccatcacggccgatggcatgactctttcctacggaatcgacctgcgctcggaaggcgattcccttgtgtgcgacatcccttcggttctcctgaggaacgtctccaatggcgagtacgagcggttcgccatctcgtggactgcggatggggcgcctcccgagatccacggcgcggctttcgggtcgtatctgggcttcaacctgttcaagacgggcacggctgcagcgttcgaaaccgactcgatcatgggaacgtacgtttcagggaatggcacggccatagtgatcgcgaagtcgagcggtgggcgcacgatagctattgccgacgaggttgggtccaatggaagccctgcggtttcgaccttcaaggacgtggcgatagcctgcgattctgccggcgagccgtaccgaaccgaggtcagcgtgaactacagcgccaatgccaagttcgaattgggggcggatgccgatggcaaccgcacgctcacgtcgttggaaagctgcacgtaccgtaccgctcaggggcccaatgcgggctctatttccgagggccaggtgttcacccaggctatggtggcgagcgtgcaaggtgcgaagtacccaacggttcaagcggccatcaacgcggcccagactggcgagacagtcatcctgcttgaggacgtgcaggaaaacgtcatcgttcctgcggataagagcatcgtgctcgacctcaacggacaggttgtggagggtgctccgaacgctgatacggtaaccgtagaaggcgcgctcacggttaaggacgacacggccgatgcaaatcctgttgtaagcgacgattacggctctgttacctatgctgcgggcaagatcctcggcaagagcccgacaaccgagccttacgcaaaagcgcttcatgttcagaacggaggctcggccactatcgagggcggcatcgtggagtccgaggacagcgatgcggccttcgtgagcaaaggttcgaccctcacggtaaacgggggttacttccacagcgctgaattcggaatcggcgtgcaaggcgagggtgcgacgctcgtgatgagcggtggagtggtcgttgccgacaacaacgctgccatcggaggaaatggcaaagatgaggcggagtctcgcgacacgtccatctcgatcagcggtggcaccgtcatcagccacatcgatgctgatggatacatcgcctgcggtatctaccatccccagcgcggcaagctgagcatcaccggcggcaccgtgtacgccgacaacggcgtcggcgtccttttgcgcggcggcacgctcgacatgacggatggcacggtgatcgccaccggcaacgcgagcggccaggtgggcgacagcgcgatcgtgcaaagctgctacggcgtgcaaatcgacggcgcaagcgcctactacgacagcgcgaacgccaaagcgacaatcacgggcggcctcgtgaaagccggcgaaaacgtcccggccctcaacgtggtggcacccggcaccatgaccgcgaacggcggcacgttctcaagcgacgtgaccgagtatttgggagctggccgaattattaaggaaaactctgacggcatgtttgtcgtggagagcgatcaagtggcgagcatcaccggcgcaaacggcgaagttcgggaaacgttcagctttctttcccgggctttcagttcggtcaaagacggcgaaacggttactttgctcaaagatgttcctgcagcggacgctcaatactccgtcagcaataagtctttcacgcttgatttgaataattacagcattgacggcacgagatatttcacgttgtatatcaatagatacggggagcctgtcgatgttatcatcaaaaacggcacgataaaaaacacgtggaatggggccgacaacggccctctcgggatggcggtttgggcgaaccagaatgtcaatctgacgcttgacaacgtgatccttgaggctgctgaagcgccggggggcaaacaaagcttcggcctgcgcatcggcaacgcgtcaggcaacacctccaacccctccgtcacgatcaaaggcgaggataccgagattgccggtgcgaccgccggcatatccgttatcggaaacggcgcgagcgccgtgtcttccctcacgcttgaggccgggacggtttacggtagcgacttcggcatcgtcggcaacggcgattgcgacggcacgagcatcgagataaagggcggcaccgtgcgctcgacgtccgaagacggttgcgccatctaccatccgcaggacggcgacttgaccgtctcgggcggcacgctggaaggtgcgaacggcgtgcagttctgcggtgagggcaagctgagcatagagggtggaagcatcaacgcgacggctgccgagattgcctcatccgataccacgaccacgagctcgtccatccttgacggcgcggcgctgtccctcgtttcgcgtggcggtggggggtacggtgccgcgggcactgccgaggtgtccatcaccggcggcacgctgactagcgcaaacaatgccgctattcaggaatacgctgtcggcgacgcgggctcgctaatcaagtcgcttgctatctcgcagcccgaaggcaagaccctcacggtttccagcgcctccggaaagcccgcagtctcgctctcggccctgaccggcaacgcctcgaaggtgatcgctggcggcacattctcaagcgatccttcggactacgtccgtgtgcgctacgttgcgaatcagatagacggcgggatgtaccatgtttcgccgaagggctccatcgaggtgtggaacgactttctgtacaataacccgaatgattcgcactacaagggtacgtttgactccctgtccgaagcgttgcgtgccgctggcgagctttccgatgctaacaaggttgtttacattcgcggtgaccacatgcttaccgaggatgcgaccattcccgaaggcgtgtacctttacgtgtacgacaatgcgaagctgacggtaaaaagcggcgcgaccctgacggtcgaagcaacgtcgaaaaagcttgccgtgaatgctgggtcttcgcttgcggttgaagaaggcgggagggtgctgttgaagcccacgggaagcgtcttgttctctcgcggtcttgtttcgttgaacgacggttcgacgttcgaagggattctaagcgtcgaagatggtagctatctttgccaaaatggctccaacttctatgcgtcgacctcgccggttgtcgaaatcttgcgtgcgaatggtagcaccgtgtatgccgacacgatttccagcgcgacgatcaaagatggggacaccgttacgcttctcggtgatgttacaggacagaggacgatttcggcaaacgatgtctatgtcgatctcgatgggcatacctggagcgggtcggcgacaacttcgtattcaactattgctgtttcgggcaacaaagttacaatagcgcacggaacggtgaaatcgccatcctcttcggctttggaagtgtccggcacagattctcgcgcgattatcgcctccgacgcgatcgttgagaacgacggggcttccaagccggccgtgttcttgaaatccaacggttcccttgaagtgcaaggcgccattcttgcccacaacaacttcgccatctcggggaatgggattggtgccgacaacacatccgtcgttatcaaggacgttgcctccgtcaggtccgaagccgcggcagcaatctaccatccccagaccggcacgctcgaagtgagcggaggggctatcgagggcgtcaccggtgtcgagatgcgctccggtacgctgaacgtctctgggaacgcgagcatcactgggacgggatcgccgtttgccgtagcatcgaacgcaaacggcgccacgactaccggtgccggtatcgccgttgtgcagcatgtgacgaaaaacaacatcgacgtgaccatctctggcggcacgatttcgggtgcgtcggcgcttagcgtgagcaatccggaaaacaacgatgaagccgacatcgccaaagtcaaagtttccgtgataggcggcacgctcaatgccatcaacggcggtgcggatgtcgtgcagagcatcaaggaagatttcatcaccggcggcacgttcaacaaggtgcttgataccaagtattacgaagagagcatctaccagcagaacgcgcaggatgcaaccgatgagcctggcagcgtggtgccgcgagcgttcgagatcaagtacgacttgggtggcggcatgctggcaggcactgcgaagaaccctgcttcttacacgtatttcgacgagagcttcacgctggccaacccggagcgggcgggttatacgttcgcgggttggacaggttccggcatcgatgatggagcagagtctgtgaccattgcgaaggggtcgacgggcaaccgctcctacacggccacttggacggcgaacacgaacacggcttacacggtggagcattaccagcaaaatctcgacggcacgtatgcgttggccgaaaccgacagcctgacgggcgagacggacgcgacggtcaccgcggcccccaaggcctacgagggcttcaccctcaacgaggacgcacaggggacggttgcttccggcactatcgccggtgacgggtcgctcgttttgaagctctgctacgaccgcaacgcatacgacgtcacctacaaagtgatcggttcctatttcgcaaacgactcttaccaggtcgacaagaacgtgcgctacggtgcggagctcgcgctgataggcgacgacatgtcacaggtaggctatgtgtggaatggttggtcggggctgcccgctaccatgcctgacaatgcggtcacagtcacgggctactataccgcggctgatgacaccgcttacaccgtcaggcatttcttccagaacatagaggacgaagggtacacccaaaacggcgtggatgagatgaccggcaccaccggcgcgaagaccaaagctgcggccaagtccgctaccggcttcacggccaagcctttcgagcaggccgatatcgccgccgatggatcgacggtcgtcggcatctactacgaccgcaatgtgcataccgtgtcctaccggtacaaggggaaggttcccgcaggggcttcgacgcttcctgatcctcaggagtaccgctacggggctaatatcgccgtcgcgcctgccgccacggctcccgggtacacgttcgccggttggagcgaggccgacgagctggtcatgggcgacgccgatgtcgtcctgtacggctcgttcacggcgctcggcgacaccgcctacaaggtggagcactaccagcagatgcttgacggtacctacgagctggccgaaaccgacaggctgaagggccaaacagacacgacggccaccgcggcccccaaggtctacgagggcttcgcccccaacgaggacgcacaggggacggttgcttccggaactatcgctggcgacggttcgctcgtgctgaagctctactacgatcgcaactcatacgaggtctcgtacgcctacacgggcgacgccccggcctcggcgccggctctgccggcaaaggcgaccgccaagttcgacgagacggtgacgccggccgccacaccgaccatgacgggctacacgttctccggatggtcgcgcgccgaggccttcgccatgcctgccgggaacgtaacgatcaccggctcgtgggcggcaaacaccgacgtggcctacacggtgcactactacctgcatggcacgaccacgaggctttccgacgacaaggtcgtggaaggtcgcacgttcgggcagtcctacgacgagcaggctcccgccatcgagggctacgcgcttgagggcgccgccgtccagcgcatcgtgctcgacgcctacggcaaggagctcacgttctcctacaccgccaaagaggcgcgcatcgcgttcgaagtgaacggcggctcgcaggttgccgacctcgtaggcaagacgggcgagcaggtggcggggtctttgcccgcgccgtctcgcgaaggctacgcgttcgccggctggtatgcggacaaggccctgacggaacccgtttcggcacttcccgccacgtacccggcgggcgcgaccacctactatgccaagtggaacgccgttccgctgccgcccggcgagacgggcaacgtggagatccaggtggaagtgcccgcgccgcccgcggacgggagcccccatgcgaccgtgaccgaggagtcggtcgaggctgcggcgaagcatgccgcgagcgtcctcgaggccatcgagaaggacgaggcgcccgtcggcatgacggcagaggatgcgcaaaaggtggccgggctcgtgtccggtgccgacacggccgacgtgcgcgtggtcgtctcgctcggcttcgagaagaagggcgaggatgaggtcgacgacagcgagaaggatgccatcggcggtgcggcatcggacggcgagtcggtgcagctctacctcgacctgtccgtcaagatggtcgttcaggtggtgaaggacggctcggtccaggccgagcacgaggccgttctcggcgaggtcgaagagcctctgctgttcgaggtccacgtcgatcctggcctggtcgcaagcaagagcgttcgcattgctcacgtgcatggatacgagcacgacacggagatcatcgtgcccgagagcatcgatcgtgacaggggcatcgtgcgcttctacgcgagcaagttctccacctatgcgctcctcgcctccgagagcgttgccgtggatttcgaggcgaacggcggctcggccgttgcctcccagacgatcggcttcggcagcaaggttgcgaggccggacgacccgactcgcgcgggctacacgttcggcggctggttcgtcgacgagggctgcacgcaggcgttcgacttcggcacgcccgtcgagcgcccgctcacgctcttcgccaagtggacggccgtcgatcccggccccggcccgaaccctgatccggatccgagcccgaatcccgatccagaccccggtaccgactccggcgccgatcataagccgggcgacaacggcgggtcggacctgaagcccctcgacgcctcgtcgaaggccgtcggcaccaagcggctcgtgggcaccggtgacggcacgggtgccttcgcggcgtcgctcgcgggcgttgcggcgctggccgtcgcgagcgccctggccgccgcactgcgacggcggcgcagccggtaggcgggcgcaggcaggcacggtacggttccaagcgggccccggagcgatccggggcccgcttcgctagattgcctctcgcaatcgaggatacttggcctataatattctcacacgagaagggagaaggggccctatgaaagacagccatggtcgcaccatcgactatttgaggatatcgctcaccgaccgctgcaacttccggtgcatctactgcatgcccgaggacggcgtgcagtcgctcgcccacgaggacatcctgcgcatcgaggagatcgagcaggccgtgcgcgtggcggccggcatgggcatccgcagcatccgcctcaccggcggcgagccgctcgtgcgcctgggcgtggtggacctcgtgcgggccatcgcgcacgcgcccggcatcgagaacgtgtccatgaccacgaacggcgtgctgctgccgaagatggcggccgagctcaagcaagccggcctctcgcgcgtgaacatctcgctcgacacgctcgacccggcgcagttcaagcagatcacccgccgcggcgagctccagcagacgctcgacggcatcgaggcggcgctcgaggcgggcttcaacccggtgaagatcaacgccgtggccgtgcgcagcctggaccaggactacctggcgttcgcgaagctctccctcgaccgcccgctgcatgtgcgcttcatcgagtacatgccggtgggcgagagctccggcagccacggctgcggctggggcaaggacgacgtcgtgccgagcgaggagctgttcggcatcatcaacgagcgcgcccgggccgccggtatggacgagctcgtggccgccggcgacgaccgcccgctcggctgggggccggcgcgctatttccagtttccgaacgcgcagggcacggtgggcttcatcagcccgctgtcgcgccacttctgcagcgagtgcaaccgcctgcgcctcacggccgacggcaagctgcgcccgtgcttgttctcggacgacgagtacgacctgcgcaccgcgctgcgctcgggcgacgagcaggccgcccgcaccgtgttcgcgcaggccttgggcgccaagcccgacgagcaccacgacaaggtaggaaccgaacggggaatgtcccaaattggaggctgaggggtaccaacggcctgccggtcgtcggaacctgccgatgctgcgaagggccgaggcgcgccgccttcgcgcgatcccaagggctcgcgtaccaaagcacgcttcgcccttgcgatcccccgaaggcggcacccctcggcccttctcgctgagttactagcgccaacctgcgattttcaacctgtgatatcgagccaaaggagcactccatgaccgaacagcaactcacccatatcgacgagcacggcgacgtgcgcatggtggacgtgtcgcagaaggccgacaccgagcgcgtggccgtggccgagggcttcatcgccatgaaccccgccacgctcgcgctcatcgtggagggcaaggccgccaagggcgacgtgctggcctgcgcgcgcgtggcgggcgtcatggccgccaagcagacgagcagcctcatccccatgtgccacccgctgaacatcacgaaggccaaggtggagtgcgcgccggtggaggcgggcgagcgcgaggacggccgcgtgggcatccacgtgaccaccacctgcggcgtcacgggcaagaccggcatcgagatggaggccctcaccgccgcgagcgtggcgtgcctcaccgtgtacgacatgtgcaaggccgtggaccgcggcatggagatcatggacgtgcgcctgctgaagaaggacggcggcaagaccggcctctgggagcgcgaggcttagcgcgccgcaaaaagacgccgcccgttttcgggaaccaggcgccccttcgacggtcgaggtcgaaggggcgccgtgcatgcggagaggagctagcgggattcctcttcggagaactcgcctttccagaagctgcgggcaacgcagatcgccgcgccggcagtggccatgaggccgaccagtgcgccgcccgcctcgatgccgtccccggtcttggccagcctcgatccgccggtgctcccgggcgcggttccgcttccgcccgtgccctgcccggagctgccggtgccgccgcctgcaccgttgccgggagcgggatcggggtcgggtgtcggatcgggcgtgggctgggggtcgggcgtcggttcaggatcggggtcgggcgtcggctcgggatcggggtcgatcggggctgccgccacggacacggtcagggacgcttgggaatagccggcgcggtaggtgaccgtatggtttccgtcgacggttggaacgaacgagtacagcgtggtccccctagctgctgcggccgcgagggcggcggcgccctcgggcaccgaggtgaggtagaggcccacggggttcccctcggggtcgatgacgctcggcaccgcttcgataggggtcccgttcgcggtcgtggccgcggccgcgggtatgacgcaggctgcgccgacctcgggtgcgccgaaggcatccggctccggcagctcgatggtcgacggggcgcaggcccggtagttcgcggccacctcctcggcagtcgccacggtgccatgcgtcagctttgcgaacgccacctttgcggcgctgaacgcctggggctctccctccccgccgcaatcggctcctatgtaccagcgcgccttcgatgcgttcggcgcggcgatggcccccgccgccgcggtttctcccgccagcacgccatcctggtagatcttgagggatgcgccgtcgtaggtggcggtgatgtgcgtccacacccccggctcgaccggcgtcgacacattggtggagccgtcggtgaagtagtaatgcagcttgccggtgggatagtactccagccactggccgcccccctgcccgcaggagaagatgtcggtgtagccggagctgggtttcgccgtgaactgcacgagcagttcggcggtggtggaggttgccagcttggcgaagtcctcggccgcgaagtcgtagccgaaggcggccgtcgcgccgtcgaagacggccacctggcggccgaattcctccacggtctcgaacgcagggctgccgaacggggtcaggacatgcggcgtctcggagaggtcggcggcggacccttgcgagaagtcgacggacaacaacggcgttgccgggacggcctcgcctccggcggtggtgaagataacctcgccgatgagcgtttccttctcccaggggttgcgcgcgtaggctttcaggctgtaggggctttcgggggcgagcgcggcgccgaacagcgggcgcacgaactcggcgggctggttggcgggggcgttgtagtagtcggacatgtagcaggcgttgtacacctcggccccctgggcgtccagcaccacgatgcgatagctcatcaccacgtcgtcggacagtcccgacgcgtcgggcctgatcttgtcggcggcgatggcgaacgacgccccggtttgcgtgatggagtcggccggtatgcgcacggccgcgccctcctccagaatcgggggaaggctgcgcgcctccatggcggcgtgcgtgtacgtccaggtggacttgtcggacaccttgaacgtccagggggttcccagataggctccctggcggaagtccatgcgccggatggtgacttcgtgtccgttggcggcgtccacctcgaccagcaggcactggcttgcgtcgtagccgtcggacgggtgtccgcccgtgccgccgttctcgtcgtagccgtcggcatccttgccgccacgcatccagaagttatcgccgaaggtggccgtctgcacgagcgtgaacccgtcgacgtcctggaagatggagcgcgggtcctcctcggggatgtgcgtgtgcccggagaagtggacgagctgcgggtacttcgccttgagctcgttgtagaacgctttggaattgcggtcgtccacagggccgtaatcgccgatccagccggcgttgaacgacgtgggggagtaccagacggtgtcggggaagggatggtgcgtcatgaagaagatgggcttggtgcccgtggggtcgtcggctgcggcggcggcgatctcgcgcttcatccaatcgaggatggtgatgggcgtcgtgccgtcgtcgtcataggtggtgtcgccgtaccagtagccccgcccgcagctggcggcgatcacgtggtagccgcctatttcggtatggacgttcagcttgccctcgaaggcgccgcctggtttctgataggcatccgcgcaggtcaagtgcgagaggaagtacttgaagttcgtcacggcgttgccctcgagggggctgccgcctacgccgaactcgtggttgcccatgacgaacagggccggcttcctgatggcggcgttcgctcccgccaaaagcgcgtcgaactcggcggtcgtgccggtgttcaccgagtcgcccgcgaagacgtgcgcggcgcagtcgggtacggcccggtagatggtctcgaaggcgaacggcagcttcttctccacgtcgcagcaggtgaaatgagtgtcgctgtgcacggtgaagcgcactttgccggcggggagctcgggccagctggggtcttcgggctcggtgaaggccgcgtcggcgtgctggccggggaatgcgagcatgccgcccatggccgtcaccccgcaggcggcggccagtttcacgaacgtgcggcgcgatacgccgaacgtgccgtggtcgtagatcgaggagagctgggaatccatgatgtcctttcggtcgactgcgcgagatgcgtcgccgtggctccgcatgcgcgaagtccgccgggcgtcggtgcgctctatcgtaggcgcgcaaggtaaggccccggcaagggggaggtcacgcgagtgaaaggatcaggtaaggattcgctcaagcctcctggtgcgaaaaggctggcggcgggcctgggcggcggccggccgagactacatcgtcctcgtcctcggctgcccgcaggcagatcaaccatgatcgaaaacatcatggacaagaatcaggtcggtggcacgatgctcggcgagaaggtcgcttcccgcggtttgccaccaggcgtttttccagcacaacccaagaaagcggcttcgaacgaggccgctttcttgccatagcccccgatctcgtccaggcggtcgggcgcgcctggacgtgcggggatgcgcccgagggagaggggaggtcgtgcggcgcattccgcacccgtctgcgcgtgcgcgagcgggcgggcggtgcggttagttctgcgtggacaggaacgtgggcagcgtcatctgctcgatctggtcctgcagctcctccagctcgtcgaggtgcttgtcctcgtcgcgcaggatggcctcgaggatgtcgcgcgtggcgtagtccagcacgttgccggcctgcacgatggcctcgttgtacatcttgatggcggtgagctctgaggcgtggtcgttgtccacctgctgggggatggtggcgccgatgtggatgtcgtccaggttcgacacgatgggcgtgccctccaggaacaggatgcgctcgatgaggtgctccgcatgcgtcatctcggtgatcgagcgcgtcttgaagttcttgctcaggcgctcgtagccccagtcttcggccatttccgcgtgcaccatgtactggttgatggcggccagctcgctggcaagcaggtcgttcagcgtgtcgatgagttcaggatttcctttcatggcagtgctccttttggttgacgggcggtcagggaggaaccgccggacgccggcgtccctcgtcttccagccattgtaggggcgtgctgctgaatcggcggctcggtcacggtaccgtaggcacgccgtcgcacgtccgtcaactcgccccgtgcgagcccgcgcctggacacccggccgtccggcccgactggcccggccgggccgtcgcaggccgttttttgaagaccgtgcgataagcgagcagggtatttgacggatgtgctagaatgtttggccgatagtgctctgtggaagggaagtatatgtctgggcattctaagtgggctacaacgaaacaccgcaaggcggcgcaggacgcgaagcgctcggccttgttctccaagctgtcgcgcatcatcacggtggccgcgaaagagggcggcgacccgaaccccgagaacaacgcgtcgctggcggccgccatcgagaaggccaagggctactccctgccgaaggacaagatcaagaccgccatcgacaaggcgttcggctccggcaaggatgccgcgaactacgaggaggtcgtctacgagggctacggcccggccggcatcgccgtatactgcgaggcgctgaccgacaaccgcaaccgcaccgcggccgacgtgcgcagcgcgttctcgcatgcgggcggctccctgggcacctccggctccgtggcgtttcagttcgagcgcaagggccagatcatggttcccaaggaggtcgagacgggcgacaagaagaaccccgtgaagccgaatggcgccgcggccgacgaggaggagttcatgctcgccgtggccgaggccggcggcgacgactacgaggacgccgaggacgagtggatcatctacaccggccccaccgacctcatggccgtgaagaaggcgctggaagaggccggcaccgagacgaagggcgccgagctcaccatgatccccaccacgcccacccaggtgagcgtgtccgacgcgaagaaggtcatgcgcctggtggacaagctggaggagctcgaggacctgcagaacgtctaccacaccatggacatcaccgacgagatcgccgaggcgctcgacgagtagggctccggcagcctgacgaccgccgaaaccgatcggcgccctttcgcgccctgccgcgaggcgtggtcggcgaacgatggattacttgaaagacgcgctcccggcgcgtcttttttgtggtaggatagcacgaacaaacgtttgcgaaccgaagggaacggatggcgcgcaccgaacggacgatactcggcatcgacccgggcctggcggacacgggctggggcgtggtggcgcaaagcgggccgcggctggcgtgcgtggcctacggctgcatctccacgccggcccaggcgccgctcgcgcggcgcttgggcaagatacacgagcagatggcggccgtcatcaggcggttcgcgcccacatgcgtgggcatcgagacggtgtggttcggcgcgaacgcgcagagcgccttcgccacaggccaggcgcgcggcgcggcgctcgtggcgtgcgccgagggcgacctgccggtgggcgagttctcgcccagccagatcaagctggccgtggtgggcgccggctcggcggacaaggagcaggtgcagtacatggtgcgccagctgctggcgctcgaggcggtgccgagccccgaccatgcggccgacgcgctggcggccgccatctgctacacgacccacgagggcttcgcggcggcgaccgccgcggccgcatcgggaggaggcgcgcgatgatcgcgttcttgaagggaaggctggcgggcaagaccgccgctgccgcgttcatcgacgtgaacggggtgggctatgccgtgggcatgtcgcaggccagcctgtcgaagctgcccgaggcgggcgcgtccgtggaggtgcacacgtacctgcaggtgcgcgacgacgccatcgccctgtacgggttcatgacggtggaggagaaagcgctgttcgagcgtcttatcggcgtgggcggcgtcggccccaaagtggccttggcggcgttgtcggtgttcacgccgcaggcgctcgtcgcggccatcgccgcgcaggacgtggcggccgtgtcgaagataccgggtgtggggaagaagacggcctcgcgcatcatcctggagttgaaggggtccctcgaccaagggctcgcgagcctgttcgacgagggggaggtgcccgccgcccgcgccgccgagcagctgcgcggcgcgcacgaggcgctgctgtccatggggttcacggcggccgaggccgacctggccttgaagggcgcgccggagggtgtctctgacagcgccgttctccagtacgccctcaaacggttgggaaccgagcgctgacgcgcgcgggcgcgtgtggtaccttggtaggcgaagcgacggacgggacggcttgcgaagttaggcggttatggcgcacgacgacatcgagatagagggcctgggctacgtggccgacggcgcagacgcggcgtcggtgccgccgcgtgccgtgacggccgagctcacggaggacgacctcgtcctcgaccgcagcctgcgcccgaagcgattgggcgactacctgggccagacgaaggtgaaggaatcgctcgccatcctcatcgaggcggcgcgggcgcgcggcgacgtggtcgaccacatcctgttctcgggccctccgggcctgggcaagaccacgctcgccaccgtggtggccaacgagttgggtgccagcatccgcaccacgagcggccctgccatcgagcgcacgggcgacctggccgccatcctcacgaacctcgaggaaggcgacgtgctgttcatcgacgagatacaccgcctgaaccgcatggtggaggaggttctctaccccgcgctcgaggacttcgcgctggacatcgtggtggggaaggggccggccgcgcgctccatcaggctcgacctgccgcatttcacgctcatcggcgccacgacgcgcacggggctgctcaccgggcccttgcgcgaccgcttcggcatggtgttccggctggcgtactacacgcccgaggagctgggctccatcgtgtgccgctctgcggcgatcctcggggtggacatagccgaggacggcgcgctggaaatagcgcgacgcagccgtggcacgccgcgcttggctaaccgcctgctcaagcgcgtgcgcgactgggcccaggtgcgcggcgacggcacgatcgacgaggatgtggccgctcaggccctaagcttcttcgaggtggacgcgctcggcctggacgccgtggacaaccgcatcctggagcttctggccgtgcagttcggcggccggcccgtggggctctcgacgctcgcctcggcactctcggaggaccaggactcccttgaggatgtctacgagcccttcctcatgcagcagggccttatggtgcgcaccccgaagggccgccaggccacgccgcgtgcctacgagcacttgggtatcgccctcccacctgcctgacgacggccgggagggccggcgcaagcgccgcggggcgcctccggcgcttcccgccagccgatttcgacctgcgacgaaaggacgagccccatgctcgaacaggactacctcatgcgcatcttcctgcagttcgccgagatactgcggcgcagctggttcaaggcgcgcgacgagcacgacccgaaggccgcggctgacatgctggagaacgccgtgggcgacgccgtggacatcgacggcgccacgctgctgtcgctcgcgccggagtccatggccgccatcctgcaggtatcgggcaccgacccgcgcgtcaccgagtacgtggcgcgcagcctcatgctggcgtccgcctacctgcgcgaggcgggcgaggacgccgttgccgacctgcggcttgggcaggcgcgtgccctggccgatgcctacgggctcgagctgcccgacgacccggccgagatggcgggcctgctggacgacgtcccggagcctgccatcgtcgacatcgcctcggccgacgaccctcgctcgccctccgtcgaggcacccgagagcccaaccgagtgacgcaggctcggcttctgccccgcaggcttcccgtatcctagccgggcccttcgggcgcccgccctcccggcgccctgcgctccgtgccgtgcgccgccggcatccgcaacacctcgccgaaccgtgatttgttagatcatggtgactctgtgatgatcggcgtatcgcgccctcatccggtttcgttccgctagagtaatcgcctcgtaatcccgttacgggtcgccttcggaacctagaaggagaactcaccatgaaacagaagatgcagcaatggctcgtccggccgcaaggaaagctcgggcccttggggcttgtcgtcctccttgtcgccgcgagcctggttacacccctctcgctcgacatgtacacccctgccgtgccccacatgacggaggccttcgacaccacggcgggcaccgtgaacctcacgcttgtgggatacttcctgttcttcgccgtgggcttgctcgtgttcgggccgctgagcgaccgctacggccgccgccccgtgctgctggccggcgtggttacctacacctccgcaagcggcctctgcgcgctcgcgctcgatatcgagatgctcatcgtgttccgcgtcgtgcaggcgctgggcgcgggcgccgtgagcgccgttgccaccgccgtggtcaaggacgccttcaaggtcgagaagcgcgaggccatcctttccatcgtgcaggtcatgttcgtggtggggcccgtgctgtccccggtggtgggcgccctcatcctgcaggtgttcgactggcgcatgacgttctgcgccctgggcgccgtgggcctgttctgctgcgcgctcgccgtgctgttcgaggagacgctgccgcaggaggagcgctaccgcggcaccgtgctcggcagcatcgggcaactgggcgccgtggccaagaacaagggcttctcctcgttcttggccatcgtgggcctgtacaaccttccgttcatggcctacatcgccgtgggctcctacgtgtacatctcgttcttcggcttaagcgagctggagtacagcgtgttcttcgccgtggcggcgctgctcactgccgccggccccttcatctggctcaaggcctcccgctacgtgagcgcgcgccgcttcaccggcatcctgctggttgcggctgcactctcgggcgtggccatgctgctggcaggcgagctctcgcccgtgctgttctgcctcacgttcctcgtgttcgccctgacggaggcctgcatccgcccctacagcacgaacatcctgctatctcagcaggaaggcgacacgggcgcggcgtcatcgctcatcaacttcgcccacaccgccatcggctgcgcgggcatgctgttggccgtgctgccgtggtcgagctatgtgcagggcatcggcgtgctcatcgtggcgtccatggcctttgcgggcatcggctggatcgccctgctcaagtcacggatcccgcttgcgggcatcaagggcgcctcgccgtccgggcaggcggctccgcttgcccgggacggccggcctggccagggcgccgtggatgcatcctctcgcgcgaaggggagtgcccggtagccagtgcgttgcggcccgcggcctgcgggccgggcagcgtcgggaagcggatgcgccggccggccctgctgatacggtcggccggccgcgctgccccgctcttgccgcgccggcgcggtcggcgccctgcttttcccttctgcgcttcaccgggcggctgcggtacgctaccatgttcccgggagaaactacgggaggggatcgttcttgtccgtcgagaaggcgaaaacgctgctgcggtcgctgcggtggcatcatctggggttcgcgttcgtgtgggccatcacgttcgcgggcctctcggcacccgacggcttcgcgggccagcgcctgttcagcttgagcgaccagctgtgcgccctggcggccgtgggcgccgccgtgctctacgagcggcggcgcatgccctttccgccgcgatccgccctgatggtgggcatgctgctggccgcagggtcggccgtctactacctggcggccaacggcggcgtgcccgtcctgcccggctcgcttgcggccggcgtgctggtgggccttgccttgggctcgtcctacgtgctgtggcagcagttcttcgcctccgagggggcatcgcgcacggccgtgttcataccgctgtcggccctgctctcggtggtgctcagcgttcttttggcgctgctgccggacgccgcgcgcgccctgtgctccgtggccgtcctgcccgtcgctgccgccgtgtcgctcggccgctgcctgcgggagatcgtgcccgccgacccgcggccgcgcatgacgggcacggccgccgcggccacggtgcgcatgctgtggaagccggtgttctgcacgtgcgccatcggcttcgtgtggaagctcgtctcgcatctcttcgccgtgcccggcggcatcgcgtcgccgcccgtgctggccggcatggcgctggccgtggcggtggtggtgctcatcgagctgctctcggagacgggcttcgcggtgctgcgcgtctaccagatattgtttccgctggtcaccggtgcgttcttgcttcctacgctgttgggggtgcagttcgcgcccttcgcttcgggcatgttgctgttcggcttcgagatagtgaacctgctgctcatcgtcaccagcgccgtgtacgcgagcgagcgctcgctgccctcgacccaggtgtacgccctgtgcgtggggcccacgctggccgccatgctcgcaggcgatgtcgtgggcacgggactgagcccgcttgcggcctacgacttcgcgctggcggtgaacgtgctgttcgtctgcgtgtacgcgctgtcgctcgtgctgttctgcgtggcgttcacccgcaagggccaccgcgggcgcgtggcggccgaggccgagcacgacatggccgtggtgggtgcggctgcgttcctctcgccgggcgtcctgcctgcgggggccgctggccgctcgtccgcgagagggtcggacgccgtcgcgggctctgccgcaggcgcgatcggcgcgccggtgccggcggctgccggggagccgggtcctcaagcgggctctgcaggcgcgccgtctgggccgggcgcggagacgtgcccggagaggctgccgggcgagggcgcggcggccgcccccggcgccgacggcatcgcgacgctcatcgagcggcgcatggacgcgctggacctggccgagccgttcagcccccgcgagcgcgaggtcgtggccctcgtcctgcgcggcaacaacgtgcccgccatcgcccgcaagctctacatctccgagaacacaacccgcgaccatatgaagagcatctaccgcaaggccgacgtccactcccgccaggagctcatcgacctgttcgactagccaccgtggcgacatctgtcctccggcgctcctgcgggcgcatccggctatccccggctcgcctcgagccgtcgcgagcctttccgcacaggttgcgtcctgccctcggacaccgcttcgcaacgctcgaccaacgctcactttttagaggataacctgcggaaacgcgaaaacaacccaaagtatgggatggtgcggggcgcccttcgcgcgctaagctggccctgttggcgggcgggggaagccgcccgcgcaagcgatggatcgatccaaggagggaacatgagcgaagaaagcaagggaatctcgcgacgcagcctgctcaagggggcggccctgagcgcggcgagcgtggccgcgctcggcatgatcggctgcgccccgaaggaggccggctcggccgacgacgccaaggcgggcgcagcgggcggcgccgacggcaagcacacctgggaggtcaagcccgaacccatcccggccgacaaggtcaaggagacggtggacaccgaggtgctcgtcatcggcggcggctactcgggcacgtgctgcgcgctggctgcggcggagggcggcgccaaggtgacgctcgtggagaaggacgccatgctcaacggccacggcgtgggaggcacgggcgccatcgcctcgcgcgagctggacaagctgggcatcagcttcgacaaggccgtggagatggagcgctgggtgtccacgtgcggcaaccgctgccgcgagtcgctcgtggccaagtggttccgcgagtccgagcgctgcatgaactggttcctcgacctggccgagaagaacggcgcgaagtgcatggtcacggtgggctcgcgctctgccgtgcaccccgagatcgactgctaccacatgatcttcggcggcgagatcttcgagcagcacaccatggccgatttcgtcgagtacctgttcgagagcgaggccaagcagcacggcgccgagttcgtgtacgagatgccggccgtgcagctcgtgcaggacgacgccggcaaggtcacgggtgccatctgccagaacaaggacggcgactacgtgcagtacaacgcgccgaagggcgtggtgctggccacgggcgacgtgagctacaacgacgagtacctcgacgagttcgcccccatcgcaaagaaggtcatgacccgcctgtgctccgaccagggcaacgtgggcgacggccacaacatggccgcctgggccggcggtgcgttccaggacggcccgtggcccacgatgatgcacccccaggcggccgccacgttccacggccccttcatgttcgtgaacccggccggcaagcgcttcatgaacgaggccacgtgggtgcagggcaagtgcgtgggcgtcatggtaaacggcggctcggaccacgcgtggtcggtgttcgacgcgaactggcagacggacctgctggacagcctgcagtacggcggcggcatgttctgggactcgttccgcgcctacggcacggactaccaggtggcggtggactcgcacacgaagacggtcgagggcggcctggagaaggtgcccgactactacaagcgcgccgacacgctggaggagctggcggagatgctcgacgtggacaaggacgagttcctgaagtcggtcgagcgctacaacaagatgtgcgagcagggcgaggataccgacttctacaaggagagccacttcctctatcccgtcaaggaaggtcctttcacggcctgcatggtggcgccgggcctgttgggcgtgtgcggcggcatccacatctcggacaacttcgaggtgctggacgccgaggaccagccggtcgagggcctgtacgccatcggcaactgcgcgggcgacatttacgcctacgactatcccatcaacgtgcagggcaacagccacggccgctgcctcatcgagggcaagtgcctgggcgagcagctggcgggcgtgtaccaggagatctagcaggttgacggcggggctgggcggcggcgtgccggcatcaccgggcgcgacgtcgcccggtggccggagccggcgccgccggcccggcctgccgtctcgggcggaccacggaaggaccgagggcatggacgaaccgaaggatgcggggacgggcgccggcgcggccggggcgggcacgtgcgtgacggcggccgacggaagcgcggaggccgcgggcacggatgcctccgaggaggcgttcgaccagctgcagcggctttacgatcagcttcccgccatggaggagcgcggcgcgctgctggcacgtgcgaaggctgcggctgcggcggttcgtctcgaggacgagctgcgcacggcccgtatcctcctggacgaggccgagaagcgcgaggctgcggcccgcgccgcgttcgagcgggcggagcagggaggcgctccggcgcttgccgacgagtgccgccgggccctgctgcatgccggctcgctgcgagggttccgtgtcggtcccgcgcgcaacgccgaggctgccctggcccgcgcgctcgaggaagggtgcttcgccgatgcggcggaagcgcatgccgccgtcttggagccggccgagctagcgtctgtccagtcggaggtcgaagcctaccggagcgcctacgccgaggcccttgcccggtgcgaggcgctggaggcgtcttgtcccgaagactgatggcgtggcgccggccgtatcttacgaaacggtaaaaaacgggctaaaccgagaatcccgagcctttttctctctggatagcgtatagtattctcgtgctctcgaggtgagggcgagtgctgccgccatgcagcatgcagtgttgcctccttgaagggtcaaggagaggaaagaggatttaaaatggcagaaggtaccgtgaagtggttcaaccccgaaaaaggctatgggttcatctctcagaacgatggcgaagacctcttcgtccacttctctgagatcaagatggacggcttcaagaccctcgatgaaggccaggctgtgcagttcgacgtgacgaccggccagaatggcaagctccaggctagcaacgtgacgaaggcgtaaagcaacctcacataaacaagccgaaatggccccgcagtgcggggccattttttatgccggaaggtgcaggccggccgggttggggcggctgcggctagcagatgaacatggcgtcgccgaaggagagcatgcggtagcgctcggcgatggcatgccggtaggcggccatgatgttctcgcgcgtggagaaggcgctcaccagcatcatgagggtggagcggggcacgtggaagttcgtgaccagggcgtccaccacgtggaactcgctgccgggcagcaggtagagcgacgtggcctcgcgttcgcggggcgtcacaatgcccgcttccgcgtcccaggcgctctcgaggctgcgcacgctcgtggtgcccacggccaccacgcggccgccgcgctcgcgcgtcgcggcgatggcgtccacggtgcgggcgggcacgctgtagcgctcggtgtggatggcgtgcttctcggggtcgtcctcgtccacgatgcggaacgtgtccaggcccacttccagctccacggtctcccagcccacgccctgcttgcgcaggcgctcgatgagctcgggcgtgaagtgcaggccggccgtgggcgccgccgccgagctctcgcgacgcgagtacaccgtctggtacagctcttcgtcgccggcgtagtccttgatgtagggcggcagcggcgtgtggcccaccgcgtgcagcgcctcgtcgagggaggggagcggcgtgatgaggcgtgccaggcgctcgcccttctgcgcgtcagcgatccaatccacgatctcggcggaaagcgccacctggcctgcggcgtccgtgaagtccacgatggcgcccgtgccgggcttgaggcgcttgccagggcgcacgagcacctcccagagcgcgctcttgttgtcgaggggcgtgccgtgctggcgcagcaggaacacctcggccgccccgccggtgccgcgctttgcgcccaaaaggcgtgccggcatgacccgcgtctcgttggccaccagaaggtcgccggggcgcaggtactccgcgatgtcgcggaatacgcggtcctccagcgcgccggtcacgcggtccatgaccagcaggcggcagccgtcgcgttccgcggcgggctcttgggctatgagctcttcgggcaggtcgtagtcgaaatcggaggtcttcatgcgggcgggtccttcgtgcggttcgcggtcggttcgtcgaagagcctattataggcgttccggctccgccaagggccccattcccaattcctcccacgtcatctcataccacgactcgatggaaagccccggcacgcgcttgaactcgtccacgttgttcgtgacgaggactgcgctgttcgcgagcgccgtggcggcgatgaggaggtcgtttggtccgatgaccttgcccgtcatttccagttcccctcttatgcgcgcataaatgtgcgcgcatttggaatcgaacggaagaacttcaaagggcagcatgaattcgtcgaccagccatcgggttttttctggctgcttgcttttcactatgccgagcctcagctctccctccacgatggcgggaattttgaacaggcgagggtcgctgctgcgcatcagatcgtaagcgtaggggaggtgtccgtgcatgaagtctatgcaaatgttggcgtcgaggaggtacatgcgcgccgcctacagcgtcttgcgaggcgcgtcgagctcccagggaatctccggaggcaccacgaacgtgtcgtcgtcgcaggctccgtacaggttgaagaaccctggcggccagccgttatgttccttgcgctcgcgcagcacgcccgccgcgtacttcgagagcgtcttcccctcgcgcgcggcatcgcgacgcagatcctccatcgtggaatcgtccacgtacaacgaaagctgggccatgtcactctcccttcggtagcaaatatacttgtgagtatacttgctaaaaccttggaaagcaagcccatgctttggcgcgcgacggcagggcttgcgaggcgctttggccgaaggccgggctaccgctcgccgcgcccctgctcgcgcagcgcgcgcagggcggcgcgcttgcgggcctgcttctcggcgtaggccgctcgttcggctcgcttggcggcgcgggcggcttcctgggcggcgcgctcgtcggcatgcgcggcggcctcggcctcgcgctcggcagcgcgcgcccgtttgcgctcggcgcgctcggccgccgcctcggcctcggagaagcggcagccgcagaagttctggcggtacatgcccgtcgcgcggctgcggcgggtggcctcgtcgtagaaggggcggtagtcctcgaagagcgcgcgcacgcctgcggcggccgctgcgcgttccagctcctcgcggattacctcggtgaactggtaggggcttaccgagagcgtggtgcccacggcgtcgaagcgccgctcggaggcaacgcgcgcggcctcctcgaagcgcaggcggtagcacgcacggcagcgcgcctcgcgcagcgcggggtgcgtcgccacgcgcagcacgtcgccgtccgccgccgcgagcgcggcctcgcccacgcgtccggccgtcgcctcccaggccgcagggtcgtaggggccctccaccaccggcagcccctcgccgccggcccacgtgcgcagcgtgcccagccggtgcgcatactcctcggccggcgcgatgttcgagttcgcataatagagggtcaggtcgtgcccggccgcgcgcaagatacgcgttggctccagcgagcacggcccgcagcaggcatgaagtagcaatttcatcgggtttcgcacgctccttcgcatcgtcgcctatactaccatgtcggacgaaacgcacgccgacgaacagaaggacgacgcaatgagcgaacgcaccgcaccggcctaccgggccatcttcttcgacttggacgggaccttgctccccatggagatcgacgagttcatgcgcacgtacttcgaagcgctcggcgcgtacgtcgcccgcttcggcgtggcgcccgaggcgttcatggccggcatgaaggccggcatcaagaacatggccgcccacgacgacggccgcccgaacagcgacgcgttctgggaaggctggttcgcgcacgtcgatgccgatgcgtgcgactggacggcggagctcgaccgcttctacgaagtcgagttcggcgcgatcggcgcgggcgtggcgccgaacccggcggcggcgcgtgcggtggacgcgctcgcgtccaagggctacccgctcgtgctcgccacgatgcccatgttccccgagcgtgccgtgcggtggcgcctcgagtgggcgggcatcgacccggacaagttctcgcgcctcacgaacttcgcgaactccacgagcgtgaagcccaagccctcctactacgccgagaacctggctgcggccggcctgtgcggcgccgacgtgctcatggtggggaacaacacggtggaggacctgggcatccaggcgctcggggccgacgcgttcctcgtgaccgaccacctgctcgatccgacggacgggggcttcgatctcgcaaccgtgaagcacggcacgatggaggagttcgccgcgtgggccgaggcgctgcctgcctgcgcagagcacgcaaccggcatcgacgccggcctggtggatgccgccgcgtgcgagcgcgtgctcgcggagaacctcgcgggcgacgcccctgcggctcccggcgcgggcttcaccatcaacgggatcgagggctagccgtggcccttttcgactgcgcctgcgaggcgacgagcggccacgcccgcgcgctttcctacgaaacagcccacgggacgttccatacgcccatgttcatgcccgtgggcacgagcgccacagtgaagggcgtcaccgcaggccagctgcgcgatctgaactcccaggtggtgctcgcgaacacctaccacctgtcgctgcgccccggcgccgacgtggtggccgaggccggcggggtgcaccgcttcatgaactacgacggccccatgctcaccgactcgggcgggttccaggtgttcagcctggccgacacgctcaagctcgacgacgacggcctcacgttccgctccatctacgacggctcgaagatccgctggacgcccgagtccaacatggccatccaggagcagctcggcgccgatatcgccatgcagctcgaccagtgcacgccgtacccggccgagcgcgcgttcgtggcgaaggccgtggatctgtcggccaactgggcgcgccgctgcctggccgcgcacgtccggcccgaccagacgctcttcggcatcgtgcagggcggcatggagctggacctgcggctggaatccatccgccgcctgcgcgagatcgaggacgagagcctggcgcgcggcgcgcggcgtttcggcggcttcggcatcgggggctactcggtgggcgaggaccacgaggtgatgttcgagacgctgggtcccgtggcgcgcgcgtgcccggaggaccgcccgcgctacctcatgggggtgggcaaccccaccacgctcgtgcgcgcggtgcgcgagggcgtggacatgttcgactgcgtgctgcccacccgtacggcccgcatgggcacggcgttctcgtccacgggccgcatgaacatgcgcaacgcgaagttcgcgcgcgacttcggcccgctcgacgccgcctgcacgtgcccgacgtgccaaaaccacagccgcgcctacatccgccacctcgtgaagcagaacgagatgctcggcggcatcctcttgtccatccacaacctgcactacctcatcgacctcatgcgccgcgcccgcgaggcggtgctggccggcgcctacgaggagttctacgcggcgtggatggccagcccggcggcgaaggactactaggcagggccctcgagctgctctttttcggaaatcgccgaatatttccggacaagtatagtttaaccgcaggggagtgttcccggcggtcgatttgtggcacaataggacagttgacgtggcggagccgctccgcgcgcctttgaatggaaagaatcaacgagggagagctctccatggcgacagcccagaaatcgaagaagaagcccggccgttcggtcgaccggcgcaacgtctggctcctcatagccaccaccttgctggtggtgggttcgatcttcatgttcgcgcccccgcaggagaagatcaaccagggcctggacatccagggcggcctgtcggtcgtgctcacggcgaaaggcgagaacggccaggccgtgtcgaccgaggacatggagaagagccgcgccatcatcgagagccgcgtgaacgcgctcggcgcctcggaggccgtggtgcaggtgcagggcaccgaccagatcctcgtgcagatccccggcctcacgaacaccgaggacgcgctcgacaccatcggcaagaccggcaagctggagttcgcgcgcctcgactcgttcaccgaccaggacgtgaagaccaagatagagaacggccagtacggcaacgaggccaccatcaccgacgagctgggcaactcgctgccctcgggcaagaccgagcacctcaaggtggaggacggcacctacacgcccctcgtttccggcgcaaacatcacgaacgtttccatcggcaaggagaaagaggcctccgccgactatgcggtgaacgtgaagctggacggcgagggcacgaaggcgttcgccgaggctacgaaagagcttgcgccgacgaaaggcaagatcgtcatcatattggacaacgaggtgcagtccgcgccggcagtgcagtccgagatcccgaacggcgacgtgtccatcacgggcggttactcgctcgacgaagccaagtcgctgcagaccgtgctggagagcgggtctttgcccgtgagcttcgagtacgcgcagagccagaccgtgggcccgacgctcggccaggacgcgctggcgtccggcgtgctggtggcgctcatcggcctggccgtggtcatgctgtacctgctgttcttctaccgcggccttggcctcatcacggcggcggccatgggcatcttcgccgtgctgtacctgggcatcctggccacgctctcggcgttcgggctgttcagcctctcgctcgcgggcatcgcgggcatcgtgctgaccatcggcatggcggccgactcgtccatcctcaccatggagcgcttccgcgaggagatccgcatgggccgcagcgtgcgcgccgcgtccatcacgggcgtgcggcacgccatcgtcacgtcggtggacgccgacctggtgacgctcgtgtcggcgctgtctctgttcttcctggccacggcctccgtcaagggcttcggcctgacgctggcgctgggcatcgtgtgcgacatcgtcatgatgctgctgttcaaggccccgctcatccgcctgctggcgccgaaggtcatcgcgggccatcccggcttctggggcgtttcggacgccgaggccgccgcgaaggactacgaggcgctggcgctggccgagggcacgagcacggctgcggccgaggcgggcgaggctctgaacgccgccgagagcgagcgcgtggccgagaagcatgcgggcgccgccggcgaggccgccgcgaaggcggcgcgcaagccgcgcgggcgcttcatcaagcgcgacatcaacttcctgggctaccgccgcatcttcctcacggtggcggccgtgctcgtgtgcgcgtcgttcgccgtcgtgggcgtgaaggggctgaacttcggcatcgagttcgtgggcggcacctcggtggcgttccacaacacgggcgacgtgaccaccgaacagctgcgcgcctcgttcgatgcggccggcgagcccgacgccgtcatccagacgacgaacgcggacggccaggagggcttcctcgtacgcaccaccaccacgagcgccgaggatgccacggcgcgcgcgaaccaggtggcgggcgacctgggactgtccaccgacagcttcgaggtgaccaccatcgggcccgactggggcgcgagcgtcatccagtcatcgcttatcgcgttcctcgtgtccatcgtgctcatcatcatctacatcgccatccgcttcgactataagatgggcatcaccgccatcgtggcgctcctgcacgacctggtgctggtcatgggcatctacgcgctggtgggacgcgaggtgaacccgaacactatcgccgcgctgctcaccatcctgggctattcgctctacgacacggtggtcgtgttccaccgcatcaacgacaacatgcagggcgacgacatcaagtgcacgttcatgacgatggcgaaccactccatcaaccaggtgctcgtgcgcaccatcaacaccacgctcacgtcgctcatcccggtgctggccatgctgttcttcggcggcgagacgctgaaggacttcgcgttcgccatggccatcggcctgatctgcggttcgtactcgtcggtggccgtggccacgccgctgtacgccatgtggaagacgcgcgagccgaggaacgcgaagctcgtgaagaagtacggcacggaggtgggccgcttcgagttcgcgaacccgggcgccatggcggccgcgtcggcgaagccggcgaaggcggccgcgggcaagccgtccaaaggcgcgtctgccgtgaagccggcatcgaaggcggccgtggagacgacggctgccgccaagaagggcactgcatccaacggatcggcagaaccttctgcgggaaccagtccgtcgagcactgtgcagccccacggtgccagtgcctccaaagccggttccaagccgccgaaggcgaagcgcaagaagcgatccaacaagaaatagccttcttggtatgggatggtgcggggcgtttctattggtaattacgaaagccgaaatgcggttgtcttgcgggtatccgctgccgaagtggtgaacaggggagccgacggcggccgttgggcgtagaaggtgggacggcatcgcttttgaaacggccgcgccctgacacgccctgggatgctagcgagcgccgctcgggcgcagcagcacgcgaaccgtcgccgcgtgctcgtcggcttcaacctgcacctcgcctcggtagcgcttcgccagggtcgctaccgaggtcagcccgatgccgtcgcctttccgcttggccgagcgtgcgccgctcgacagcacgccttccggcgccgcggcggccagcgcgcgggcatcggcggacgtgcagctgttgcgcacggaaaccagcacggcgttgccctcgatccgcgcttcggcgtccacaaagagcgggcgcgccccgtccggcgccgccgatcggccgtctgtccccgcctgcgcgctccccgcaacctgtgcatcctcagccgtcgcacgctcacaggcttccacggcgttctccagcaggttcgccatcgccatgcagaaatctgcttcgggcagcggcaggcgttcgggcagtgcgaaggcaagcgagacatcggcaccgaaggctcgcgcccgctcggcgaaatgcgcggccacggagtccaaagcgaagttgagcgcgtaagcgcccggctcgtgttgcgcctggccggctccgtgttcgtcgaggtacgcgcgcaggccccgtacgtcgtcctcgtcgacaaacgatcgaatgaccagcatctggtggcgaaagtcgtggcgcgccttggcggtgtcgcgcagggtgcggcgcaggttctcgtagcgctcatgctgcagctcttccaactgagccgtctcgcgcaggcgcgcgttctccatgacggtgcgcagggccgagaacagcatgatgtacgacgctaccatcaggaacgccaggacgctcaccgccagcgcgtacagcacatccgagccgaacgataggaattccaccgcgtatgcgaacaggtacagtgcgttcgctgcgacgaagaaccctgcgggcacggcggccaggcgtcgccagagcgcggggtcgtccacctgatcgacgccccagcggatggttcgcgcgaacaacggcgtcagcacgagcgggcccgcggagcacacgacggcatccagcacgcgccgcgccccgaagttccattccagcgctaccgtgcgcagcagtacgtcgtaggcgaggatggcgatggcggcggcggtcgcggcgctgaagaaaacgaacaggcgcttgccccacggcagcttcgtcagcgcggccagcgacagcagcgacacggccagcacgggaaccgtcgcccagaccccttcctcgccggcgaaggctgctacgccgatgccgcaggccaggctgacggcggcgacgatgcccagcgcgatgcctacggtggccttgagagaaaagcgcagccggccgcgcacggacagcagcatgaggaagaacatcgccaggaacgtgggcgcgttgcgcacgacgtaccacagaacccctccggcgacgtcctctcccatggaagcctacctccgtacgtgggcgaacaggtaatcgaaatagcggctgcgcgcctcggcgcgcgacgagcggcgcacgggcagcttcgagccgtcgttcatgagaaagcagccgtcgtcggtgaggtcgtccacatgggcgaggttcaccatgatgccgcggttgcaggcgaacagctgcggatacggcgccaccatgtccgcgagccggccgaacgactgacgccagcgcagcggcccgttcgcggtgttgaggttcaagtagtgcccgtcggcggtgatggagcgcacctgcgacagcggcacattgatcacggccgatccgtcgtggatgcgcagcatggtctcgtctccggcgaggcgctcgatggcctcgtccagagcggcggcgatgtcgtcgggcgtgaacggtttggtcaggtagtggaacgcgcgcacacggaacccgtccacggcgtgttcgctggacacggtggtgaagatgatgaggccggggtagttctcgcgccgcagccgttcggcgatgtcgatgccgttggcgccgtccaggaacacatccaggaacacgaggtcgaaggcgagcgcgtcggctgtctcgaacaggtcgtcgccgccgcggaagcggcatatctcgcaggtgcgtcctcgcttgtccaggtgggagcggatcgcgtcttcgagggttttggcatcgggtgcgcagtcatcaacgatggcgattctcatcggtctctttcttcgatacatgccggcagggaggggttcgcctgaacggcgcatatcggttatgcgacgcgtcatggaacctccattccattttggcggtatcgtcgaaaagcgacggatgttttcgtgccagatcggcgcgtttcgtgccaggctgtgcagggacgaaaatcgcccacgtgcgggcggatcgtcttgcgaacagtataatgcaacgcgctgccccggaagactaagagccagcccaacactctttacagctctttacagctctttacagctctttacagcttggcaggaggaccgtagtattgaaaaggatcggttttgtttttgccatgccagacgagcagtccttcgtcaaccaagttcttcaacacgcgagatgccgttggcttggacactcccgccttttcaacgaggcttgccgaggtcacccgaccctcctccgcagcgagccgaagagcgagcctttcgttgtcgttcagctttgcaaacgtttcgaggggcacagcttgtcccttgccatgggacaaaacatcttcatccatagccccttcttgtgctcgcctgaaaatgttcactcgaaacatattgccgatttcgcggaactcgggttccgggaggccggcttcctcgcaggcgtctttgattcgcctgagtccggtcccccagctttcaaatagatccatctgcatgaagacttcagcgatcaagggattccttagcgcagtggcaccttcgagtgcctgctctatggttatgccgccaaaaagtgcgccgggagaagtcacctcaagtcggtcgtcgaacaacgccacctgtacgcacgaattcgattgtaggtttcgatgcaccacggcgttgacgatggcctctcgaatggcctccagcggtaactcgtattcgtcttttcgatagagacctttgatctcggcaccgagccgtatattgcgcagcacaaactgaaccgcctcgtcgacttgttcatagagcggtccgccgtactcgcgacgatcaagaaaaaccacgcggtcggtgcccttgaactgagcgcactgtatccgggcaaagcgatatgaattgcgggtgagtagaatcaaggcccgtgcgggagccctcttgccgtcgatcaatttgacaagcccccaattctcaagattgcgaatagtcgcttcgcgtctgccgtcatccgtgcgacgccggtttatctcgtcgcaaagaagctgtgcttccttttcgaggaacggctcctctggacaaacctgctcatcatatgattgagacgaccctcgaagcaagagctctttgagagccgtctcgtctgccatgcgggtcgttgctccgacgcgcacataagtccctttaccaacgtctttgcccttgaagtgatacggcactgatgggcccggctggacctctgctattacaatctcacgatcttcgaattgagcaactcgaatacggggagccagaagaggctcgcataaatcggagagcgcatttgcgattgtatctgcaacctgcgaagcgttggctatgccaacgatcttcctgtcttcattgcgtacgccgacgatgagcttgccgccagcagaattagcaaatgcgatgagggtcttgacgtatttctcgctctttggaggaagggtttcctttagttcgagggttttcgtttccccgtcgtctatttcccgcaacaagctcttatcgtccatgacggctcttttcgtatctcgtcataatcctatcgacattctagcaggaacaaagtccgctgccgcatcatgcggtgagagctgaggcattgaagatgaaaatcgcttgtccaatagagagacacggtttttcagatgtgcaggcagaccgaggcaagcgtgcgacgcgcctgcgaacgagtgcccctttcgtcatctcccccgacctcctcccgccgctcgggggttgcgggggtgcgtttcgtgccagggaggttcgtttcgtgccagaaaacggttttcgatcttgcgcctcggtaaacttcacttgaagtgtgctttcctgcgagaacggagtacggtatgggccggatactgaggcgtgaacatgaaagcgagcggtcggcgttcgccgcgctgctcacgacgggcatgctcgtcgcgatcctcgtgctcgctggcctcgcggctccctcgcccgcctacgcgggcgagctgcaaggcacgggcacggccgaagaccccatgctcatctacaacaccggcgacctcatcgcgtggtgcaacaagctgaacgagatgggccaggaccaagagcgccagcagcacgcgcgcctcatgaacgacctcaccgtccctggtatcgacggcacggaatacggcggcgccgtcaccaacgatgtcatcgccgccatgaaccaccccgacttgcaagtgaccgagttcgacggcaacggtcatttgatcgagctccagcttaccggcagcagcgccctcttccaaaccggcggcaagcctgacgacacgggcgttacaacgatcaaggacctccacgtcatcggctcggtgagtcacggcggcagcgcgggcacgctgttcgggagcatcggcgaggagggcaacccttccgaaaaccgccggatcgagataacggattgcacgaaccaggcgaacgtggagggcggcccgagcgccggcggcttcataggctcgtattacgacaatgagtctggcgaaggcagtatcgacatcgagcgctgctcgaacttcggcgatatcctgtcctcgcaggggcacgccggcggcctggtgggcagccttgtggagtacagcagtgaatttctggcctcttctcacagaagtagtttggagtactgctcgaacaacggcgcgatcaagtcgatgggcggcagcttctccacgttctatgacgtttatgaaaaagacaagccagaaacaatcgggggatgcgccggaggcctagtggggtattcgtcgtataaatctacccattttgtcattggtcacgactacaaccaaggggaaatctatagcgcgagcggcatcggatactccggcggtttggtgggattctccgataccactacctatgatcagcatactatttcgtattgctacaactcaggtactatcaagaccaacgccgcagaagccgggcatgccggcggcctcttcgggttcacgttgtaccatgtaaataatcctaacggctgccagaccttagaaggcagcgtgccggcggacgccgtcagcggcacgaacaacggcagcattgtcagcaagattaatatggcctatggccacgggtataccagtaaacaggtacttgagggcgtcggtgtcggcaagagcatcaaagtgacggtgataacccccctatccaacaagtatgactacgagcaagtcggttggagcaagactttccacggtggagacagttatccgccggagggctaccgtgtgctctattggacgcgcgaagcgctcgacgcgaacggcacgtggagcgagccgcccaaggaatacaaggccgactccgacgatatacacgatcgtgtctacggcggcgagcccgttttctacgcctactgcgtgccctcttcggctaccgtgaagttcgacctgaacgaacccaccggcggttatacctgctcattggatccgaaagacgcgaccaagaccttcatgaaaggcgagccggtaggtgcgctgcccacggctacctgcgtcaaccctaacgacaaaaaagatacccgggcgtttttgggctgggcgaccaagaaagatggaaacgacccgaaagcggaatggataagcgaaaactccgacaacctgtacgatttccgagacgattcccataccatcacactgtatgcgcagtgggccgatacgagcgtgccgttcgagattctccgccaacccgaagactgcttggtttccgccgttgccgaaggcgtaaatcatgaggtttggttcgatttctacaccacgtacgactactattctgcgacgctgcagttcaagaaggaggggagcagtagctataaagacctcgacgtcccccacgccgccatggcagaccagttccatttctaccttgagtcctcaacggaagccatgggggactaccgcatcaagatagagtactacgatttcctcgaaccgttaggcacgctctacaccagttctgcgaacatcgtgctggacattccgcagtcggaagcgaaagtcagcagcatcaccttggaggaggatagtgaaatcgacgaggttttgggaacgcactcctacaacgtgaacgggagcatactgggcgacctcccatcgctcatagacgagtccgttccggggaacttcgcccatatggcgtggattgagggcggtcttggcggcatcttgccggctaccaccaacacggcaaaactgtacgttgacgacgtgcgcggcttcacgttggcggaccagaattcgagggaggggcaaacctacacgctatgcgtgtctcgcgtgatggacaactattatctactcggacgctacacgggcgaaagcgagccgtaccgtgtgccgttcgtggtgccctacgcagacagcgtggcggccagcatcacggcggtgcaggtgacggaagaacccgtggtgcaaaatggcaaggcactcgactttgataccgactataacgtgttagtcaacggaacgttcaacctagcctcggatgtgcagtacacgcaggcgcagaccgacggccgcgaggtgtctgcccagtggcagtattgcataggctctagcggttggaccgacgtgcccgacgagctgttcgctcaagacgagaagggcaagccggttcgcggcattgcgtggagcgatgaccgcaagagcgcgcgtttgtatgccacgctgaacgcccaggcgaagcttgatgaggcgtacttccgggtgaagctgtccacgccgccggcgtccgtcgacacggcaagcgctcagtcgaagaaagccctgaacctgtctgttccccagccgaagataacggacttgaaggtgacgaacgacacacatgtgagcgttacgtgggagtgggaagatgccgcggggaacaagttgccgagcgatggctactacgtgagcatcgaacgcgacgactcgtcaagctcgggggaagaaaattgggtggaggtgaaccgcggtcgggtgtatacgtacacctacgatgcaaccctcgatcctcagcaaaaatatcgcgtgtctgtgcgagccgacacggaaggtcttcaaagctcatcggtgcaaaaggagttttccacgtccggcacgacggtgcttgcgtgggacgatacctactgcacggcctacctcccctcggaaaataagaacgacaaaatttccgtggattacgattgggcgagctacaaagacggcaaacacgtcgccctgtacacgtggcatctcagtacggagaagtacgccgaaacagcgtaccagaagttcttcaccacggaatctgacaccgcgagcttcccggaggacttccggaaagcctatgacgagagcgcccatccggagacactgtgcgatccgatggacgcgtggtgggtgtggttggaggccgaggtgtacaaccttgacgagaagggcaacccgacgtatggcatcactgaaaccatcgcgcgtacatcggcccttcccgtggtgcaccgcacctccgagacgctgagcccgagcacgaaggatgtcgggtcgcacagcatgacgatatgctgggatgcgcctgcggagggcctggtgcgcgaatacgaggttgaagtggacgaccgcatctggatcgtcccgtcggagcaggcaaaggatggccatttcgagctgaaggtcgacggcctacccagcgatacctggtgtgatgcgggtatcggcaccaccgattcgcgcataccgacctacacgggctcttatacgtggatcaagaatgacacgacgctgcccagccccgaggtgggcacctggacggccacggccaacccgagcgacgccaggcagggcgacgagatcacgctttcggcctcctatgcggcgaacagcgggaagttcccgaaggctgccgagctgcaatggtactcttggcgcgagggcgacaaggattggcggcctgagggcgacccggttacgcttggcgatgccagtcaggattacacgacgaccctgaagcacacggtggcctccgaagattacgggcggcagtggaagctgggcgtgaaggcgacctcgcccgacgagtcggtcacggacagctcgaacgtcgtgacggtggccatcacgccgcccacgccgacggacgtcgcgttcggcacgtcgacgcccacgagcctcccggtttcgtggacgccggttgaggctgcggaggggtaccagatcaagtgcgcgaagctggatgccgacggcaatccggtgagcgcgaccacgtattcggtggctgcgagcagcttgacgccggacgccgacggcaagctgtgctatgaggtgctgggccttgagccgagcacgccctaccaggtgagcgttgccgcgttcacgcacggcgtgaccagcgacttctcgaccgcgctcgacgcgatgacgttggcagagcccaccatcgagacgcccgcattctcgcaggtgcccaagacgacctgggtggaagctggcgaggctgcgacgttcacggcgcaggccagcgtgagcgacggcggcacgattgcgtacgcctggcagcgcaagggcgcaggcgagcaggacttcgccccccttgcggcgggcgacaagtacgtcatgagcgagaaagacggcgtggcgacgctcacggtgaagaacgtgggcgcgggcgacgtgggtgcggcgttccgctgcgtggcgacgagcaccaaagagaaccagacggcgaacgccgccagcgcggcggcctacctgaccgtgactcccgttgcgcccacgaacgcggaagcgcgggcaaccagcgcgaccgcgggcgaggttacctggacggcgaacggcatcgtgcgtcgcttcgtggtgacgtggcagcaaaccgatgggaacggttccaaggggtccgaatactccaggatcgttaccatctccgacgtcgcagcgcaaggcagctgtcaactcgacgggctgctgcccggggcaagctacggggtgacggtgtacgccgcgccgcaagccggcttccggtcggaggcggctaacgcatcgctcgatacgccgcttgcaagcacgctcgaaacggccacggtgaacccggacaagcagctggtggaacccggcgaaacggtgacgttcgaggttgcgacgaacgaggtcgactcgtcggagcagctggagtaccggtggcagcgcaacgcgttcggcgagtcttggttcgacgtcgatggcgaagacggtgcgaagaagacgctttccgtcacggcgcccgagggcggatcggtcgacggctatcgctgcgtcgtgacgtccaccaggacgacgcctggcgtaggaaccgacacgaagagcgtgaccagttccgtcggcttgctgctgacgagcgttcccgtggcgccgcccgtgcagcttgcggccgagccgggcactacctcggtgcacctgacgtgggcaagcgacgacccgcgcgacgtcacctaccaggtgcagtacgcggagggccccacgccgagcgacgacgcttggcaaaccgtcgacaacgtgggttccagcacgtcgtgcgacgtggaaggcttgaaggcgaacacggtgtactcgtggcgcgttcaggcggtggtgcgcgaccagctgcagtccgagtgggcttcggccgatacgttcaccacgcttgaagagcccagcgcgctggccgcggtgtcggtgacgccgcgctggggagtggccgtggcgggcagcgacaaggacatcgcgtacacggcgacgacgaatatcgacaacgccctcaatggcgaaacgctgtcctatcagtggcaggaaagcgcgaccggtgacgagtggggcgatgtgccaggcgcaacgggcgcaacgtacgtagccgatacggcggatgcggcaccgcgctcgtgccagtaccgctgtgccgtgacggccagcaaaaacggcgaggagctgaaaaccataaccagcgagtcggtcagcttcgagaccacggtagagccccccacctcgttgctggcgcagaacatcacggcagccaccgcggatctgtcgtggacgggctcccttgttgaagggatgtcctaccgcgtgttctggcgcgcatcgggaaccgatgagtgggccagcacatccgacctggcggaagctacgtacacgctgaacagcctcatgcccgccaccacctacgagtggtacgtgaaggtgatggaccacggcgagccgtcggtgcgctcggccacgtcgctgttcgtgacgcaatcgttgtcgccgatcccccagctcacgcgcgtggtggtgggcccggctgaccaaacctccagtgcgaccgggcaggcaagattcacggcgtacacgaacgtggacgacatgccggacgcgacaagggcttacacgtgggagaagcgggatctgggatcggatcccgccaaccccggtgcatggacgacgctcgcgggcaagacgacgcgcgagatagagcttgatccgggcgcggccggctacgtgcgctgcacggtgacgtatacgccgcctgccggcgggctggtgccgccgctggccaatgccacggttaccagcaccaacgaagggcgcgtgcgcgttatgcccgcagcgcccgctgacctgaaggccgccgacttcggtcaaacgaccgccaaagtcagctggacgggcgacgcgaacggggctgcatccgacctcgtgtatcgcgtggttggttcgagcgagtggatcgtccaatcaggattgaattcggcctccgccaatttgaacgacttgaagccgggcgcgacgtacgagtggaacgtgcgctccgttgcctacggtacaagcagcgatccgttgtgcagcgactgggtggcgggtcctctgttcaccacggatccggaagagatcgtgttctcgcgggcctgggtcacgccgagcgcgacgagcgttctggccggcgccgaccgtgccgtcacgctgacggcgaataccgacgccgatgccgaccacgagcagctgacctaccagtggcagcgctccgacggctccgaatggaagtccgtggagggtgcgaaggctgccacgctgcaggtttccgcgaaggacctgtcggtcggcgggcacgtctaccgctgcgaggtcacggccacgcgcggcagcctcgcaaagacgttcgacagcaacgagtccgtcgtgacggcgatgcccgctgcgccgaccgatcttaccgtcgatgatgattttccgtatgttgaccctgataagcctagcggccaggtgaaggccacgctcagctggacgtggggcaacggcgctttgccggagggcgctcggttcgaggtgagctaccgaaagctcgcaggagctggtgccatcaatgacgagtggctgtccgcgggtcttgcgatagacaacgcgaccaggacgtgtcgggctgtgctggaagcgaggaatatcacgtaccagtggcgcgtacgggtcgtgcagaacggcgtgacatcgccgtggtcggagatcggcacgttcatcactgcgcaggacgagccgtccggggtgctcagctccgttcaggttacgccctctgacagcttggtcaatgagacgactgctgtcaccctcacggcatccacgaacgtgactgatgactccgctctcacgtacacgtgggaatggtgcgagcttacaacggaggatccgcgcaaaagcgaaaccgtttggacgccaatggacggcaaagcatcgaaggagataacgctttccggggatgaaaggaaccgctacgtgcgctgcacggtgacgcagactgttgacgggacgaccaagaccgtgtccagcaacccggcacgcgtgcgcaccgagcccatggcaccgaaggacacttccgcgaaagcggcccgtgtcggcacttacgactctacctcgtgtgccagcctgagctggaagtgtgatgacccgcgtgcaaaagacaatgcgcagaaaacggtcatcggctatgaggtgaactatcgcaaggtcggtgaaagcgagtggtctgaaaagatttgcaacgaaacgaactgccctctgacttcccaggttttggagttggatgcaacgtacgagtggcgcgtgcgtacgatattgagcaataatatgaaaggggagggaggttataatcctacggtggataagggcggcccgcattccgagtgggtggacggccccgtgttcaccatgccgaaggtcgaggtcaccccgacgagggcggcggcggttatcggcaacggccgcaccctgacgttcacggccatgcccaatgcccccataacgagcagcacgcgcgagaagacgtaccagtgggagcgttatgagggcaaggactgggtgtctgtgccgggcgcaacgagcgagacgctcagcatcgaggcgaacaaggcggccacggctggagcgagcaggtatcgctgcatggtgacgttgggcgacggtgagtacagtcgtgtcgatacgacaagcaacgaggtcacctgcacgcttgcgcccgccgctccggccaacttgacggcgtcggatatcacgtccggcgaagccacgctttcctggacgtgggagaagggaggcttgcagaaggccgacgagttcaaggttctctatcgcgaaagcggtgcgaaggagtggaagaccgccacggctgcaggcggtgcctgcgagcttgtgctcaaggacttgaagcccgagacgatctacgagtggcgcgtgcgggccgtgcagaacgacgtggagtcgctgccgtcgtcctcgagcctgttcgtcacggcgtcggagcatcctgccttgaagctggagtcggtgctggtggatccgagcgaccagacggtgaagccggaggcgcaggccacggtgacggcgaccacgaacctggacgggatggtggatccgggcgagcttacgtatgcatgggagaagcgtgcgctcgattccaaacccaacgatcctaatgcgtgggtggagatcacgggccaaacgggcagcagcgtgacgtcttccgttataacgagcggctacgtgcgttgcacggtgacgtatacagtcaacggctctgccgtgggcgacccggttgtcagcaacgaggtgtccgtgcgcgtgcagcctggtgccgatgctgttccgaccggcctggaagtgaaggatatcggcgacacggcggcgacgctcgcatgggacggcacgctgccaaccggcggctccttcacgctgctgtaccggccggctggcgaggacggatggaccacggtgtcgaagctcaccgcatcgccctataccgtagaaggccttgctcccggcacgacatacgagtggcgcatgtgctcggtgtcggccgacggggtggcctccgaatgggttgacggtcctgcgttcgccacgacgtcgccggacggcgtgctcggcagcgtagtcgtggctcccgagcgtgcggaagcggtggcgggcgatagcgcgctggtcgaggacttcttcgccacggttaccggtgccgccgagggccagtcgctggcgtaccagtggcaggtcctgctgtccggcgggtggacaaacctgcccggcgagacgggcgagcgcacccatctgtcggttgccaccttggaagcgggcgagcactccgtgcgctgcctcgtgacggcgactgcgccgggcggcaagacgaagacggtcgagagcaacgcggtgacgctggtgctgtcgccggcaacgccgagcggccttgacgtgcgagaggtgacgagggatgcggcgacgcttgcgtggacgtggacggggccgggtgcggtcgagtcgttcaacgtccagtaccgcgaggaaggcgcttcggagtggcagcttgccgatgccgccgctatcgacgccgtgaacatgacctgcccgctgagcggtcttgcgcccggcacgtcctacgagtggcaggtgcaagccgtgcaaggcggccaggcgagcgaatgggccggcagcgggttcgtcacgctgtcgggcgggtcgctcaaggtcgcgcgcatatggccgcccgacgtggtgcttgggaagggcgagcaagcgaagttcacggtattcacgaacctcggggatgccgagggcgtttcgtacgagtggcagcgccgcgcgctcgattccgatgatgccgacggttcgtgggagactatcccgaacgcgacggataaggtcttgacgctcgccgccaacaccaccggctacgtacgctgcgtagccacgcagacggctccaagcgccggggcggccgagggtgccgaggtatctgaagttgccgaggttgccgaggcggctgaaacgcctgagacgcccgagggagccgacgtggccgacgtggccgaggctggcgcgtcgaacgaaacgcttggggtgaacgacggtcccgaggcaagcgagacgcctgcagtgaacgaggcaggcgaggcgtccgcgacatctgaggtgtctgaggttgccgagacgttcgcggcgccggcgccggtcgcgatcagcaaccaggcgcgcgtgcgcgtgacgcccagcgtgccgagcgggcttgcggtgggcgcggtcggttacacgaacgccgcgctttcgtgggcggccgccgatgtggacggcgtcacgttcacgctggcgtaccatgttgccggcagccaggattggacggaggtcgcgggtttgaccgagccttcgtacgacctgggcggccttgagccggggacgctctacgagtggcgcgtgcaggcggtcgtgggagagggcgacgacgctttgaagacggcgtgggcgtacggcgattccttcaccacacaaacgatgaaaacctaccaggtgacggccggcgccaatagcacgtggaagccggggcaggcaggtctggcgttcactatcaacggcgacctcgacaagttcgtgtcgctggcggtcgatggcgcgcagctcgtccgcggcaaggactacacggcggcttcgggcagcacgatcctcacgctttcgagcgactacctggccacgctttcggcgggcacgcatacgctggtcgcgacgtacaccgacgggacggcagagacgacgttcaccgtggccgcggccgaccccggccctggccccgacgacccgaagcccgacaagccgacgccgaccccgccaaatgacggcaacaacggcaacaacggcggtaacggtggaaccggcgccaccgacggcgccgcgggcgccaagccgctggctcctaccggcgacccgctgggcaacgccgtgggcaccgcaggcgtcctcggagccgtttgcacggcgtttgcggcgattgcagcggttcgcctgcgccgccgccgctaaccagcaccacccaaggcccggtcggcgctccgcgcccccgggcctccccgtgcccaaaaaaggtacagtgagcgcccccgctcgtcccgaacgaccaggggcgctttttcccacagcacagcaaggccgaccgccctcgcgccccctgcccgtgtcctacgtacaaccggggcatccggtgcgtgcgagaacctgcgtagggcaggcaccctgtgcttgccgcaacctgtgacccggccccggttgcacggtgccccccccccccccccccaaaaaaaacgtcccgcaatcggcgctcgtcgtgggatcgtcccgtagggcaagggctccgcccttgccgccgacccccggcccgacccgcgacggcgcgggcgtaggggtctgcccccctcttccgtccgacagcgaaatgggccgaagcccttcacgaggcttcggcccttctacaggaaggcttttgatacaaccccttcgcttaagcgcagacagagaatttgccgattactcctcaagccagtgcgcggcacgtgccgaccgtgcgaagtgagggtcgtgcagcgtgatgatctcgccgtcgaaggcgaagatcaccgtgtaggggatggagcggtactcgaaggtgaagcgccgccgcgccttgcccgtgcgtggatatgcctcggggaacagccgtaccgtggcgagggcggcctgcagcgcgttgtcgaactcttcaagtgcagaatagtcatcgtagtggaaaaagagatttctcgcgatgtccacatgtgtttcgttgaactcgggtgcgtactctactgggaacatggccgcccccaatcttcgcgggggtattcgcgcttgaggcgatcccattccgcttgggcattcgcttggacttcctcccaagtatacgtaatccccgtgcgcgcgatctctgcctcggatgcgtccacgaccgcgtcgcagtacgcgtcgtaggcgcgctgctcgtcgatggacaggccgagggaggtcagaaacgggtccggctggaactctgccatgctctcacctccttcgctggcaacgatgcgggtgtgctcgaatgcgatgtagcccatgcatcctcctaccatgcgggcgcaacccaacgcgggctactcccaatgttccctggtttcgaggatcctgcaagcgttgcgtcaggcagaaggggaacgccttcgcctcttcggactgcgcatcagcgcagcgcgtgcattggctcgtttcgatgaggctatcgtagcatagggaacatatgtttgtaaagagggaatggcgaatgtatgtcgcttaaagaggggcggggcgaaaggaggtcatcccgcatgcagaggaggctgcccccggtacgcaggcagccccctctttgaccaggcaggtttcaacccgcatgcgcccttaccgcttgaagcgctcctgcccggccagcttggcataccagcgggcgtagacatcggggcggaagtccgggtcctcgtcggcccattgctttgccaggaagggcttgtctacgtaggacagatcgacggtgcccaggtgcagctcctgctcgtcggatccgggggcgccgcagggcccgccggcgtagtagtgcacggccggcacgttcttgccggggcctatcacgctgctgccgcccacgaagtcgtcggtgagggcgcagcccgtgcagttcgccgaggcgatgtacacgtcgttgttcgcagccaggtactccagcgagtccttgatgttgcgggcggtcacgcccgtgttcacggcgaacgggttcgcgatgaggcggcatccgctcgcgcggtagtagcgcatgatctcggagaacacgaacgtgtcgtagcagatgctcacgcccaccggcccccagggggtgccgaacatgaacggctcgtcgccccgtcccgcccaggtgggctcggcggccggcaggtgcatcttgcggtagcggccgagcactccgtcgggtccgcaggccaccgcggcgttgtagacggtaccgtcctcggcgcgctcggccagtccgaacacggcgtacacgcccaagcggtgcgtgacctcggccacggcctcggtcgacgggccgggaatgggttcggccagccgatggtgcatgcgctcgtcgccggcgtgttcgagatcggcgtcgtagccggtgagcgccgtctcgggcagcaccacaaggttcgccccgcgcgccgccgcgcactcgatatagcccgtgatgcggttcaggttccgctccttgtcgccccagcgcggctcgtacgtgaccacggcgacgttcatgatgtccttcatgaaaagctcctttccagcaaggcgcagtgccttgcgccatcctctcgtcttgcgctttgcgcgccctcgcatccgcctgctcggtttccccgaggtgcggccgggcctgcgcagttcgccctcggcctgccgtgctgccatgacggtcccggccgctgcagagcgctcttctcgtccgttagcgcagcttcggcgtgacgaacgtgcacacggcgcccaccacggtgagcggcaccatgaggtagaacgccatgtcccagcccaccgcctcgatgagcaggcccaccaggctggagctcaggaagatgcccacccactggaacgtgttcagcagcgctacggccatgtcgccctgcgcgggcggcaccagctcggccacggccgagaagcacaggcctacgatgcccatgaccgcgatgccgaacagcaccaccagcacgatgaacacgccggtgggccaggtgggcatgagcgcgtaggtcacggcgctggccagcatgagcacgccgagcggcttcttgcgcgaccccatcttgtccgacaccatgccggccacgatgcccacggggatgcccacgagcggcgcgatgctcacgatggagctggtcgccgccgcgtccatgccgcgcacctcggccaggtacgtgggcagaaacgagatcacgccctgctcggcaatcaggtacaccatgagcgtgatgccgacgagccacacgcccgggttcaggaacacgtccttcgagaacagcctcgtcggcgcattcggcgcagccggtgcgccgtcaagcgcccctgtgcccggcgcttccgcggccggcgcggccgccgccgcgagcgatgcgtcaaggttgcgcagcgcgacgatccatgccacgaggaacacgccggcgtagacggccgtgaaccaccatacgttctcccaagcgccgccctcggcgatgcgcggcgccaggttgaacatggctatctggccgaacgccatgaagcacatgagcaggcccatggcgctgccgcggcgccggtcgtcgaacgagctggccacggccgccggccccagcgtcatgagcatgatgagccccacgccttccacgatgcggctgcccagcatgacggcgtagcccgcatcgagcgcgcccacgaccgaaccggccaagatggccgccagggcgatgatgcccgtcttgtagtaccccagcttcgcgatgatgacgccgctgggaatggccaggaatatgcccgagaacacgaacaccgagataagcagcccggcctgcccagcccccgcaagccccatgctctccgtgagcaccggcacgatgggcgccaccttgttcaggcacatggcccccgccgtcatggacatgagcatcatgaacagcacgagcccgggagagatccttttccgctccatcatgttttcacccctttcgcggccgtctggccgcctccgtgcgcaccacgggcccgtcctgccccgaaaccgcaggtgggtggtggtcgcgctcatacctcccgtactgctcccagcttacgcgcggggtttcctatggcggaacgaacgatatggagaggggtatcaatagtcacgtgaggccgattcaaaacgcgcgccccgctgcgtagaatggaggcgcggaaccgaaggcgggcgcatgcgggccgggctgcggaagcggggcgcaggcttggccgcggggcgggagcgggtgcgtgagacggcgggacgccccctgtccaagcatggcgcgcacggcaacgggggcgcggtgcgcgcttgcgcgccggaaaacgcgaccggcgcgccggcggagggaggcggcgcgccgggtgcagacgaggcggggaagggaggcggccatggacacacgcgacttgaaggtgttcgtggccgtctacgagacgaagagcatcacccgcgcagcgaaggaccagttcctaagcccccaggggtgcagcaagatcgtccagaagatcgaggccgagctgggcacgtcgctctttgcccgcaaccacttcggtgtgaagcccacgccgcagggcgatgcgctgtaccgtcgcgctcagatggtcatccgcctgctcgaaggtgtgaaggatgaggtggaggctgcccgcgcgctgaagtacacgctgaccatcgcctcgacgcagggcgtgtccgagtacctctcgctcgcgttcatccgcgacttcgccgagagccatccgcatatcagcccgcgcatcatggaaagccccgacgccatcgccaagcagcgcacgctcgaaaacgttgccgaggtcggcgtgctgggagggccggtggacctgtcggtgttccacgccgtgccgttcacgagccatcggccatgcctggtcgtcaacgaggcgaacccgctcgcgcgcaaggccgccatcgactacgccgacctggactgccagccgctcgccatggtcagccgcgagttcgcctcgcaccacctggtggtgaaccgcctggcgaacgcgggcgtgcacgtggacatcgtcatggaggccacggagctggacctatgccaccgcctggccgagcagggcgacgccatcgctgtgtcgttcgatttcgccgcctggggcggcagacgcgcgcatacggtcatccggcccttcgccgaccgctcgttcgtctgggagacgttcatcgtccgcaaggccggcgccgacctgtcgccccaggcccaggagttctgcgacttcgccctcgcctgggtggccgatcaccgcgccgacctcttccagtggccgggcgcgtgagggcgcttggcggcgaaggaggggctttgccctggaggggttttccagaaaaggccggagaatcccgttttgggccgacgcgcctccttggaagggtctttcacgcaacaagaagcgttccggcaactccgcggcgggatctttcgacccgctctgctcgcccggggtggcaaagcagaggctgacctgcggaatgtcatcggcggtaacctagagtgatcggatggctgcggcgctgcaagcgtgcaggtgccgatggccgcgggtcgtcggcggcggttgcagatgaaagccgatctcgtggagggggaggcggcgggcggacgggcacgggcgcggtatgctatgctgctgggatcaaacagggccttgccgcgcaggagggcggggccgcgagaggtaaggagctgcgcatgcgccaagggagcgccccgaatttctgtccgccggtcgaggagggcgtgacgctcgaattcgtcgacgagagaggcgatgccgtgacgttggagttcctcgggctcgtgctgcacggcgcgcgccgctacgggttcttctttcccgtgtcggaggacgagccggccggctcgtcgggggaggtcgtgctgttggaggtgacggagctggacgaggatggccagccctccgccttcgagctggtggaggacgagggcgtggcggccgaggtgtatgctgactttcgccaggctaccaaggatctctacgatttcgcggactgaccgcgcggctgctcgcgcgagcttaccggcgcccttccgggcacgatgcggcctgcacggcaatggcacccccgagtgcggggcccaatcgttccggggccggttcgcggccctgttcgccggacgtcagcgcccgaacggatcccaaccgccctcgggcttcaccagctcggactgggcgatggccgcaaggtacatgacctcgtggtttatggccttctcaaggcggcagacctcctcctcggtttcggccatggcgaatatgtgggcagttgcggccttgatcgcctccatctgccgttcgtactctgcgtgctccatcgttgtccccgtatctcggcgtccggtcgcgacacttacaccggtgcttatatataagcgtgtgaccagttgttttatccgtgtgctgtaaactatagtttacgacatttctccggcccgatactagccttttcgagcatggggaatattacactgaaagcccaactcggtgccaatattgcggaactgcgaacgagggccggactgtccaagactacgttcgcgctcatgatcggggtgagcaggctctacctgggcaacatagagagcggtgccgcaaaccccacggttgacgtgctggagcgcatcgccgacggcctgggcacgagcgtgagcgcgctgttcggcgacgaaggctgaaagcggggctccgagcgacggaaggctcacgagggccgaccggtgccaagcgggccttgcggcccgcccttcccgttcgcgccgagggggctagaaaaccagcggcttccactcgtcgtggttgcagatccaggcctgcgggtcttccaccgagaagtacacgagcgtggggtcgtggggcccgtcgtagtgctcgcccaggccggtgaggtggtcgtagcccgcctggcgaatgtcatcgcccacgcggtcgtcaagccctgcgatgccgcgcaggatgagccagccgtggccgggccaccacgacgtggcctcgaagcgctggttggccagcagctcctcccacacgtccttggtggtggccgtgcagaaccacagcttgccgtcctgctcggcggcgaagctgaacgggcgcacgtgcggctggtcgtccacgctcgtggcgaggtaccacgcgggcacgctggtgaggtactggaggacggtctcgtttccggtcatggagtgctcctttttcatggtcgatggtcggtctttgcgttccgggctcggtcgcccggcacggtcttcggcatcgtggttgttcggtcggttgcggggggtctgggggcgatcagggaggggccgcgccgcggacgcggcggcggtcagggcagcatgttcgccaagcccacgcacacggccagcgccgccagcatcccggcggccacgccgtcgcgggcggacagcttgagcgggtgcaggcgggttcgtccctcgccgccgtggtagcaccgtgcgtccatggcggccgagagcgtttccgcatggcggaacgcgctggtgagcaggggtatcatgagcgaagagagcatgcgcatgccgcgcacggggctgctgtccagcccggctccgcggctgatctgggcgtggtagacggtcacgagctcggtggcgaactgcggcaggaaccgcagggcgatgcccatgatcatgcccagctcgtgagcgggaagcccgaagcgggcgaagggcgacagcaacttctccagtgcctcggtcaaatcgagggtgggggtggtcatggtgatgaggctcatgcccagcaggatgagcacgagacgcgcggcgatgaacaggcacgcgcccacgcctcctgcggtgatgcggacgaacgcccactccacgagcacggcgccctcctggtttacgaacaggttcagaagggacgccaccactacgatgaacagtagcggcgcgagcgaccgcgccgcgtagccgagcggaatgcgcgaggccaggtagagcgccgccacgaacaccgctaccgccccgagcgcggccacgttgcgggcgcagagcgcgatgacgatgaaggcgcagcccaaaagcagcttcgcgcgcgggtccaggcggtgcagcgggctctcgccggggtagtagctgccgaaggagaacacgttcatcgtgcgccgcccgccctgccggggtgcggctgcgccgccctgccctgcagcccggcgccctcgtcggaccgcccgcctgcgttcccgtcggcggatccgccggaccgcatgccgtcgtcggcgcccccgcacgcgtccttgccggcgatcccggccagcgcgtcggccagcgacgcactgtcgaacaggacgcctgccggcaggggcaggccccgctcgcgcagggcgttcgccatgcgctgggcggcgggggcgccgagcccgatgccgttgagctcgccggcgcgcaggaacacgtcgccgggggtgccaacctcgaacgtgcggccctcgttcagcacgagcacgcggtcgcagagcgcggccaagtcgtccatgctgtgcgagatcattatcacggtgcggccctgggcgcgcaggccggcgatgagcgccaggaagtcgcggcgcgccgccgggtccaggccggccacgggctcgtcgagcacgaggatgcgggggcgcatggccagcacgcccgcgaacgccacgcggcgctgctggccgcccgacaactcgaaggggctcacgtccccgaactcgtcgaagtccaggttcacgagcgcgagcgactcgcgcacgcgggcgtccacctcctcgtcggagagcttcaggttgcgcggcccgaacgccacgtcgtggtagaccgtgtcggcgaacagctggtgctcggggtactggaacaccacgcccacgtcggcgcgcacgcgggcggcctgcgccttgtcggccacgtcgcggccctccaccagcacgcgcccgcacgtgggatgcaggatgccgttcatgtgctggatgagggtggacttgccggagcccgtgtgcccggcgatgccgaagaactcgcccggcgcgatggcgaagctcacgtcgcgcagcgcccatacggcgtccgggtcgttgccccagtctggatgcggcccccgggagcccttccccttgccggcgcgcttgcgcttgcccttggcggggttgtaggtgaaagagacgttctcgaacgctacgatggcgcccgcgcccttgccgtttcggccggagcgctgcgggcgcccttctccgtcgtcttggagtgcggcccggggatgctctgccccgggttcttcggcggcaccgagggcgtcgtcgttcggtgccccgtccccgctctccgggtccgccgcagggcccgcgggcccttccgttaggagaccctcgcgcagcgcggcggcgacggcatccacgagcggtgcctcctccacgcacacgggcacgtccacgcccgcttcccgcagcttgagcgacaggttgcaggcgaaggggacctccaggttcaagccggccagcacgtcggtgcgcacgagcacgtcgcgcggggcgccgttgcacgccaccttgccgcggtcgagcaccaccacgcggtcggccgcggcggcctcctccatgaagtgggtgatcatgaccacggtcatgccgcgcccgttcagctcgcggcacacgcgcatgaggcccttgcgtccccgcgggtcgagcatagccgacgcctcgtccagtatgaggatcttcggctgcatgccgagcacccccgcgatggccacgcgctgcttctggccgccggacagggcgttcgtctcgtgcttctcgaagcccacgaggcccacctgcttgagcgcgtcgcgcacgcgccggtgcagctcggccgtttcaacgcccaggttctcggggccgaacgccacgtcgtcttccacgagggaggccaccagctggtcgtcggggttctggaacaccatgcccgctgtggagcgtatgcggtagacgtcgcgcggctcggccgtgtcgtagccatcgacggtcacggcgccccggtcgggcagcaggagcgcgttcaggtgcttcgccagggtgctcttgccgctgccgttgccgcccaagatgcagacgaactcgccgggcgccacgtgcaggtcgaccccggccagcgccaagcgctcgccgtcgtaggtgaactcgatgtcggtgcagtgaatcatatgcttccttactgcgaccctacgggccggttgggtgccgtggggggccgggttgacgatgcggcctaatgtcctttgacctgcgacttcttcggcgttatcaggttggagacggccttgtacacgatgagcgtgagcacggcgttcaccgtgcccttcaccaggttgaacgggacgatggcgggcagcagcatgggcaggatgacgtccacgctgccgtaccagaacagcacgccgatggtcaggttcgccgcgatggcgcccgccgtggccgccagcacgctcgcagccaggccgatcacgccccgcttgaaggtgcgcttgcggcggtagagggcggccgccggccacacgaagcacagcgtggccacgatgttcatgagcgagcccacccactcgcccaggatgagcccgtggatgacggctgccacggcgcccacggcgatgcccgcaccgggcccgaaggcgaagccgcacaccatggccggcatgagcgaggggtcgtaggtgaggaacgtgacgccggggatgagcgggatctggatgaacgacagcaacgccgcgatagcgcacatgagggccatcgtcaccagctggcgggtatcccacttgttcgtgttcgtgaattcgaggttctgcgcgctgcgcgccttctcggccatgatcgaccttctttccgcggggcgtcggctgttcgggtccgcctcccgcctcgcagagaagaagcaagcccgtatgaattccactcctgccatacgggcttgtgattcgcaaggacgcggccggcctttacggcaaaacggtcgcagccgacgcgatatctgcctcttccatccggactttaaccgttggtcccggaatctcaccggtgtcagcctgcccgggcgcgctcggctggggccggcgtgcgccgtcgcagggtcgcggactctcggcttggcgcggcttgcgctggctgtccgattaccgccagtgaggaatttcacctcgccctgaaacagaatccatcgcggcccattgtagcggccccgacggccctgcgcaaccagcgtgcctgaaagaccggacagaaacgtcgaagtggtcagaaacgcgggcacgccggcatgaggcttcccatatgtgtgcgtcggctacagttttgcgctcggtgctcgccgatcgggtacaataccgcgccgtatgcttgaaatactgaacagtatcgacgcgttcgtctgggggccggccatgatcgtgctccttctgggcacgcatgtcttcctcaccttcaagaccggcttcatccagcgcaagctgccgcaggccatccgcctgtcgttccgcaaggacccccagggcaagggcgacatctccaacttcggcgcgctggccacggcgctggcggccaccatcggcacgggctccatcgtgggcgtggccaccgccatcctggcgggcgggccgggtgcggtgttctggatgtggatcaccggcgtgttcggcatcgccacgaagtacgtggaggtgtacgcctcggtgaagtaccgcgtgcgcgaccatgccggcaacatgctcggcggcgccatgtacgtgtgggagcgcgcgttcaagaaggaggacggccgcaccccctggtgggcgaagctgggcgccgtggcgttcgccgcgttcgccaccgtggccaccatcggcacggggtcggccgtgcaggcgtccgccatgacgggcatcatcgcgtcgagcgtgccggtgcccgcctgggccatcggcatcggcatcgtcgtgctggtgtcggtggtgatcttcggcggcgtgcgcaccatctcgaacgtgtgcgagaagctggtgcccgtcatggccgtggcgtacgcgggcggctgcctggtcatcctggcgctcaacgccccggtggtgggggaggccgtggcgctcatcttccagtgcgcgttcacgggcaaggcggccttcgggggcgcggtgggcagcggcatcatgatggcgctgcagttcggctgcgcgcgcggcctgttctccaacgagtcgggcctgggctcggcgcccatcatcgcggccgccgcgaagacgcgcaacccggccgagcaggcgctcatcgccatgaccggcacgttctggtccaccgtggtcatctgcgcgctcacgggcatcgtgctcgtgtccaccatgatagcgaaccccggcatccaggccgacgtcctggcgaaccccacgctgttctcgggcgccgagctggccagcgccgcgttctcgaagatcccctacatcggcacgcccatcctggtgctgggcatggtggcgttctcgtactccacgatcctgggctggtcgtactacggcaaccgctgcgtcacgtacctgttcggcaagcgcgccatcaggccgtaccaggtgctgtacgtggccgtggcgttcttgggggccatcggcgtgggcgatgtcatgtggacggtctcggacatcggcaacgcgctcatggccatcccgaacatcgtggccatcctgctgctgtcgggcctcgtggcccgcggtacccgccactacgtctacgacggctgcctcgacgaggtggacgaggaccccatccccgtcgtggagagcaagtagcggcacccgccccgcatgccggcggttatgcgcgcttcgatgccggggcgtcctccacggctgcctcggcaaggggggcgggggccgggacgaagctgaacttaaactccacgccgagcgccagctcgaacttcgcgatggtctccagcgtcatgttcggctgggtgttcagcaggttggacaggtgcgacttcgatatgcccatacggcgcgccagctcggtcttcgagagcccctgctcctgcatgagctcccagatcatgacgctgatgtcgagcgcatggtcataggcgcgcgtgcccggcgtgtggaagtcccgcatgaaggcgcgatcgtcgcgttcctcaatcgccatcgtattcctcctgttcaagcaactcgacgacaaggcgctgttgccgggttgcgcttgcaataagagtggccggaacgctcccggttccactgtgcccttgaaacggccggagtatcacgattgcctcaaccgtgcggatatgcgccataaccctggccgctccggaaaagttcttgatctcgtacagctccggcgagatgcggcggatgcgcctggcggccgttgcccattcgagcccgtttgtcgtgattttctgcaccgtcgagaggaggcgcttcgccttgcccctcgatcgtgggtcgttcagccaatcgtcaagaaagctgctcgtgccgcttccgtcggataggacataatagaatacgccgtcatccagtcgacgcttgatgagcctccttcccgatccattctttagttcatttttaagtgaactcatactatcacgcccttttccccatggcaagcgccaaagttgcactataatgcaaaaatgatactaacacgtattcgcacgatagtgcaatggaagggcggagaagatgcctcgggaagacggcgtgatcgattgggaggcgtacggggtgctgctgaaggcggcccggttggcgaacggatacacgcgggggcgggcgctctccgacgcggtggaggagaagacggggatgcggatatcggagcgggccatctacacgctcgaggatgcgagccgcgcgccctcggccgatgtgttcttcgcgttgcagcaggtgctgcccgagctgcgcgacccggaatacatgaagccgctgttcaagcgcaacggcatcgaggtcatgctcgtggccttctgaacgccgtggtgccgggcgtgtccgcgaggggctttgccgctccccgcacccgcgcgtcggccgcggccgggcggcggggctccgctcgctgggaatttcgcggtttacggcgcgttctgccggatcctgcacctataatccaaccactttagtgcgcgaaagcgcccgtgccgaaacggcttcatcgaattgccagggcttcccggagacggaatctgtttcggcaacggcactgcgcgagggggattcaccagcagaaaagaggttgccaatggacatcgtccagctcatcaccgacatcgacgcgttcgtgtggggtccgccgatgatcgtgatccttctggggtcgcacctgttcctgacgttccgcacgggcttcatccagcgcaagctgcccacggccatcaagctgtcggtgacgaaggacccggacgccccgggcgacatcagccagttcggcgcgctgtgcacggcgctgtcggccaccatcggcacgggcaacatcgtgggcgtggccaccgccatcctggcgggcgggcccggcgccgtgctgtggatgtggctaaccggcgtgttcggcatggccacgaagtactccgagacgttcgccgcggtgaagtaccgcgtgaaggaccacaacggcaacatgctcggcggcgcgatgtacgcgtggcgccgcgccttcgagaaggacggcaagacgccgtggtggggcctgctgggcgccggcgcgttcgcgctgttcgccaccgtcgcgtcgttcggcatcggctcggccgtgcagtccagcgccatgacgggcatcatcacgtcgaacttcccgggcattcccgcatggggcatcggcctggccatcgtcatcatggtgtccatcgtcatcttcggcggcgtgaaggtcatctcgaaggtgtgcgagaagctcgtgcctttcatggccatcgcctacgcgtggggttgcatcgtcatcatcggcatgaactgggagtacgtatggcccgccatctgcctcatcttcgagtgcgccttcacgccgaaggcggcgttcgggggcgcggtgggcagcggcatcatgatggccctgcagttcggctgcgcgcgcggcctgttctccaacgagtcgggcctgggctcggcgcccatcgtggcctcggcggcatccacgcgcaacccggcgcgccaggcgctcgtgtccatgaccggcacgttctgggacaccgtggtcatctgcgcgctcacgggcatcgtgctggtgtccacgctcatcgcgaatcccggcatcctggagtccgggcagatcaaagccggcgccgacctgacgagcgccgccttcgcgtccattccctacgtgggcacgcccatcctggtcatcggcatgatcctgttcgcgtactccacgatcctcggctggtcgtactacggcaaccgttgcgccgcgtacctgttcggcaagcatgccgtgcgcccctaccaggtgctctatgtcatcgtggcgttcctgggcgccatcggcatcggcgacttggtgtggaccatctcggacatcacgaacgcgctcatggcagtgcctaacatcatcgtggtgctcatgctgtcgggcctgatcgcccgggagacgaagcattacgtgtgggacaagaacctggacgaggtggacgagacgcccatccccgtgctggaatcgaagtagcctgcggcgcaggtcgcgggccgtcgggccggcacgttcaatgatatgctgaatcacggagggagggcgagcggtcgtcctccctcatcttataatcgaagcgctttgcagcgcgccggccgagaggggacgtcgcgcgccctgccccccggccgaccgtcgcgccattccgggacagggaaccctactcgcgtttcggaaaggaagtccagcatgtccggttctcagaaggccttgaaggtcgtttccgtcctccttatcatctatgccgtggccatggcggccttcggcatcttcatggtggcgggcggctcgtttctggtcggcgagaccgtcgatgtggacggcaccgcgcaggcggccaacgtcatggccgcggcgctgggcgccggcaccatcgccggcggcgtcatcgacttgatcatcggcttgctgggcctgcgcggcgccaagaacccgcgcaaggtggggccgttcttcgtgctgtgcatcatagggctcgtgctggggctcgtgagcctgggcatgtccatcgcgcagggctcgttcaacccgtggtcgctcgtcagcctggtgatcatcgccgtctgcctgtacctgtctgcgcaggtgaagaagcaggcataggcggcgcgcgacgcggcgggggctcggggctgctgcgcctgcggggcgtgggagcccggtgcccgagagcgcggcagccggccagcctcgtcggcgagggcggttgccggcccacggcgcagcgtgcgcccctgccggtcgggcgcatctgcgggcgcccctgcttccggcaggcgccgcaggcgtttgagggtttcgcgtgaacggcctcccttcccagcgaagcggaggccgtttcgcgtggaggtgccgtagaatgggcgcaagcaggcgggcggcttcccgaacgggccgtctgctggacgagcaagaaagcaggagcagaacatggccgacgaaccctggggactgaccgccgcggaggtggccgagcgcatggcgcgcggcgacgtgaacgccgacgtggacgtgaagacgcgctccgtgggccagatcgtgcgggagaacgtctgcacgctgttcaacgccatcaacgtgatcttagcggcgttcgtgctgctcaccggttcgtacaagaacatgctgttcatgatcgtcatcgtgtgcaatgtcgtgataggcatcgtgcaggagatccgctcgaagatcaccaccgaccgtttgagcatcgtggcgggctcgcacgccacggtcatccgcgacggcgcgcgcacccaggtggcgttgcatgacatcgtgcgcgacgacgtggtggtgctcggccgcggtgaccaggtgccggccgacgccgtggtggtatccggcgaggccgacgtgaacgagagcctgctcaccggcgagagcaacctcataaagaaggcttccggcgccgagctcatgagcggttcgttcgtgaatgccggcaccgtgtgcgcccgggtggtgcacgtgggccacgagaactacgcggcgaagatcagcgccgaggccaagcagcacaagaaggtcaactccgagatcatgaacagcttgaacggcatcatcaagttcgtgagctgcgtcatcttccccgtgggagcgttgctgttcgcgcgcatgttcttcagcggcgaggaggtggcgctgaaccaggccatcctgtcaacggcggcggcgctcgtgggcatgatccccgaggggctcatcctgctcacgtccacggtgctggcggtggccgtggtgcgcctggccaagagcaaggtgctggtgcagcagctctactgcatcgagacgcttgcgcgcgtggacacgctctgcctggacaagacgggcaccatcaccacgggggccatggaggtggcggccgtggtgccggttgcaggcgcgggtgcggcggatgctggcgtgaagagggcgggcgggacggtgctccgggcgatggcgcgtccgggggtgccgcggcggacatggcggcgtcgggggggcggcggcgtgggggcggttcccgcctcgccgcggagtgccggatacgcggccgaactcgacgtggcgctggcctcgctcgccgcggcggacgacgacccgaacgagacggcgcaggccgtcgccgcgtactatgctgcgcgccccgccgtgcgcccgctcgcgcccatgcgcacggtgccgttctcctccgataagaagtggtcgggcgcggccttcgaaggccgcgcctacgtcatgggtgccggcaggttcgtgatgggagacgcgttcgacgcgttcgaggagcaggcgggcgagctggccgccacggcgcgcgtgctcgccgtggcgcgcgtggagggcttcgaccccgacggcgccatcgtgggcgcgccggcgctgctcgggttcgtgtgcatccacgaccagatacgcgccacggccgcccagacgatcggctatttcaaggaccagggcgtttccgtgaacgtcatctccggcgacgacccgcgcacggtggcgggcattgcggcccaggtgggcgtcgagggcgcggaagagtacgtggacgccacgacgctcgagactcccgagcaggtggccgacgccttgcgtcgctaccacgttttcggccgcgtgaagcccgagcagaagaagcagttcgtcgtggcgttgcaggagcagggccatgtggtggccatgaccggcgacggcgtgaacgacacgctggccctcaagcaggccgactgctcggtcgccatggcggccggctcggacgcggcgcgcaacgtggcccagctcgtgctcgtggacaacgacttcgccagcatgcccaaggtggtggccgaggggcggcgctccatcaacaacctccagcgctcggcgtcgctgttcttggtgaagacgcttttgtccatgacgctggcggtgctgttcgtgctgctgccgtggcagtacccgttccagcccatccagatgacgctcatcagcgcgttcaccatcggcatcccgtcgttcgtgctggcgctcgagcccaacaaggagcgcatacgcggccgcttcctggagaacgtcatcgtgaagtccatccccggcgccgtgtgcgcggtgctgggcgtgctggccgtgaacgcggtgggccgcctggcgctggggctggactacggccaggtgtcaacgctgtgcgtgctgctcacggcctgggtgggcgtcatgctcatcatccggctgtccgtgccgttcacgcccatccgcaccgcgcttctggtcgtggtggtgggtggcaccgtgctgggcgccacgctgctgcacgggctgttcggcatcgagccgttcaccgtgcctatggccgtgctgctcgccgtctgcgccgttgcggcgtcggcgctgttccactggctgtacggcgtgttcggccgctggcacgaggccaggctcgcccgctgggcgtaaacggtgccctgctgggcggaacggcgcagaccggtgctccgacggccggaaacgccgaggccctgcgctgcttcctgccggcgcctcatgtggcgacggcgtgagcggcgttcttcctgctgcggcgttgcggtatgatggcgggcgaaggaagcgaggaagggaggcggtgggctcatgggccggttggcgatcattggcggcggggcggcggggctggcggcggccgtgacggctgcctgcgagctgcgcatgctcggcgttcccggcgacgtggcggtgtacgaggccgacgagcgggtggggcgctccatcctggccacgggcaatgggcggtgcaacttctcgaacgcgcgcatcgatgcaggagcctaccgcaacgcggcgttcgtgggctcggcgctcggtgcgttgacggccggctcggacccggtgcatgcgttcttcgccgacctggggctcgtgtggcgcgaggagggcgaagggaggctctacccgctggccaacaaggcgacgagcgtgctcgacgtgctgcgggcggctgcggcggacttcggcgtgcgggaggcgtgcgggcggcgcgccgtgcggcttgacgtgcccgatcgtccgggcggtcgctttcacatccgcttcgccgacgggacggtggggcatgccgacgccgtggtgctcgccaccggcggccggacggcgcgcgagctgctgccggagggcatcggctttgccgccgcgcgcccggtgctcggcccgctgcgcaccgccaccgacgtggtgaggcacctgaacaacctgcgcgtgcgctgcgccgtgacgcttgcggggcccgacggcgcgcccaaggcgcgcgaggcgggcgagctgctgttccgcgactacggcgtgtcgggcatcgcggtgttcaacctgtcgcgctttgccgagccgggcgaccggctgctcgtggacctgctgccgcagatgcccgaaggagactgcgcgggtttcctgcatgcgcgccgcaggcgcctttcggccgacggccgcccgctttcgcgcgaggcgttcctgcgcggcatgctgctgtcggcggtggcgcgcgccgtgctggaggaagcagggcttgcgcccggggcgcccctcgccaagcgcgatgtgccggcgctggccgccgcgctcaaggcgttcccgctggaggtgcgcggcataggcgacgagcgccaatgccaggtgcggcgcggcggcgcggacgtggccgcgttcgacccgcgcacgctggaggcccgcgccgtgcccgggctgcacgtggtcggcgaggcgctggacgtcgatgccccctgcggcggctacaacctgcactgggcctgggcgagcggcatcctggcagggcgcgctgccgccgcgcggctgatgggctccgatgacgtggcgcagggcgagggacgataggggggtagcgcatgctcgaggtgtccaacatgagactgccgctcgacgcagggctgccgggtgcggcgggcgaacggctcgtgcgcgaggcggcagcccaggcgctgggcgtgccggcggccgaggtggcggcagtgcgcgtgctcaagcgcagcgtggacgcgcgcaagaagcgcgacgtgcgcttcgtggccgcccttggcgtggagctggcggacgcggcggccgaggaccgtgcgctcgcggcggcgcaggcccgcggtggggcgggcgccgcgaagggcacgcacgtcaagcgccgcgtcccctacgagccgctcgcggtgccgcgcgcgggggccgccgccggggcggagccgcgcccggtggtggtgggagcggggccggcggggctgttctgcgcgctctacctggcgcgggccgggctgcgaccgctcgtgctggagcgcggcagcgacgtggacgagcgcttggccgccgtggccgcgttcgatgcgggcggcgacctggacccgcacacgaacatccagttcggcgagggcggggccggcacgttctcggacggcaagctcaccacgaacatcaagaacccgctcgcgccgcacgtgctgcggtggttcgtggacgcaggcgcgcccgaggagatactctggcaggcaaagccccacatcgggaccgacctgctggttgacgtggtgcggcggctgcgcggccagataatcgcggcgggcggcgaggtgcggttcaacgcgcagctcgcgggcctgcggttcgaggacggcgcgcttgtcgaggcggaggcgcgggacgtgcgcacgggccgcacagagcgcatgccggcgcggcgcgtcgtgctggcatgcgggcactccgcgcgcgacacgttcgagctcgtgcacgaggcgggcttggcgctggagcagaagccgttctcggtgggcgtgcgcatcgagcacctccagcgctccgtggacgaggcccagtacggagcggccgccgcgcacccggcgctcggcgcggccgactacaagctggcggtgcacctgcccgcgcgagggggcgaggacgcagggtccgacggcggcttcggcaggagccgcggcggcggcgcaggcggcgagggccgcggcgtgtacacgttctgcatgtgcccgggcgggcaggtggtgtgcgcggccagcgaggcgggcggcgtggtggtgaacggcatgagccgcttcgcgcgcgacggcgagaacgcgaacagcgcgctgctggtgggcgtggggccggaggacttcgggagcgaccacccgctggcgggcgtggagctgcagcgccgcatggagcgggcggcctacgaggcggccgtggcggccggcggcgcgccgtaccaggcccccgcgcagacggtgggcgacttcctggccggccgtgcgggcggtccgagcgccgcggtgcgccccacgtacgcgcgtggcgtggcgtggtgcgacctgcgggactgcctgccgccgttcgtggccgacgcgctggccgaggcgctgccgcttctcgacgcaaggatgcacggcttcgccgatgccgacgccgtcatgaccggcgtggagacgcgtagctccagccccgtgcgcatcgtgcgcgacgagggtctgcaggccgtgatggcgggcagcggggccgcggctgcgcaacgcggcggcgtcggggctgcaagcgcccggcgcacggccggcgatgcggcttccggttcgcgcccgtccgtcgccggcgagccctgcggcagcggcctctacccctgcggcgagggtgccggctatgccggcggcatcatgagcgccgcctgcgacggcctgcgcgtggcccaggcggtggcgggcgacgtcgcctgctagaactcgatgccgcgccgcgcgggaacgccgtcatggtaatagtgcttcacctcgcgcatctcggtcacgaggtcggctgcggccatgacctcgtcgctggcgccgcggcccgtgacgacgagctcgaccccctcgggcttctcgcggatggcgtccagcagggcgcccggttcgaagtagccgagcgaatcggccacgttcgcctcgtcgagaaccacgacatcgtagtttccgctgttcatggccttgattgtgcgggctaggccgtcgcaggccgcctgcgcgtcgcgcagcgggtcgggggcggacagctcgtcgcccgtgccgaactgctcggtcgtcaccggcgcgcccggcaggggcatcgccctgaacgcgctgacctcgccggtctcgccgtgcttcatgaactgcccgaagtacacgcgcaggccctcgcccgccgcgcgcagggccagcccggcggcggccgtggtcttgcccttgccgtcgcccgtgtacacctgcaccttgccctgctccatgccgctcctttcgcggagcgtccgttccgggcgctcccgttcgcctgccgcgctcgagggcgcgcgtcgcgcgttcccgcccgcgtgccgtcgacgcccgcgcgtcacgctgacgggcccaatcggcgcggtgcctgctccgtcagtcgcccagctcgcgttcccagtcgaagtcggggggaggcgccagcggcacgttcccatcgcctccgtcggagtccagccggccgtcccattggcaggcgcccatgtccacgtgctcgtcatcggagaacgtgacgccctcctcttccagcatctcgcgctgcacgtcggggccgccgaaggcgtagccgcggcacaggcctccgtccttgaacacgatgcgatggcaggggatgtggttcacctcggcgcccgggtcggtgttcgcgtgcagcgcgtagcccacgtagcgggccgaccgcggagcgcctatcaggcgcgccacctgcccgtacgatgccactttgccgtgcggcacctgccgcaccaccgcgaacacccgctccgagaaatcgcccatgacaccatccttccgcccgcgccccgcgcctttccctgctagggtatcgcattgcccgcggccgcgcaaagggtagcccgcccgctcgcctcaaccgcagtttgaggaatatgtggtttcgacggctcggtgcatacccgcccaattcggcttcccttttcctcttccgcaccctatgctgaaacggagaggcttatgctcgatgccttggggactgatcgcttcttcacacgggaggttcatgatggcactgcgacgcaaccggcggggagacggcgcggacgagcgcgcatcctggagcgacggcggggcgacggcgccggtgtctgcgcatcccatcggtgcagcggcgggcgaggacgcctccgcgcgcatcgttcctgcggcgcccgccgcccccgcgatgcccgccgccgagcccgcgccgcaggcggcccccggcgcgaccgccgcgctcgccggcatcccgcatgctaacgtccccggctcaaccgacccgttgggtcccgcggacctggtcgacgccgaggcgctcgccgacatgcgggcgttcaacgacctcaaggcgaagcgcaagaagcagcgcaagcgcaagatcatcatcggcgtcgcatcgaccgtggcggtgctcgccgtcgcgggcggcgcgttcgcatggtacacggccgaccaggcggccaaggcgttgcagaacatggccccgcagaccggcttcgtggagcagggcaccttcgtcgagacggtgtcggcctccggcaacctgcaacccgtcgcgtcggtgagcgccacgcccgaggtggacggcatcgtgggcgaggtgctcgtggccgaaggcgatgcggtggaagagggccagacactgttcaccgtggtcaacgacgaattggacaaagcggtgaaccaggcggcccaggggatcgaggaggcaaagaacggcgtggcccaagcccagaacgccgtgaacgacgcctaccacgccaagtccgccggccagcaggcggccgcgaccgcgcaagcccaagcgcaagccgccgcggcggcagccaaggaggccgggggagctgcggtcgaatcgttcgccggcgagcaggcgtccttcgacgagtccagcgcggattccgccatcaggtcggccgaactcgccttgagcaacgcgaacctcgcgctgcagaacgcgcagagcgcttacgacgaggccgtcgcgcgcgccgccaagcgcacggtgaccgcctccatcgccggcagcgtcgtcgcggtgaacatcgagcccggcaaggcgctcggggccacggcgagcgccgcgacctcgcccgtgcagatcgccgacctgtcgcagatgaccgtctccatcaacgtgaacgagatcgacatcctcaagatcagcgccgaccagaccgccgaagtcacgttcaccgccgcccccgacctcacgctgcccgccaccgtggtgagcatcgccaccacgtcggccggctccggcgacccgtcgggcggcgccatgtacggcggcatgggcggcgccgtcacgtacgcggtgaaactgctcatcgccgagcccgacccgcgcctcaagcccggcatgaccgccaaggccaccatcaccacgaccaccatcgacaacgcgctcatggtgcccatctcggccgtgcagtccgacggcgcgggcggcagcttcgtgatggtgctcaccgaccccgagacgcaggagatggacatgcgcgaggtggaggtcgtcgcgtcggacggtctcacgtctgtcgtgaagggccaggtgaaggccggcgacgaggtggtcgtgagcggaggcgcgggcggcgcgccgggcgacatgggcatggaggccggcggcatggccgcggccgactccgccggcagcgtcatggtggggtagcgtcatggccaacgtggttgaagccgtcgacctgcaccgcatctacgagagcgcttcgggctacacgcacgccctgcgcggcgtgtcgctgacggtggcgcagggcgagttcctcgccatcatgggcccgtcgggctcgggcaagtccacgctcatgaacctgctgggctgcctcgacacgcccacgcgcgggcgctacctcctcgagggcatcgacgtggccgactatcgcgacgacgagctcgccgagatccgcgccacgcgcctcggcttcgtgttccagtcgttcaacctgctgccgcgcgccaccgtgctgcgcaacgtggtgctgccgctcatctacacggcctgcccgcgcaaggagcgcgagctgcgcgcccatgcggcgctgcgcagcgtgtcgctcgacgagcggctgtacgaccaccgcagcaacgagctgtccggcggccagatgcagcgcgtcgccatcgcgcgcgccctcgtgaacgacccggcgctcatcctggccgacgagcccaccggcaacctcgacaccgccacgggcgacatggtgctgaacacgttcaagcgtctgcgggatgcgggcaagaccatcgtgctcatcacgcacgagcccgacgtagccgcccatgccgaccgcgtggtgcacattcgcgacgggcgattgtacgaaggggagcgcgcatgaggatcggagacctgttctacgaaacctggcacgcgctgtccgcgaacaagggccgctcgctgctcaccatcctcggcatcgtcatcggcatcgcggccgtcatcgccatgacctcgctcatcgcgggcgtgcagaacatgctcatgggcgagatggggctttcccaggcgcgccaggtgtccatcagcgcctactcgccgcagggcatcacgttcgacgacctggacaagctcgcgcagggcatgccggagtacaaggtcatcaccggcgcgtcgtacgcatcggccgaggtctcgacggccgacgggcagaagaactacacgagcatcatcggtgcccgccccgagtacttcacggcgaacgggacgaagctcaaggagggccgcttcttcaccgagagcgaagagcagaacgccgcgcggctcgtggtgatgggcggctgcgagatggccgtgcagatgctcggcgttcccgacaccgaggcggtgggcaagacggtgcgcctcggcaacgacgactacacggtgatcggcgtgctggagacatcgacgttcatgggcgggggcgggacgttctacgcgccctacaccacggtggagacgcgcatcggcaataccgggggcatccagcagatcgtcggcttcgcgcgcgagggcaccgacatggatcgtctcgtcgagacgactcaaaccttcgtggcgcaatacttcaacctggagcccgaaaacgtgtacgtgtcgtcgctcgatgccgtcatcaagcagatggagacgatgatgacgtcgttttcgctgctcatgggatcggtagcgtcgatctcgctgttcgtgggcggcatcggcatcatgaacatgatgctgacgaacgtcaccgagcgcatacgcgagataggcctgcgcaagtcgctcggcgcgcgtcttcgcgacatcacgaagcagttcttgctcgaggccatcatgctgtgcgtggccggcggcgcgttcggcatcgtgttcggcttcttggccgcgtggggcttgggccaggtgatcggggcggtgcaggcgggcatgaccgtcacgccggtgctcgcgccgggcgtggtgttcggcgccgtggccgtgcgcgtgctcatcggcgtcgtgttcggctactacccggcccgccgcgccgccaagctcgacccggtggagtcgctgcgctaccagtagcggaaggaaaagctcgacccgttgcgttcggcaacgcgcgccgcaccccggtgcgccgcaaacgcagggctggaaggcttggaaagggagcatatggaaaacgacgatccgcgcagctgcgccaactgcgccgtgcgggcttgcgacgaccgtagcgccgagggggccgcgcgggcctatccctcgttctgcctgacgcagcgcacgcccgacgaggagttcgaagacgcggccgccctctatcgggacgaccccgagacggcgcgcatcttccaagcagccgccgaggtggagagcctcttctacagccagctcacgcgcgtggaggaggtcatggtgttcgcccggcgcataggcgcgcgcaagatcggcatcgccacgtgcatggggctcatcgacgaggcccaggcgttcgcccgcatcctgcgcgccaagggattcgaagacgtgtgcgccgtggcctgcaaggtaggtgccgtggcgaaggagcgtgcgggcatcgccgacgacgtgaaggtgcatcccggctgcttcgaacccacgtgcaaccctatcatgcaggcgcgcatcttgaacgaagccggctgcgacctgaacgtgatcgtgggcctgtgcgtgggccacgacacgctgttcatgaagcatgcggaagctcccgtgacctacctggtggtgaaggaccgcgtgctcgcccacaaccccgcagccgcgctctacacgaagggctcgtactacaagcgcctcctgtcgcccgaccttcccgagccgcgcccgcgtgcagggaaggaaggcggtactccgacgccgggggacgccgcccaggtcgagtagccggcgcgcgggaagccgccgtccgtgagggggcgtctgcgccgctgcgctcgctgcccggggcgtaacccgccagaccttatttgtccgcgagtctttccgcgccgtccccgcggcgtcggtttggtgctagaatgcgtcagcaatagaaattggctaggatggagcgcgccgggcgcggcgccgggccgccgacgaggctgcccgaggggaatgcgggtgagaatcccgcgctataccagtaaccgtaaacgccgatgagcggaacccgcgatgccccgcagcatcgcccgtctcagatgaggcaaagtcggactacctgtccatcacacctcgaagccctggaaagtgaggttccgatgaccatcggttctcaatctgcgcgctccggttcgggcggtgcggaactacccaagaaactactctccctgctcatggctatggtgctggcgttctcgctcgtgccgagcgccgcctgggcggcggacgcggcctccgagccctccgcacctgccggagtcgccgggcaggacgaagcgctcgaagaggagccggccgccgttccaacggaggagccggcgaatatcgccctgccagatgcgaccactcccgatgaggacgccgaaccgggcgcccccagcgagggtgccgaaccgggcgcctctaccgagcaggcacttgaggaggaggctggccggcagcagctcgacgaggagtctgccggcaccccgattggcgcggaggtcacttccgttcccggggcgtcgccgtccctgctcgcagccccggcttccctcgatggtgtgcgtatcaaggcatcggcgacagctgacctgccgagcaagatcggcgtgggacaatcgctctatgcttgggcgttcatcgaagaagaggacgactggggctgggataccgaagaggtggagatagacgactacaccggtgcgacgttccagtggtatcgaggtgcgaagaaggtaacctatgcctccggcacttctagctatcgcgactacgtcctcatcgacggagcgacgttccaaacctaccaggcaagtgaacccgaccagggctcttacctcgcagttaaagtgacgctgccgggaggaagcgagttctggtcgaaggcctcgacatcccaggtgacggacggcaagacgaagctggcatcggttggggtggccggtaaggcgaagacgggccagacgctcgttgccacggcctacggcgagccgcagtacagttggcaagaccccgaaccggtcacggctggggtgacataccagtggctgcgcagcgcggccgaagacggcgagttcaccctcatcgaggacgcgacgggtgcagtttacgaagtgacggcagaggatgcgggcagctacctgaaggtggttgccacctcctcgaatgcggttgaggctgcagtcgggcccgttgttgcggcaggatcgccggaaaacgaggcgcgcctcgccgcggccgtcgaggcgctgaaaaacgacggcttcagcggctggtgtcccaaccccgtgtacggaagcgataccaacctcaacgtcgtgatggaggcggagctcgcaaagcttggattctccgatgtaacctcgcaggtttcctcggccacgttcgagagtcctgaccccaagcagaccggcggtatcgatacgtcgagcggctcctccaacggcgacatcacgtacttctatgtctcccccgacgagaagggcgcactcgactacagcgtcatccgccgcctcgacctggagttctcgctcgcctgcggcgatgcgtccaatacctacgcgccgagcaagcccacggcgctcgcatgggacgagggccgggtcgagcgcatgctgggggagaaggctgcatcccttgtggtgggcttcgccttggatgatgaggccgacgccgtcacgcagaatctgacgctgccgaacaagctggaggggaaaccgtggtccgaggtgtcgtggacgtcgtccgacccctcggtggtgaaagtcagcggatacagctggtcaaactacacgggcacggtagtgcgcagcgctgccgaccgcacagtgcagctgacagccgccgttggtatcgtaacgtccggcggcccggagacgactatcgagaagacgttcgaagtcaccgtgaagggcgacccggacaaggtggcggcggagagggcggcgctcgagcagaaggtgggggagaacttcacctgcgacagcatcacgctggccgagacgggggagcctgtcggcgcgagcgcgctgacgggcgacgtgagcctgccgaagccggctacgatcggcgtagacggcaagtactacgaggtgaagtacacggcctcgaccgacgcggtggtgccgaacgggtgggccggcaaggtgtaccgcccgctgcccggcgaggctccggcgcaggtggatatcacgcttaccgtgaccgacaaggcgaacgccgagatcagcgcctccaagacgctctcgttcacggtttcccccatggatcaggccgacctcgaccgcgaggccgcgctcatggagcaggccgtggtcggctatgccgccgcgcttgcgaaaggccaggacgccggcgcggtcacgggcgacctgcacgcgttccagaaggcgtacctcgacgcggacggcaatctggcctgggcgtacgaccatgaggcggccgacgctgcgggcagcggcatcgtgccggtggacctcgagggctacgatcccctgggctcggccggctggcgcctgttcaagtcgagcaacccctctgtcgtgtcccatgagaacctgctggtgacccagcccgcatacagcgcgaaagtcaccgtcgagtcgcgcctggccagcgagaagtacgcgcgctatgcggagcgctatccggacgaccccgtcttccagaagctggccggacgcaccgtggccgccgagttcacggtcgagggcacgagcgggcaggaggacccctacgtcacggccacgtgctcggtgatcggcatggacaaggacggcgcggcgcagacctgggcggcggccgagccgtacacgctcgacgcgggagccacggtggccgatctggccgaggcgctgttcgcgagaaccgggatgacggctgacttcggcatcggcgcatggggatggtcgctcaactccatcacctcgcctttcgacgccgggctgacgctcaagtggggcacgttccagggcttgggctggatgttctacgtgaacggccaggacctcggcgagggagcggacaagtgcgtgctccagccgggcgaccgcgtcatctggcgctacggcgcctgggatgacccggctcccaccgacaagctgtcggtgacgtgcgaggtcatcggcgcggacgccgacggggccccgcagacgtgggcctccgcgacatcgttcgccctggacgagggcgcgacggccgccgacctctccgaggcgctgttcgagcaggcgggtctgtccgcccagacgggtgtgggccaatacggctggttcctcgattccatcgcctcgccgtacaccggcgagcaattgggaagcgtcgagacgtccccgggcgtgtggtcgtactggcagctgttcgtgaacggggagctggcgaaggtaggcgccggaggccacgtgctcgaggcgggagacgaggttgtctggtgctatggctccgacggcacgctgcctggccaggtggcggcctcctgcgagatcgtcggcctcgacgcgaacggcaacgcgcagcggtgggccgcccccgcaacctatacgatggtggaaggcgccacagcggccgatctcacggagcaggtgttcgcagcacagcgcatcgaggcggactacgatcccaacggtacgcacggctggttcctcgactccgtcacctcgcctttcgatccatcgctcacgctggcgatggaatccgtgcccccgtaccgttactggcagctcttcgtgaacggcaagcccacggactatggcgccggctcgatcgtgctgcaaccgggcgacgaggtatcgtggttctattccgaatacggcgcgagccttcccgacctggacgccgtcgtcaccgaccccgatgccccgcgcccgagctacgatgccgcctggcccggcttcggcggggatggcgcggtggaagcgcccacgcccacgcaatcggcggagcaggcgtggtcctacgatttccgcgagggtgcgagcggcgacgtgggcgtgtcggagccgcttatcgtgaacggcgacgtgtacctcgtggtgaacggggagctgcgggtgatcgacgcgtccaccgggacggtcaagaagaaccgcgacgggagggagctgcgcgcgaacgtcggggggaggagcgcctactgcaaccgtccggtctacacggggggcgtggtcgtcgttccgtccgatgacgggagcctcgccgccttcacggccgacgagctggtgtgcgtgtggaagacgaagccgctcgaggcggacggcgcgcagggctaccagtcgctctcctcgctgacggtgaatggatcgtacgtgttcgccgccttcacgacggtcggcgccggcagcgtgggcacgggcggcgtgcgcctgtgcgtggacgtgcgcgacggatcggtgaggtggctgcagcgggacgagccggccgagcagggcggcgcggccggctactactgggccggcgccgccgtgtcgggggccgacctcgtcgtgggcaacgacgcggggctcgtgcagctggtggacggcgagacgggcgcggtgaaggcgacggtcgacgtgggcgccccgatccgcgcgggcgtcgtcgcccttcccgagacggcgcgggccggcgcgggcgaccggttcgctgtggtgtcgagcgacggcgtgctgcacctcgtcgcccgcgagggcgaccagctggccgaggcgggttccgtgaggttcgccggcaagtccacctccacgccggccgtgtcgggtggcaaggcgttcgtatgcggtgccgacgaccaggggtacggcacgctctcggtcatcgacctggcgtcgctttccgtggagcgcacggtgcgcggcgggaagggcgaggcgcagtcgtccccgctcgtgtcggtgcagggcgacggcacgtacgcgtacttcacctgcaacgggctgcccggcggggtatacggctaccggctgggcgacgaggcggcctacacgctgttcacgcctgccgccggcgagcagaactactgcttcgcttccgtcatggccgacggcgccggcaacctgtactatacgaacgacgcgggccggctgttcgccctgaaggggctggacggcgtgcgggtgacgttcgacgcgaagggcggctcgttcgtgccgtcggtcttcgtggcgctgggcaagccggtgctgcgcccgtccgatccggtgcgcagcggttacacgttcgcgggctggttctcagacgaggcgtgcacggcggcgtgggacttcgcgacgccggtcgggtcggctctcacgctgtatgccaagtgggagaagcaatcgggccagcaggaaggttcgacggatggcgagacctcgtcgggcggggcacccggccaacgcacgccgctcggcggtgcgccggcggccgcgcatgccccgcttgtgcaggaggccgccgccaaggcggaggagaaggcggacgcgggagcggcgaaggcgtcgacgcgcgccggggcctcgtcggctgcgggaggcttcgctgccgacgacggaccctcgacgcccggcgtgcccggcggcgtgaacccgtgggccgtcgggggcatcgccgtgggcgccgccggcttggcgggcgccgtcgcgtacgccgtgctgggacgccggcgggtgagcgcttccgcgccgcaggggaagggaaggagctagccatggccgaagacaggaagccggacgaccgcattgccccgcgagccccgcgcacggcggacgaggcggctgcgccccttgaggtgcaggacgagaagcccctcgcccatggcggcgaggtggaggaggcggctcctccgcgcgaggatggggctgtgcgcccctgcctcgatggcgccggcgagcacgctgccgaggccccgcgggcgaagcgcgccccgctgagcgctgcgcagaaggtgggcgtcggcgtggcggccgcgctctccgtcgccctcatcgccgtgtcggcgtacttcgtcgccgctccggcggtcgaggggtcccaggccggcaatctgctcgccaccacgcaggaggctggcctcgcggaccaggcggacgagcctgccgctgcggacgatcagcagcaggcggaggagcaggatggggcgggcggagcagacggggcagcggccggagactccgcaggtgcggacgcgccggcacctgcagccggggcgcccgcgccgctgcccaacggcgcggcgggcgacggagcggcgtcggacggctccgcatccgcctcgtcgagcgcatccgcgcggccggccaccgtaaccgtgagcgtgaccgtggactcgtcggccgccgacgggcgcgtgtcgggcggcgccaaccccacgttcgagcagggcgccaccgtctacgatgcgctcatggcatgcggcctttccgtcaatgcgtccagcacgccgctcggtatctacgtcaacgccatcggaggtttggcggagaaggagtaccccggcgagagcgggtggaagtattctgtcaacggcgaggttatcatgaggtcctgcgacagcgtcgttttgcaggacggcgacgtcgtgcgctggttctacgctcgataggaaggggggtgcggcgatgctcggcagcgggggcgcgaagcccacggcgttcgaccggtatcatccggcggtggcgtttagctacttcgcctgcgtgctcgcgttcggcatggcggcgatgcagccggtctacctcgccctctcgctcgcggcggcgctctcgtacagcatcattttgcggggcgtgcgcgccacgctgcgcacggcgctgtggcagatgccgctcatcctggtgatggcggtggcgaacccgctgttctcggccatgggctccacggagctctttcgcatcggcctgcgggcgttctacctggagagcctggtgttcggcgcctgcatgggcgccatgttggtgtgcgtgctgctgtggttctcgaacgcctcgcgcgtgctctcgtcggacaaagtaatggcgctgttcggcaacgcggcccccacgatcggcctcatgctgtccatggcgatgcgcctcgtgccccagttcatgcgccggggcgccacggtgggcgatgtgcagcgggcgtgcacgtccgcacgcgccacggggctgctcgagggtgcgcgctcgcagctgcgcatgacgtccgtgctgatgggatggggaatggaagactcgctcgaaacggccgacgccatgcgcgcccgcgggtggggcgcccgcgcgcgccgcacgacctaccgtcgctgccgcttccgcgcccgcgacggcgcggcgcttggcgtgctggcggcgctcgcagcgctgaacgccgtgctcgcgtacgtcgcctgcacgcagttccacttctaccccacattgagcgcgctcacggtgtggtggggctacgttccctttgccgtgctggcgttcgcgccgctcgcgctcgaggcgagggagcgtgcgcgatggacgcggtgagggcgcagggcttcgcgttcacctaccccgatgcgccggcgcgcacgttcggcccgctcgactggcgggttgcggaggggtcgttcacgttgctcgtgggtgccaccggctgcggcaagaccacgcttctgcgctgcctcaagcccgcgctcgcgccgacgggcgcccaggagggccgcttggaggtgctgggccgcgagccggccgcgttcgacgccgccgacggcgccgcgcaggtgggctacgtcgcccagaacccggagaaccagcttgtgtgcgacacggtgtggcacgagctggcgttcgcgctggagaacatcggcctcgaccagaacgccatgcgccggcgcgtcgccgaggtcgcgcacttcttcggcatcgagccgtggttccgcgcgtccgtggccgacctgtcgggcggccagcagcagatggtgaacctggcggccgtgctggcgtgccaaccgcggctgctcgtgctcgacgagcccacggcgcagctcgacccggtggccgagaagaacttcctgcatgcgctcttccgcgtgaaccgcgagctgggcatcaccgtcgtcatggcaacccacgcccccgaggccaccgccccctacgccaccgacctcgtggagctggcgaacggccaggtgcgcccggttgccgttccctgcgcgacggcagatgcacccgcacccggccccgcgtccgccttcggccctgcatccgcgatcccctccccacgcgtcgagggcgcgtcaggtgggtccgagaatcctcttctcgacgtggaggcggcgccccgcccgatccgcgaggtgtcctccgcccgcccgatccgcgaggtgtctcccgccgcaactcgcgaggcgcctcccgtcctctccttccgcgacgcgcacttccgctactcccgcgaggccggttgggtggtgcgcggcctggacctggacgtgcgtatgggcgatgtccacgccgtcgtgggaggcaacggctgcggcaagtcaacgttgctgcgccttgcggccggcgttctccgccccgagcgcgggcgcgtggccaaccgcctggccgcccgccaagcgctgctgccgcagaacccgaaggcgctgttcgtgtgcgatacggtggccgaggagctgcgcgagtggcagcgcggctgcggctacggagacgatgcggtggatgcggcgctcgggcgcttctcgctcgcggcgcatgccgcgcggcatccctacgacctgtcgggcggccagcagcagctgctcgccttcgcgaagatcctgctcaccgaccccgacctgctgctgctcgacgagcccaccaagggcctcgacacgcccacgaaacgcgtgctggccgatgcggtgcgttcctgcgcccgctccggggccaccgtcgtgctcgtgacccacgacctggcgttcgccgcccgcgtggccgaccgcgccaccatgctgttcgacggcgaggccgcctgcacggaacctgccgaggagttcttcgcgggcaacctgttctaccgcccggtacctgatgcgttcttccgcacctggcgcgccggggcgggggagccgcgggccgacgacggcccggacggcgggagcagcgctccttcccgccccggcccccttgtctcttcgggcggaggcctgcgcacctccttggagggcgaacctctgcccgctgcgggggcgggcgcgtcgggggctcacacgctcgatcccaatgacgggacggcccgatgagcgccgaggtgctgcgcgcgttggaggtgcccgcgctcttggcagtgccgctcgtgctggccgcgtgcgcctatctcaacctcgaccagagcgcgctgctcaccgtggccacggcgcttacggcagtgggggtgttcttcgccgccttcgagacctcgcgtccctccttgcggcaggtcatgcccacggtggtgctcgccgccctcgcggcggccggccgcatgctgttcgcgcccatccccgacttcaagccggtgtcggccatctgcatcctggcgggcgcggtgttcgggcggagcagcggcttcatggtgggcgcgctcgccgcgctcgtgtcgaacttcttcttcgggcaggggccgtggacgccctggcagatgtacgcctgggggctagtcggctacctggccggcgtgctggccgaccgcggctggctcgaccgcacgccggcgctgctcgcgttcggcttctcgtcggcgcttttgtacggcctgctgctgaacggctggaacgccatcggcttcgtccacccgctcacgctacccgccgtcctcgtgtccttcggcgctgcgctgccgttcgacctcatgcacggcgcggcaacggtggcgttcctcgccgccctgtacctgccttggaagaagaagctcgagcgcatcaagaagaagtacgcgctggtgcccgacggcggcgcgcagtgagttcccgtcagccggccggctgcgcggcgctcggcgatgcgtgttgcggtgcgcacgaggcgacgtgctacaatggcggctccccgcatggtgcagggagggcggcagaaggcgagaaccccatgcgaaccagtacgatcgaccaggcggcccgcgccctcaggcagggcgaggcggtcatcttcccgaccgagacggtgtacggcctgggggtctccgtgcgcgccgcgacaggccccgacgtgctctacgacctgaaggagcgcgatcgcggcaagcccatctcctggctggtgggaggcgcggacgacctcgaccgctacggcgcgcgcgttcccgcgatcgcgcgcaagctggcggacgcgtactggcccggtccgctcaccctcgtcgtacacgcttccgacgaggtgcccgaggcgttccgctcggacgcgggcaccatcggcctgcgcatgcccgacaacgccacggcgctcgcgctcgtccgcgccgccggatgccctctggccaccacgtcggcgaacctctcgggccgtgcggccgccggcgccctcgatgccctcgaccccgagcttgccgcacgcgtcggcacgatcgtgcccgacgaggccgacggcgcctcgagcggcgtggcctctaccgtgctcgactgcacgcaggacccccctgcaatcgtgcgcgagggcgccgtgaccctcgcagatatcctcgccctcgcctagggcgctgctccccattctgcacagtaatcaccgaatttcgacgtttttgcgcgggaaagcttcgcttcccctgcctcccggtgcgaacggctcccgtttcgcctggtcgcgtggcttcgaagaagcgcaagccctgtcgaggtggatgcagggcgtacaaaatcggtgattactgtgctgggagctcgaccagccggacagggggccgcccgcccggcccgccagcatctggccgccagtccgccgacatccgcccgtccagcccgccgacggccggctgcccggctcgccggcacccagccatcgcgcccatccgcccatccgcccgccgcccgcggcttctcgggtataatgaagcctccaaacaactcccggggagggcgcgcatggctgctacggtttccactgctccgatcggtttcctgtcccacgacggcacatcccagatcaggggcctcatctgggcgcccgagcgcccggcgggcacccgtgcgcctgcgccgcgcggcgtcgtgcagatcgtgcacggcatgtccgagcacctggggcgctacgacgagttcgcccgcttcctcgtgggccgcggcttcgtggtgtgcgcgagcgaccacgtgggccacggcaagagcgtacccgaccccgccaagctggggtgcctgcccgcgcacggcggcaaggacgtgctcgtcgaggacgtccacgagctgcgccgcacggtggcggcccgctactcccgccagacgccctacatcctgttcggccattccatgggcagcttcgtcgtgcgcgcctacctggcccgccacgccgagggcctggccgcggccgtcatctgcggcacgggcacccagccgctcgtgctgtcgaaggcgggcaacttcgtcgcgcgccgcatagcggcgtcgaagggggaggactaccggagcgccttcctcgacggtttgggtgccggcgccttcgccaagcagatcgagaacgcccgcacgccgttcgactggctgtccaccgacccggccgtcgtggacgcctacattgccgacgagatgtgcggcgccatgttctccgcgggcggctacgccacgctcaccgacctcacgggcgaggtggtcacgcgtgcctgcgcggcgaaggtgccccgcggcctgcccgtgctgttcgtgggcggcgccgaggacccggtgggcagctgcggcaagggcgtgcacgccgccgccgagctcctgcgcggcgcgggggtcgagcgtgtggacgaggtcctctactcgggcatgcgccacgagatactcaacgagcccggccgcgcccaggtctatactgacatcgcacagtggatagaggagcacgcatgcgaaaagcctacgtcgtagcgctcgaccagggaaccacctcgtcgcgcgccatgctcgtcgacgcggacgggcgcgtcgtcgacgcggtgcagaacccgttcccgcagcattacccccgcccgggatgggtggagcacgacccgctggacatcctgtcgtcccagctgggagccctcgccgagctcacggtgtcgcacggcctggggcctgccgacctggacagcatcggcatcacgaaccagcgcgagaccacggtcttgtggaaccgcgagacgggccggcccgtgggcaatgccatcgtgtggcagtgccgccgcacggcacccattatcgaggaattgtgcggcgacccggacgtcgcccgccgcatcgcggacacgacgggcctcgtgcccgacgcctacttctcagccagcaagatcaagtggctgctcgacaacgtgcccggcgcccgcgccgacgccgaggccggcaagctggcgttcggcaccgtggacagctggctcgtgtggtcgctcacggacgggcaggtgcacgccaccgacgtcacgaacgccagccgcaccatgctctacgacatccacggaatgcgctgggacccgtggctgcttgacctgttcggcattcccgcgtccctgctgccagacgtgcgcccctcgtcggccgactacggcgtgacggcgaaccccggcgtggtgcgcggcgtgcccatccgcggcgtggcgggcgaccagcaggccgcgctcttcggccagtgctgcttcgaggcggggcaggcgaagaacacgtacggcaccggctgcttcctgctcatgcacacggggtgcgaggcgtgccgttccacgaaccgcctggtcacgacgctggccgcctccgcgccgggcacgcccgggcccgagtacgcgctcgagggcagcgtgttcatggccggcgcgctgctgcagtggcttcgcgacgagctgggcctcatcgacgacgtggccgagacgtgcgccatcgcgcgcagcgtgcccgacacggggggcgtgtacgtggtgcccgccttcaccgggctcggtgcgccgtactgggacgccgaggcgcgcggtgccatctacggcctcacgcgcgggacgaaccgcgcccatatcgtgcgcgccgcgctggagtcgctggcctaccaggtgcacgacctggccgtggccatggaggcggacgcgggcctgccgctgaaggtgctcaaggtggacggcggtgcgtcggcgaacgattttctcatgcagttccaaagcgacctcttgcgcacgccgctgcaccgtccccagaatacggagacgacggcgctcggcgcggcctacctggccggtttgggaaccggcttctggaaggacaccgcgcgcctgtgcgacctgcgctcgtcggacacggtctacgtgccgggcatggaggacgcccgccacgccaagctgctggaaggctgggccgaggccgtgaagcgcacgatggcaagataagcgccccggtcgccccaaggacggcctgccgcccgcccggcgtggcgggaaccgagagcagcgagagacgaatggaaaggaaccgcccatgaacatcagcatcgccagcgaccacgcgggcttcgagcagaagcaggcgctcgcggcgtacctgcgcgaccaaggccacgaggtcatcgaccgcggccccggcaacgacgaccgcgtggactacccggacttcgccgagctcgtcgcgcgcgacgtggcgggcggcgcggccgagcgcggtgtgctcgtgtgcggcacgggcatcggcatggccgtggccgcgaacaaggtggacggcatccgcgccgtgaacgtcattaacccgcagttcgccgagctgtcgcgcgagcacaacgacgcgaacgtcgtcacgctctccggccgcttcgtggacgaggggacgaaccgtgccatcctcgacgcgtttctcgccacccccttcggggagggccgccacgccggccgcgtggcgaagatcatggctctcgaagccaagtgaggtcgaaccgacggcccgcgcccgctcaaccggcgcgggccgttgtgctagcataagtcgcgacatcggcgaccccgctttcgcgaaccgcacccgtatccgaaaggaaccgccatgcccttgacctacctgcccgagcaagaccccgccgtcgccgacgccctgcgccaggagctcgcccgcgagcgcgactccgtggagctcatcgcctcggagaacttcacgtctcccgccgtcctcgaggccgtgggcagcgtgctcacgaacaagtacgccgagggctatccccgcaagcgctactacggcggctgcgagaaggtcgacatcgtggaggacctcgcccgcgaccgcgcctgcgcgctgttcggcgcgaacttcgcgaacgtccagccccactgcggcgcgaacgcgaacctgggcgcgtacgaggcgctcatcgagctgggcgacacggtgctcggcatgagcctggccgagggcggccacctcacgcacggctcgcccgtgaacttctccggccgccactataacttcgccagctacggcgtggaccccgagaccgagacgatcgactacgacgaggtggagcgcatcgccaaggaggtccgcccgaagctcatcgtgggcggcgcgagcgcgtacccgcgcatcatcgacttcgagcgcatggccgccatcgcgcgcgaggtgggcgcgtacttcatggtggacatggcccacatcgccggcctcgtggccgccggcgcgcacccgagccccgtgccgcacgccgacgtggtcacgtccaccagccacaaaacgctgcgcggcccgcgcggcggcttcatcctgtccaacgacgaggacatcgccaagcgcgtggacaaggccgtgttcccgggctcccagggcggcccgctcatgcacgtcatcgccggcaaggccgtcgcgttcggcgaggccgcgcagccttcctacaaagagtacatcggccaggtggtggagaacgccgcgcgcctcggccagggcatgatggacggtggcctgcgcctcgtgtccggcggcaccgacaaccacctgtgcctcgtggacctcacgcccgccgacgtcaccggcaaggatgccgagaagctgctcgagggcgtgggcctcacggtgaacaagaactccatccccaacgagccgcgcagcccgttcgtcacgagcggcatccgcgtgggaagcgccgctgccaccacccgcggcttcacggccgacgacttctacgaggtgggccagctcatcgccgccacggtgttcaacgccgaaagcgctgccttgctcgccgacatccgcgccaaggtggacgcgctcctggccgcccacccgctctaccccgaactcgactactaggaacgaggagcgcatccctatgacgaaagagtacgaccgcgtcaccgtcgtcgaccatcccatggtgcagcacaagctgtcgaagctgcgcaacaaggacacctcgtccaaggacttccgcgccctcgtgcgcgagctggccatgttcgagggctacgaggccacgcgcgacctggccctcgaggacgtggaggtggagacccccatctgcaagaccacgtgcaagcaggttgccggcaagaagatggtgatcgtgcccatcctgcgcgccggcctcggcatggtggagggcctccaggagctcatgccctccacgttcgtcggccatctgggcatgtaccgcgaccccgacacccacgagccgcacgagtactacgcgaagctccccgatagcatcgcccagcgcgatgtgctcgtggtggatcccatgctcgccaccggcggctccgccaccgcggccatccactacctgcgcgagcggggcgtgaagaacatcaagctcgtcgtcctcgtggcggcgcccgtgggcatcgagaccgtcctctccgccgacccggacgtgcagatctacacctgcgccgtcgacgagtgcctgaacgaccacgcctacatcgtccccggcctgggcgacgccggcgaccgcatcttcggcacgaagtaggagaaccccgcaggccgaacccctcccaaacgggagagcagatccatgaaccccccgagccggagagcgctctgcgcgactccggcccggtccgcggcaacggagaaggcggaagggcggcgcggcgctcaccaagcgagttccgcacgagccgaaacgtccagtggacgtttcgtgcgagcaggactgccgagcgactgggcgtcgcgccgcccttccgccgccccgcaggttgaaaggaagcgcgacatgaccgagacgatcgaccaccgccccagctgggacgagtacttcatgaagctggcgaacgaagttgccacccgcaccacctgcatgcgccgcggggtgggggccgtcatcgtgaaggaccgccgcatcctggccaccggctacaacggcgtgcccaccggcatgcgccactgcgccgagaccggctgcctgcgccagcagctcggcgtgcccagcgggcagcgccacgagatctgccgcggcctgcacgccgagcagaacgccatcatccaggcggcgcgctacggcatcaacatcacgggcgcgtccatctacgtgaacacgcagccctgcgtcgtgtgcgccaagatgctcatcaacgccggcatcgaggagatcgtctaccagaacccgtaccccgacgagctggccatgtccatgctcgaggaagccggcatgaagctgcgcgtgttcgaggggtaggatgcggagagggcggagagaggacggtgtccggtcctgaaatggggttattcacctatcaattagttccccctccgcttctctccgaatatacagtttcgcccttccgcaccgcagggtttattcagttttctgccggatttatccaccactcacccgaaaatcggatgtttttgttaccttctcgtagaataaatcgaacgttccgttatcatacgtaccggtttaatagggtgcgtctgcgagcgcatggatttgaaagcaggctatggtactagcgatcgttttgggggcgttgtccggggtgctcggcgttttgccgctgtttctcggattgcgaatgacgaggcgggtgaccgacaccagcaacttgggccatgcaggcgccctgatgctcggtgtgctgttgtcgttcgtcatccttttcctcggagccatcgcctgcgtcgtccttgctcgcgacatagcggtgcccttcgtcttggcggaagcggcggtgctcgttgcctgcgcaatcggctacggcgtatatacatttgtacggaagtaggatgggaaggtaagacacgtgaatccacttgatcaactagcggccgaggtgccccatctgcagcattcgttcgacccggcctttgtgttcggctcgggctcgttcggcatgacccagtacgtgctgtggatgatcatctgcttcgtcatcacgctcatcgtcgtgctgacggcggggaagcgcctcacgctcatccccacgaacaagttcacgaacatggtcgagtacggctacgagttcgtgaagaaggacatgggcgagagcgccatcggccacggctacaagaagcacatcccgttcctggccacgctgttcttcttcatcctcatcagcaacttcgtcgggttgatccccggctgcaagacgcccaccggctccatctccatcacgtgggccctcgccgccatctcgttcgtgtacttcatcttctacggcatcaaggtcaagggcctgggcggctacctcaagtcgttcgcgccggccggcctgcccgtggtcatggtgcccatcgtgtggttcctggagctcttctccacggtgctgcgcgtgctcacgctcgccgtgcgactctatggcaacatgttcgccggccacatggtgctcggcatcttcgccttgctcaccagcgtgttcatcggctccgccatccagggcgcgggcgttgcggtgggcggcatatccatcgcctggatgctgttcctgttcgccatgtacgcgctcgaggtgctggtcgcgttcctgcaggcctacgtgttcaccatcctgagcgcggtgtacatcggcctggcgacctccgaccactaggagatcgtccccgctggccgcgcgagcgggcggcatcgcgccgagggcgcggaaccacggttcataccggcactccacggccggttgacataaacaggttgtccaaagtctccgaggttggctcggaaacggtaaaaggaggaaattgtggaaactaccatcgttcttgcggctctgaagctcgtgggctacggcctgtcgaccatcggccccggcgtcggcatcggcatcgcctgctatggctgctgcgtcgcgaccgcccgccagcccgaactgcagggtcgtctgttcacgaacttcatcatcggcgccgccctcgccgaggccctcggcctcatcggcttcgttctgaccttcatcgtgtaactcggccttattcggacatatttgccgcaagaaggctaaaggaggttacaacgtgaaagacagagcgaaaaaagcatcgactcgcatgggggttgccgcagttgccggcgccggcatgacgtttgcttttcccgcgctcgcgttcgccagtgaggaggaggcaggcggcatcagcgccatcctgcccgacatggcggagttcatccccatgctcgtcatcttcatcttgctgtggatcgtcctcgcgaagctcggctggcccaagttcgaggccatgctgtccaagcgcgagacgatgatcaaagatgccctcgagaagtccgaagaggcccgcatcgagagcgagcgggtgctcgaggagtaccgggtgcagctggccgatgccaaggcccaggcggcccagatcgtggccgacgccaagcagaccggcgaagccgccaaggccgacatcacggccaaggcccagtccgaggcgaccgacatgatcgccaaggcgcgcacggccatcgaggcggagaagaaggctgccatcgccgagctccagagctccgtcgccgacacgtccgtcgcggttgcggcgcgcctcatcggcgaggacctctcggagagcgagcatcgcaagatgatcgagcgctacgtgaacgaggcgggcagtttcgatgccaactaatcgtcttatcgtcaaagaggaagtggcagtctatgccgccgtcctgttcgatggggcgttcgaggcgggcggccaggaggcggtcctcgaggtgcgcgaccagatggtccgcgtcgccgaggccatgcgaacgaacatggagctgtccgttgccttgtcagacccgggctacacgcccgagcagcggggcgagcttgccaggaacgtgttcgctggctgcaacccggtcctgctcgacgtgctggcggttctggccgaacggggcgacgccgcgctgctgccccgcgtgctcgagaactacgcagagcagctgcagagcaagttgaacctgtgcgtggtggacgttacgacggcggttccgctggacgacgccctgcgacgcatcattacggaaaaagccgaagccgatctggacacgaacgtcgtcctgcgcgagagcgtcgacaagtccatattgggcggcatcatcatgagcacgaacgggaagcgcatcgacgccagcgtggcgtcccagctcgaccatgcccgcaacgtgctcaaaacgactacagatggaggtgaatgctagtgactgaaatcaccgctaagtccattgacgatgcgttgcgcaagcagcttgacgccctgaaggtcaacatcgagtctcgcgaggtcggaaccgttatccaaatcggcgacggcatcgcccgcgtcgacggcctgcgcgacgccatggcaggcgagctcctcgaattcgtcggccagggcggcaagaccgtctacggtctggcccagaacctcgaagaagacgaggtcggcgccgtgcttctcggcgatgtcacggcaatcagggagaacgaccaggtccgcacgaccggccgtatcgtggaagttccgtcgggcagggagatgctcggccgtgtggtcaacccgctcggcatgcccatcgacggcaagggccccatcaaggccgagggcatgcgccccgtggagttcaaggctcccggcgttatcgcccgcaagccggtgcacgagcccatgcagacgggcatcctggccatcgactcgatgatccccgtcggccgcggccagcgcgagctcatcatcggcgaccgccagaccggcaagaccgccattgcggttgatgctatcatcaaccaaaagggcaaggacatgatctgcatctacgtggctatcggccagaaggcctccacggttgccggcatcgtcgagacgctcgagcgccatggcgccatggactacacgatcatcgtgtcggcctccgcgtccgactccgcgccgctgcagtacatcgcccccatggcgggtgccgccatcggcgagttcttcatgtacaacggcgaggacggcaagccggcctccgccgagaacccgggccgccacgtgctgtgcgtctacgacgacctgtccaagcaggctgtggcctaccgccagatgtcgctgacccttcgtcgtcctccgggacgcgaggcgtaccccggcgacgtgttctacctgcactcgcgcctgcttgagcgcgcggtgaagatgaacgacgagaacggtgcgggctccctcacggcgctccccatcatcgagacgcaggccggcgacgtgtccgcctacatcccgacgaacgtcatctccatcaccgacggtcagatcttcctgcagaccgacctgttcttccagggccagcgcccggctgtcgacgtgggcatctccgtgtcgcgagtcggcggctccgcgcagatcaaggctatgaagcaggttgccggctcgctgcgcctcgacctcgcgtcctatcgcgagctgcaggcgttcacgcagttcggcagcgacttggacaaggccacgcaggaccagctgaaccgcggtgcccacatgaccgagctgctgaagcagggtcgctacaaccccatgccggtcgaggagcaggcggtgtccatctacgcaggcgggcacggctacctcgacgacatcccggtgggcgacgtcgtgcgtttccgcggcgagctgctcgattacatccgcgcctccaagccggagatcttcgagaatattgtgaaggagcagaagtttaccgacgcgatcgaaaccgagctgaacgctgccatcgaggccttcaagctgacgttctcggcttcggcttaaggcaggtagaccatgcccaaccttcacgacatagaacggcgcatcaactccgtctcctcgacgaagcagatcacgcgtaccatggaaatggttgcggccgccaagatccgccgcgcctcggagcgggtgtacaacgcccttccgtgggcgagcgccatctcggagatgctcatttccacggcgaagtacgcaccgctcgactccgagccgctgctcgccacgcatgacgaggtcaagcgcgctctgatcgtggtcatcgcgtccgatcgcgggcttgccggcgggttcaacagcaacgtgcttcgccatgccgagaagctcatcaaggagaaggagcgccagggcatcgaggtcgagatcgtcgcctgcggcaagaaggccatcgggtacttcagctatcgcaacatcgtgccgattttcgagttccgcgacctctcggccgacccgacgtacgaggaggcggccgagatctcgcagttcgccggcgacagctaccgcgagggcaagctcgacgaggtcatcatcgtgttcaaccatgcgaagaacgcggccgagcagcggttgatcgagcagcaggtgctgcccatcaacaccacgagctatgccgagcttctgggcctggctcccaaggagaaggactacttcgagcatttccgcgagaaggacctcgaccacctgcccggcgacatcgacttcgagcccgatgccgaatcggtcatgcactatctgatgcgcgcctacctgcgcaacacgttctactacgcgctcatcgactcggcggctgccgagcagggcgcgcgccgcaccgcaatgaagtcggcgaccgacaacgccaacgagatggtcaacaccctgacccgcgtgtacaaccgcgtgcgccagggcgctatcacgaccgagatctcggagatcgttggcggcgccgcagctttggaggaataaatggctgaaaccaagaacactgcatcggccacgggcgcgaccggacgcattgtccgcatcgtcggcgctgttgtcgacgttgagtttccgccggatcaaatgccggcgatctacaacgccctgaccgtggatgcaacgacccccatcggggaagtgaagactgtgctggaggtgcagacgcacctcccgggcgacctcgtccgcaccgtcgccatgtcgtccaccgacggcatggtgcgcgggctcgaggtcgtcgacaccggcaaccccatcatgatgcccgtgggcccgaacacgctgggccgcatctggaacgtgatcggcgagccggtcgacggcaagcccatgcccgaggtcgccgagtggatgcccatccaccacccggccccggactacgacacgctgaccaccacgacggagatcttcgagactggcatcaaggtcgtcgacctcatcgagccctacgtcaagggcggcaagacgggcctgttcggcggcgccggcgtcggcaagaccgttatcatccaggagctcatcaacaacctggcccaggagcacggcggcacgtcggtgttcacgggcgtgggcgagcgtacccgcgagggcaccgacctgttcctcgagatgagcgagtccggcgtcatcgacaagacctgcctggtgtacggccagatgaacgagcctccgggagcgcgtttgcgcgtgggcctggcgggcctgaccgaggccgagtacttccgtgaccagggccaggacgtgttgctgttcatcgacaacatcttccgcttcacgcaggccggctccgaggtgtccgcacttctcggccgtatgccctccgccgttggctaccagcccacgctggcaaccgagatgggcgacctgcaggagcgcatcacgtccaccgagaccggctccatcacctcggtgcaggccgtgtacgtgcccgccgacgacctgaccgaccctgcgccggccacgacgttcacccacctcgacgcgaagacggttctgtcccgttccatcgccgagctgggcatctacccggccgtcgacccgctggagtccacctcccgcgcgctcgacccggagatcgtgggcgaggagcactaccgcgtggccgtgggcgtgcaggaggtgctgcagaactacaaggacctgcaggacatcatcgccatcctcggcatggacgagctctccgaggagcagaagctcgtcgtgaaccgcgcccgcaagatccagaagtacctgggccagccgttccatgtggccgaggtcttcaccggcaaccccggcaagtacgtgaagatggaggataccatccgctcgttcgccgagatcctcgacggcaagtgcgaccatatccccgagcagtgcttcgtgtacaagggcgccatcgaggacgtgtacgcggcctacgaggaaatgacgaaggaagaagctcatgcctaatctgctttgcatggtggctacgccgacgcgcgagctgttctcgggagagatcgcctacgcggacgtcccgggttccgagggcaactacggcgtgctgagcggccatgagatgctcgtggccaagaacagccccggcgtcctcacgctctggatggatgccgccggcaacgagaagcgccgtttcgccctctacgagggtgcaacgcaggtgtacgcggaccgtttgaccgtccttgcgcgcttcggagtcgatgcggacagcatcgacgtggaggcggtccgcaagaaggccgacgggatgcgggagcgcgtcgccgagctcgaggcgaagcatgccgacgatcccgaggtggagtcctacggcgccatcttggagacgtcccgggcgcgtcttgcctggtacgagacccagctgcgcgtggcggaaggcgcacctgccaaatagcgcgccgccgcatcacaagggtaccaaccgaggagggggacagcttggctgtccccctcctttcatgttcgctgttgctagtgcactctccgctgatggatcaaagctgcaacatacacggtgtcttctaccttgtcgtatcggtagagaatatcgaacggtgcgataacaatttttcggcagtccttcccgaagcgcttcttgatggcgtagggaagttcggttgagccgagttcgggaagagcttccagcatttccaccaatcggtagagatcgttgaacatgcgctcggaatagacctcggctgtcgcctcgacgaattcttccgagatgatgaccttaggcatgctttctcctcagcttgagcgctgcctcgcgcgccacctctgcaccctcgtaacatcgtccggcctctatgtcggcgaaaccgcgttccaaagcggcggccacaagggcctcgtaggcggcctgatccgctacctccttcatcttctgctcgtacacctcctccgagcagaacacgaacgcgccggcgccgttctcggtgatgcgcacgattcccttgcgcgcggcttccttgacctcgccctgcttcttctggagggcggtgacgggatagatgggttccatggcaagcctccttttcgcttgcgaggagcatagcaggatagaggattattgtatataccgttcgctatacaataagcaaccttttatccggttgcacccctatgcgtcgtcggggttcgcggcctcgatggcgtcgaggagctcctcgcgggagttgatgcccatcttcttgtagatgttgtacgtgtgcgacttcacggtgtggctggagatgcacagcttgttctggatgtgctcgatgccgcggcccttcgccatgaggaagaacacctcggtctcgcgcgcggagagcttggcctcgcgcgccaccacggtgcagcgggccttccagcggccctgctcgtgctcatgctcgggagcctcggcggcatcgtcgtcgtcggcaggacggcggctcggggcgaacgtgatgaacgcggccagcaccaccaccagccccagcgcgacgcccgagagcacggcgtagttcgtggcgccggtggccgccggcagcatgcccagcgcgaagcccgccgccatcccggcgccgagcacgccctggctcattcccacgaagtacaggggcgccgcatgccggttgtgcgccgtgtgcacctcgaaggccatgctcaccaccaccaggaacacgtaaacggccaaaagcagcaggttcgacagcgcgtacaccggcccggtgaacagcgtcatggacacgagcgacaccacgaggaacgggaacaccatgcgcagcacgtcgatctggcgcatgcgcccggcgaagcggtgcatgaacgcgagcgccgccagcgcgccggccaacgcgaacccggcgatgccggcgaacagcagcggatcgccggccaattgcgtgatagaaccggctccgaggccgaacacgatgccgtacacgaggtagatgacgccgaacgcccacgagaggcccgccttctcctgggagacggccagcggtatgcgcaggccctcgtccggccccgcctcgtgcgccaccacgcgctcgacgcccaggcttaccagagggcacaccacgagcatgacgatgctgaagtaggacggcagcaggttgatgatgaggtagaggaagccgccgcaggcggtggagagcgccatgcagcgcgccaccgaccgctcgtcgaggcgcgataccgcgggcatccagctgaacagaaggcatcccaggccggcccccgaaagcccccatgccgcgaggtcgaaggcgagcggcaacggcatgccgagcgccgcataggccgtgggcgacacggcggcgatgacgcagaacgccgccacgaaccccgtcatggcccgccgtgcacggggcgacggcagcccttcgggggcacgcgacatcgtgaggcagcaggccccgaaaccgatgaagaacgcgatgcgcagggccaagtggtaccacagccggtcgatgccgggatccaagaacgagttgcgcatgagcatggcgaagaagcaggtccagaagagcgccatgcctcccaccatggtgagaagcatggtgggagatacgctctgacgtggtgtttcgcagctattcagacttttttccataggcgttcgcgcggccccctcccgcatatcgccgaggcccctccgaagaaaccagacgatttgtcgatggcgcccatgataaacggtctctaggatcgtggcaaggaaaggcaccgccgccgcccggggacccgaaaccggggaacaggacggggaggcccctcggggccacctcccgcagagagcggggcgggtgcatccgagacgaaaggacgaggaggcaaggtatggctgaggagtatcgaaccgtgcagcacgacaagccgttccagtacgaggaaggcggctaccaggtcacgcgcggctgcgcatggacgggcccgggctgccacctgggctgcggcgtcatcatgtaccaggatgccgagggcaagctggccaagtgcgagggcgacccggaggacccatggacgaacggccgcctgtgcatgcgctgccttgacgtgcccgaggtgacgcaccacaaggagcgcctgcagtatcccatgaagcgcgcccgcgaggaccgcggcctcgacaagtgggagcgcatctcctgggacgaggcctacgacctcatcaccgacgagttcatggccatgaaggagaagtacggcgccgagtccgtcatcttcgcgcagggcaccggccgcgacatcgccgcgtacatcacgcgcctgtcctggtcgttcggcagcccgaactacacgggcctgctttcgggccaggcgtgctacctgccgcgcatcgccggcatggccgccacgacgggcgcgccgtggatccccgacgccgcccagcagttccccgagcgctacgaccaccccgactacgaggtgcccgaggtcatgttcgtgtggggcaactacccgctgaagtcgaacatcgagggcttctacggccactgggtcatcgacctcatgaagcgcggcatgaagctggtcacggtggacacgaaggttacgtggctggcttcgaagtccgagctgcacctgcgcgtgcgccccggcaccgacgcggcgctggcgctgggcatgatgaaggtcatcatcgaggaggacctctacgaccacgagttcgtcgacaactggtgctacggcttcgacgagctggccgagcgcgccaaggagttcgacgtgaagcgcgtgagcgagatcacgtgggtgcccgaggagaagatcatcgccgccgcccgcatgctgggcaacgcgaagaactccacgctgcagtggggcgtggccgttgacatgacccgcgaggccatgccggccggtcaggccatcctcgccctctgggagatcacgggcaacatggagcgtcccggcggcatgatcgtggcgccggagatcctgtcggtggccggcggctggggccgcgagatcctgggcccggagcaggaggccaagcgcatcggcatcaaggactacccgctgtacaacttcgggttcgccgtgtcgcagcccgacgagaccgtgaagaccatcgagacgggcgtgccgtacgagatccacggcgcttggctccagaccacgaaccccatcgcctgcatgggcgccgacccgcagcgtttgtacaaggccctgaacaagctggacttcatcgtggtggtggacctgttcaagacgccgaccatcgccgctttggccgacgtggtgctgccggcctgcacgttccccgagcgcaacggcatcgcgttcgtatccggcgcgcagcgcggctccaccatcaacaaggtgacggacgtgggcgagtgccgaagcgacatgcagatcaaccttgagctcggcaagcgctggaaccccgaggcgtggccgtgggacaacgtggacgagatgttcaccgacatgctcaagcccaccgacatgagcttcgaggagctgcagcaggtggccccggcctaccagcccatcgagtactaccgctacaagacgggcaagctgcgcaaggacggccagcccggcttcaacacgcccacgggacgcatcgagctgtggagcaacttctacaaccaggccggcctcgacccgctgccctacttcgaggagcccgagcccggccccggttccacgccggacctcatggacgagtacccgctggtcatgacgagcggcgcgcgcacctggggcatgttccactccgagcatcgccagatcgagcgcatgcgccactaccgcccgtggcccctcatggagatccatcccgagacggccgccaagtacggcatcaaggacggcgactgggtgtggatggagggccccatgggccgcgcgaagcgcaaggcgaagctcacgcccgtcatggatcgccgcatcgtgtcgtgcgaccagggctggtggttccccgagggcgacccggagaagttctacgacgtgttcgacctgaacatcaacaacacgctgccgtggatcccgggcaagagcggcttcggctcgaactacaagagctctatctgcaagatctacaaagtggaagagggggaatagaccatggctaagtacggaatcctggccgatgcgcagtggtgctcgggctgccacagctgcgaggtggcctgccagatggagcacggcctgcccgtgggcgagaccggcatcaaagtggtgaagatcggcccgtgggccatcggcgacgaggccgatgagaactggcagttcagctacctgcccatccccacgaagcagtgcgacacctgcgccgcgcgccgcggtttgggaaaggtgcccacctgcgtgcagcactgccagtcgcagtgcctggagttcggcccgatcgacgagctgtcccagcgcatggacgtgaagcagaagacgctgttcgtggtggcgtaaaggggctttcctgatctgggcgggcccgcctcgtgcgggcccgcggacaaggagcggatatgcattccaagaagtactacatcgtgtacggcctgttcttctcgctcatcgtggcggcggtgctgtgcctgtgcctgaccatcatgcagggcatgccgcacatcgaccccgtgttctacctgatgagcttcggcgtggcgttcgtcacctcgttcgtggtcacggctgtgatcccgttggcgcgcatcgccgcggcgtgcgccgtgtactacgacgccaagccgggcagcgtggcgttccggctcatccagaacgtgttcttcagcactctcatcatgttcgtgctgggcatcgtcatgacggccttcatgacgggcgtgggcgaggtccagaccatgagcgccatgaccgggcagatgatgggcacgaacctgttcgaccggttcgtgagcctgtgcctgcagttctggccgaccatcgtgatcgtggcgtttttgtccgacccggccgccggcggtttggccgggctgctggtgaaggagaaccccgccgaggttgctgctgcggcgaagcaggcgccggctgcctaggcgctgcggttcgggttttgataaggtgagggagccggccgcgagccggctccccgcgtttgaaaggagcgacatggcagattacgacggccgcgcgctaagccagaagctggcgtccccgtcgcctgacgagatcgacgaggtcatcgacgccgtgacgggcgccacatggggcgagcgcaaccgcatcatggagacgcgcttcgccgcgcgcctgaacgacaaccccgccgccgttcccgccttcagcccgccaggcaccccgctgccccgcgggtgagggctgaggagctgcggcaacaatgctcgctgagtggagctgctatggagagcgttctcgtagagtgtcaaaaggtaggaatcgagaggttcttgtagaggtgattcccccgatcgcccatttcggcgaacccgcatcatgacagggggacacatgacagggggacacatgacagggggacacgcatgacagggggacaggtgccttgtcatgcggtcgtctcttccgggtcgagcgccggtcgacccgcgagaagcggtcggggcaacctatccggcgataatcacctcggggttcgcgcggtctgcgatggcgcgcgtctctatcgtcgctcccaggtagcgttccatgagttgcgcgaactcgtcgagcgccgcctccaggtcggcgcggcgcgtgggatcgacgcactccatgaccaggatggcgttcgcggaatcgtccttgagcgccgagcgctgcccgtcgcgccagttccagcagcggcacacggcgccctcgtcgtcgcggtagcagagctcgccgggaagcgtgggatcctccgcgtcctcgccgatgggcaaaaacgcatcgccgccctcggtcaggcccaaacggaagtcgccgacgaacgagtccacgtcctcgccgcccacgggtaaggcgtacttcagcgagacggcgttgtagatgtccaccgacggcgtgatcgagcccacagggttgcccttcagcacccgcttgagcaggttctccaccgagcagcgcgcgcccttcttcgtcttgaacttctggaacgcctcgcgccacacgcgcacgacctcgttctcggagatcgtgttgctggtgaggtgctgatcggcggtggcgttggcttcgcgcagcagcttcgcgatggcggccgcgtcctcggccggcacgtcgttggccgacttcatgccgcgcaccaccaagatgccgatggccgcgtcggggaacagctcccagaacgattcctccgcgatgaacttctgcatatcgtttaccttcctccttaccggccgaggcgtcgcgcgcccttgccgcgcacctcttcgaggtcgacggcccagatggccgtgtcgtcgatctcgcgggcgatgccctcgccgatcttgtccttgtgctcgggcaggtacttcatgcacagcgccaccagcaccttgcgcatcgcggcgccgtcctccacgcggcgcacccgcccgcgcgcgatgaccgaggcgaagcgcgtggtgaagaagtcgtcctcgtagcagggctcgacctcggtggccaccgtcacgcacgcgcggccgtcgcgagcgaagttgtccagcttgtgcccggccttgttcgtggtgtggaagcacagcgcgccgtccagcatcacgtaggacagcggcacgccgtagggcatcccgtccacgtccaccgtggacacgacgcagaactcgccggcttccagcacctcgagcgcctcgctggcggacagctcgcgatccttcgcaagcagggggtagtcgatcatggttcctctcctttcgcgggcgcttccgcgcctttgcgctctacggccttgccgagcacgatcttttccccattatagccaaccttcggcggtccccgcatcgtgacccctgtcgagcgtcgcgcttcgccggtatcctcctgtgcgcgtctccctacgctccgccttatcctcctcccgttccagccaacctccccttgcgttcgaaacggtgtgatataagtagcgtggccccactcggggcaacgttgaatcccgaaaaggagcatgatggagataccggttttgaacgaggggcagctggatagattcaaactgcacctcattgaggaagagcgatcgccgaacacgatcgagaagtattcgagggacgtgcgggccctgctcgcgcactttcccggcgaggtggggttcactaaggagatgatcctcgattataaacaatgcttgttggagaagtacaaaactaccagcgtcaacagcatgctggtggcgataaaccagttcttccgcttctgcaagcgagaggatttgcgggtaaagctggtgaaggtgcagcgatccaccttccgggagcaccgtcgcgagctttcgctggttgagtacaagcggctggtgagggctgcccagttgaagaagaaggagcgcttgagcctgctgatccaagccatttgcagcacaggcatccgcgtgagcgagcaccgcttcatcacggtcgagtcgctgcgcaagggtgtggaccaaccgcatcgttatcgtcggtgagtacaagcgcttgaggagtgcggaaggagataacggaaatggggaaggcatcttcggagaccgtcccgtgcccgccactctcacggggggaaccacatatacgcgaacgggttcaacctcaccatcggcgagagcgtcaatacaaaaccgacttcgcccaagctttacctttacggttacggcaatagtacttttggcagcgacagcacatctgcgaatatcacggtgaaaagcggacggtatgtgcgcattaacggctacattagaagccagagcttgggaattgactgcactggaagatcgtcatccgtcactgtggagggcaacgctgatgttgacttgcttgtggccggtagtgctaatggcgctatcaagaacgccaacgtgggcatcaacgtcaaaggtggaaaggttacaacgctccttggcggaaatcaaggattctccaacgttttacccccgtattccggcagtacaaaaatccgggtagagggcggcgaggtcgataacttctattgcgcaggctccggcagagataggagcgttcctactttctcaggtgagcttgatgcgagtatcacgggcgggaaagtgaagaagctttatggctccggttctgccgcatacgtgctcaaagattccaaagtgagtgtttccgtagcgggcaacggtgaggttaccgacctttttgccgccggcaaaaggtgggagacaagtttcaaccctgatcagaccgaattgaaggatgttgaaaaattcggaagcttctcgggaaatgagactattaccgtctcgggcaatgccgtagtcgcgaacatctacgcgagcggtgagggttattcaggatcaacgaattatgaagggacaaaggccaacgcctacctggacggcaacgtgaccatcaacgtggaaggcgggacggtcaccggcaacgtctacggcggcggcaagggcatcgtagaccctgggtatgagcaatgcgcccgcgtgaccgagaactcgaaggttgaagtcaacatcgccggcggcattgttaagggcaacgtctacggcggcggcgacgtcgccgatgtgctcggctccgcttccgtcgcattgtccggcggcacagtgcagggcaaggtcttcggtggcggcaaggtgtcggatgtggagggttccacctctgtcacgctgtccggtgcaaccgtgcagggcaacctgtatggcggcggcgaggaaggcgcggtgaaaggctccactacggtgaacgtgcagaacggcaccgtcaacagctcggtgtacggcggcgcttacggcaaggcgggagaggtgttcgtgctgggcggctccaccgtcaacatgacgggcggctgggtgcgcggcaacgtatacggaggcagcgaattcagcgacgacggagccgacgacggtacgactcccgatctggtgatcaccaacctggtgggcggcaccgtgggtcgtaacgtgttcggaggtgggtaccagggcaccgtccacggttccacccatctgcatattggcgaaaaagcccttggggcctgcgagtattacaaagcgcactcgggagagatcccgcagctgaccgcttcgacgctgtccgttcagggatcggtctacgcgggcggcgacttcggcggcgagggaaccgactacgacaccatcaccgtggaaggcacttcgcacgtgtacatcgatggcgatggttacgacacctccgctatcggcacaagcaacagcatgactctcggcaaaggcgtatttggcagcggcgcctcctgcgatgcgggcaagacccgcttggtcaccctcaagaactacggcaatgccgttgcgggcggcgacggcgaggtcacgcgcaccctgtccgccatccagagggccgacagggtgtcgatcatcaactcgcacgtgaagctcaccgggcagtcggatgtggccaacatcgacacgacggccctgtactccctcaaccgcatcggcgatcacgacaaggccgatgtgccgtccttcgtaaacggcctcgttctccaagaccgcagcacgctcattctcgaatcgcccgccatggagttggccgcgctccgcagctgggatgaaaagggggttgagacaacgaccgggagcccctcgaacacgttgctgctggacaccggcaccaagctgagcgtctccttcaccgccaaagacggcgtcgaaacgtacggaccggtgaggggctatacgaggttgctggcaggggcttcaactgcgggttttgtctacgcccgcatctcgccgaccgatactgatactgacggcgggttcgtggacaaggacggtaaggcaatcggcttcacggatgtcgaatccgcataccgttactggaaggtacgcggagagggcgcgaccgccaacgtggtgcgccaggccgtcctgaccgctcggacgcaggccagcggagcagacgtcgagggcttctcggtagcgaagggcgtcatcgaccttcccccggcggagaagggatccacctacaccgtgaaaagcgtcggggtttccaattcttcgctcaagctggtggaagctgcgaaaacggggcaggaggacgatgcgacgtggaagacttcgcaggacaacgccgccagcggcagggaggaagtcaatcttggcgatcaaaaggaggctgtcaaggcttcgcccctgaacacgttcgggcttttcatgacacccggtagcgggttctcggaagtcgcgggcgctggcaaggtcgtctctgagaagtcgatgacatctggcgcgaataccgtgctcggcaccccgatcaccgggaccgtttcgggtgataacacgatccccgaaatcgagttctatctcacgtacttcaatgggggcatcaccgccagtcaggatctgggaacggtcacggtggtgcttgagcgcacgaacgcagacgggaagcaggagacgaccacggcgaacgtgcagatcgtcacgcgaactaccagtctatcctcgcttgagatggatctgtacgcaacgcaaaccggcagctacaccggtacgctctatattccttcaggagccaagcgggagttgtcgttgacgggggttgacaaggggagcgccgcgttggtggcgaatggcgcagccctgactgacaacagttttgcgctcaccatgcaaacggttcaagatcaagggtgggcaacgatgggttccatggaagacccctgcgatttgggaagcttcaaggatccggtgagcatcggaactacggacagccgctacgatgcccccatcaagttcaccttgtcgaacgcgacagggttcgccccgaagccgctcgataccgtcacgctcacgctcaaggaagagggaacggaaggcaaggaggttcccgtgacgctgcggattcattgggaagagtccgccgtgaagtcggttgaggttggggcggggcggcaatacaatgggctttcccagacagaggcccttgcgatttcgcagaagagttctctgaccgccgttttcgaactctcaagttccctgcaatcaagatcatcgtggatcgagttacagaagacgggaggcacatcggttggattgccttctggcacggaattcacgctgctcaacgacgggagattttaccgttgccagatgaagggtattgagcccgaaaacaggattcttttgagcagcttcacctctatggaaaatgattcggagttgccagggagcctcagcggcaccgtgacggtcatcgtcgatttcggctcttcggcatcggagcctggcgcgggggactacagtctgcgcatgcgaaccgatacgagcgccgacagcgtgggagccgatttcacgatggataattcggctgcgacagccaccgtcgaagctgctggcggtgatgggttgtcccgagggacgcacgagttcgagttgagcttgaaggcgggcagcgacacgcgctttgccgacggggcggcggtggtgctctcttcgggcgacgcggaagggttccccaagggcacggtgttcagggttggcgaagctgagtattaccccgtcaacggcaaggtgtccatcccgcttggcagcgcgacgtcgttcgtaatggacacgacgaatacgactggcctcacgagtggcgagcacacgctttccgctcaggtgctccccacgggcgcgaacgcgggcaatgcgactcccctctctgcggaggaggcagcctacaccgtctcggagaatccatcgtacagcttgtccgtgacccttgacgcgggctcgagccgcatcgtgaagccgggaagcgcactttccttcacggccaactacaaggcatcggctggcgaggcaatcacagtgggcgctcggaagaagactgatgcaggttacgaggacaccgtcggtttgacggcgactgtcgacgccgtcaaaatcaccgtcaccgtccccgatggcacctccgcaggcacctaccgcctgctcttcaagctgggcgaccaagaggtcccctacaacatcattgtcgaggggtgattcgcgggcgcgcatgctctttacgcgcgtccgcgtctatgcgcatagtccataaggcttgaaaggcaagcgttggccttctccgcttgagatgcggcgaaaacgcctatgccagtaaaagcgatgcgatcggggctactgcctgctttcctgctcggagtcgtcggcgaggtcgccgacctttacccctaatcccgatgctatccgatggagaagcgagtaacgcacgtccacttggcccttctcgatcttggccaaatgggagtagccggttccgacgatcaacgcaagacggcgcaccgagagaccctgcgcttcgcgcagctctgcgattcttttcccgagttgggcctgtcggtcaaatggttccatgaggtacaggttatggggtacaatggatagggtgtggtgtaagtacgccacaataacggagatggtgcgaccgagaacgggggagtgttgatcgcatgcgcatggagtgctgcctcgttgacgttatcgagggaaagggtatgtcgaccgaggaagtggccgatagtgtgggcatatccgttggtattctggcgaggatcgacgaaggggatttcctcgcgctgcgaaagagcacgctgacaaggctctgcgaggttctcgactgtcaagtgggtgatattctcaagatggtagatggctgattgtcttgggcgctatcattcgccaccgtccgggttctgtttcgatcctctacgttctcgcgttcgcgcaaaaaccatcgtttgttcgctgtttgtgggcggtgcccgtcggccaatgctgctagaatggcaacgacaccatgacacgctgcgcacgcacccagaacacaccaccaagcgcatttctgactgattagaggcacaagatatggcattcgtccacctgcacaaccacactgaatattccctgctcgacggccatacgcacatctacgacatggtcaagcgcgcagccgacctcggcatgccggccgtggccatctccgaccacggcgtgatgtcgggcgtgccgcagctgtgcgagatgtgcgacaaggtagaggaggagaccggcaagcgcgtcaagcccatctacggctgcgaggtgtacttcaccaccgacgaggagctcaagcgcgacggcaagccgaagctctaccacctgctgcttctggccaagacgaacgagggctaccacaacctggtgaaattggtcagcgaatcgcacgtcgacaacttctactacaagccccgcaccacgttctccatgctgcagaagtacggcaagggcatcatcggctcgtcggcctgcattgccggcatcatcccgaagctgctcgacaaccgccagttcgacgacgccgtggcgtgggccaacaagttcgccagctgcttcgagccgggcgacttctacatcgagctgcagaaccagggcatccgcaccgacgccggcttcacgcagaccgagctcaaccacatgctcaccgacgtggccaaggccgccggcctgaagaccatcgccacgaacgacttccactacctcacgaaggaagacgcgaaggcacaggactacatgctgtgcgtggcccagggcgccgccgtgaacgacgagaagcgcatgcgcttcgagaacgacgaattctacatgaagaccgaggaggagatgcgcaccgcgctgaaggacttccccgaagcctgcgacaccacggtggaggtggccgagaaggtggacgtggtgctggagcgcgattccatccttccgaggttccccttgcccgagggcgagacggaggagagctactttcgtcgccgcgtgcaggagggcctggtcaagcactatggcagcccggtgccgcaggaagcgcaggagcgcgccgactacgagatgggcatcatcatccagcagggcttcccggcgtacttcctcatcgtgcaggagtacatcgagtgggcgcgcagccagggcatcggcgtgggcccgggccgcggctcggccgcaggcgccatcgtggcgtacgccatggacatcaccgcgctcgacccgctgtccaacggcctgctgttcgagcgcttcctgtcgcccgagcgcgtggagatgcccgatatcgacgtcgacttcgagcagggacgccgcgaagaggtcatcaaccacatcaaggacgtgtacggcgaggaccacgtgtcccaggttatcacgttcggcacgctgcaggcgaagaacgccgtgcgcgacgccgcgcgcgtgctggactacccgtacagcaccggcgaccgcatctgcaagctgatcggcgacgagctgggcatcaccatcgacaaggcgcttgccacgaaccccgacctcaagaaggcgtacgagaccgaggaggacgtgaaggccgtcatcgacgccgcgaagtccatcgaggggcacgtgcgcggcgagggcgtgcacgcctgcgccaccatcatctgccgcgaccccatggccgaccacgtgcccatgaagcgcgacaccaagggcggcggcatcatcacccagtacgacggacattacacgccggagctcggcctgctgaagatggacttcctgggcctgcgcacgctcgacgtgctcaccatcgcgtgccgcaacatcgagcagcgcttcggcacgaaggtcgtgcccgaggagattcccgtcgacgacgaggccgcgttcaagctcatgcagtccggcaacatggacggcctgttccaggttgagggcgccctttacgtgagcttgttcgcgcgcctgcctcccacgcgcttctccgacatcgtcgcctccatcgcgctcaaccgcccgggcccgctcgagtccggcatggtggacgactacgtgaaggtggccagcggcaagacgcagatccactactacgacgaacgcctccgccccattttggaggagacgtacggcaccatggtctaccaagagcagatcatgcagatctccatggccatgagcggcttctccgccggcaaggccgacaagctgcgcaaggccatgggcaagaagaagctcgacgtcatgcgcgccctgcaggaggactggaacaacggcgccgtggagaacggcttctcgctggccattgccaagcagatctgggaggacgccgagaagttcgcgaagtacgcgttcaacaaatcgcactcggccgcatacgccatcctggtcatgcgcacggcgtatttgaaggcgcactacccgaacgacttcatggcagccgtgctgtcgtcctacatgggcaacaccgaccgcctgatccgctacattgccagctgcaaccacaacggcacgcccgtgctgccgcccgatatcaactcctcgaacgcggagttcacgcctaccgacgacggcatccgcttcggcctggtgggcgtgcgcggcgtgggcgcgaacgtggccgaggccatcatcgaggagcgcgaggccaacggcccgtacacgagcctgcacgacttcgtgaaccgcttggacgcgaagtgctacaaccgcaagacgctcgaggcgctcatcaagggcggggcgttcgactccacgggctacacgcgcaagcagctcatgtacttcgtggacgagacgccgcttctagagagcgcgtcgaagcgccagaaggaccgcgaccgcgggcaggtgtccatgttcgacctgttcggcgacgatcccgactccgggttcgaggaagaggtgcccgagcccgacggcgtggagtggcccaagcgccagctgctgtcctacgagaaggagatcatgaagatctacgtctcggaccaccccctgcgcccgtacgagggcaccatcgcccgcatgacgaagttccagctgggcgacttggccgagcgcacgaaggagatcaagtccgccacgttcgtgggcatgatatccaccgtggtgacgaagctgacgaagcgcggcacgaagatggccacgttcacgctggaggacacgacggggcacatcgagtgcatctgcttcaagtacgacgagaacgccgaggccatccaggaggatgccatcgtcaagatcaagggcaagttcgagcacagcgaccgcggcaaccagatcatggcgttcgaggtggaggctatcgagctgaacgaggccgacgcgcgtccctcgcacctggagctgaaggtgtcgtccgcggacttcaaccaggccacgtcgcagcgcttgaaccgcatcctgaagtcctatcccggccgcgacggcgtggtgctgttcgtgagtcagggcgacggccgcaagttccgcgccgagctgccggtgacggtggatgcccgctcgcagatcatgctctcggagatccaggacctgttcggccgcccggtgtggagccgcgcgtcgtagcgggagggctgcgcgcctcggcgtttcattacagtttggcaagcggaaaccggccgcgcttcgcagggcggccggtttcgtttatgatggagcgcatcatgactcagactattcgacataccgaaccgcgccccgccggatccgctgtgggagctcctgccgccgccgatggagagcgccccgtgcgcgagcacaccctcgcgctcaccctctcgtacaacggcgcgcccttctccgggttcgcccggcagcccggccagctcaccgttcagggcgacgtggaggcggctctcgagctcttgttccgccggcccatcgacacgacgtgcgccggccgcaccgacgcgggcgtgcacgcgctcggccaggtggtgagcttcgacgttgacgacgtggaccttgccgggcggtcgctgccctctttgcgccgctcgctcaacgcgctcacgaacgacgccatcacggtgcgcgaggtggagccgaagcagaagggcttctcggcccgcttcgacgcccaggcgcgcgagtaccactaccatctgtgcgtggacagcacggcgcccatcttcatgaaggacttctcgtggttcgtgccgggcggtttggacgtgtcggccatggaggccggcgcccagcacctgctgggagagcacgacttcaagagcttctgcatggcggcgtcggccgtgggcaagcccacgaaccgcaacgtgcgcgagatatcgttccaccccgagacggtgctcggcgagaacatcctggccatcaaggtggtgggcaacgccttcctgcactccatggtgcgcaccatcgtgggcacgctcgtgatggtggggaagggccagcgcccctcgtcatgggtgggcgaggtgctggaagcgcgcgaccggcaggcggctggcgagaacgcccccgctcagggcctcgtgttctggcgcgtgatctactagcgaccggtccgggcagctcgggcctttccccgtgttgtgccgcgtcctgcttggcgcggtcgcgttgcggcgcgcgtgctgcctatccggtgctgcagcgctccttccggggccctcaaccgcggctcgttggctgccaaggataaagcaaggggggctttgccggtttgagttgcgtgctatactggtcaaacgtcggtacaatccaccgcttgcaaaaaggaagccatgctgttcggtaacacgccagagaagcgcatcgcccgcgaggctgacaaggtcgcgtcgttgaaagaggatctggacgcgatatcctgggggcgcgtgctcgaaattggcaagcagctccagggcaagggggcggctgaggccgagttgggcgccgagctggtgtctatcgcccaatcgaacctgtcgctggccacgcgcctgggcatcgatcctgcgccgcccgagagccgcgtgatggcatcgggcgtgaagatcgtggagggcggcctcgcccaggcggctatcgatgcgtcgcgcgcaccggttggctccggcgccgcgagcccctcgccatccgcttcgcgcggcgaggcaggccgcgcggacgagcccgcccgcgcggcctgcgagtccgacggcgagacacagccgatcgagctgccgggatcgttctcgatctgcatcgggagacccgaatctgggatggccgacggcggcctgtctttggaagagctgatggaggcgtccagaaggctcgatgacgaaggcgtcaccttccggtcgaagatgcctgacgaggccgctgccttcgacccgcaagagcctccctcgcgcatcgtgccgcgctcgaccaccgagcttcccatcgatttaccgcgcattccccgcataggcgatgtcccggttgcggccgagccttccgaggggcgggccgacgaggcgacggaaaccgaggaagaggcgctgttcgaacccgccctgcccccggaggcccctcttggggggattgctgtcgcagatggaggggctgatggagccgctgacgcccccgccggtacgccgggggaagatgccgttgcagcgataaagagggcatgcgaggctttttccgagcccgagcccgagcccgagcccgagcccgagcccgagcccgagcccgagcccgagcccgagcccgagcccgagcccgagcccgagcccgagcccgagcccgagcccgagcccgagcccgagcccgagcccgagcccgagcccgagcccgagcccgagcccgagcccgagcccgagcccgagcccgagcccgagcccgagcccgagccgacggctgttcctggggcgggcgagccggcggcctgcggcggggccgtccccgacgaggctggcagccgcgccgagcggccggggcgcgagcggttcgcgcggttccggaacctgtacgagagccgtgacggcagcttgtgcgtgttcgaggacgagcacggccatctggtggcggtggacgcctcgaagctcgcctagccgagcgcctccctctttcgccaacttattgctggcattccgcgattattggatataatcctatattaacgagaaccgcagcgagaaaggatgcgcatccatgtcgtcatgctccgtgcccggccaggtgcgccgggtgttcaaggacgcgggccgggtctgcccggtcgactaccgcctggcctccgacgccttcgccggcgatcccgaggttgcgtgcgacgtgctgtacgtggtgggcggcctgtacggcaacccgtttgcgctcgacgcggtggactgcctagtggcggccgagcagggcgacgtgcgcgtcgtgttgaacggcgacatgcactggttcgacaagacggccgagaacttcgccgccttggagcggcgggcgtcgcgctacctgccgctcgtgggcaacgtggaggccgagctgcgccgccaggtggacgtgggcgtggggtgcggatgcgcctacccggactgcacgggcgacgatgcggtgagccgctcgaaccgcatccaccgaaagctgtccgaggccgtggacgcccatcccgagctcaaggagctgctggcgggccggcccgccacgtgcacggtgggcgtggcgggccgcaaggtggccgtcacgcacggcgacgagcagctgatcggcggctgggcctgctcgcgcgagtcgctgcaggacgtgctgcggcaagacgagctcgaccggtggatggccgccaacgatgtggacgtgctggcctgtacgcacacgtgcgcgcccgcggcgctctcgcttgcgcgcgggctcgtggtgaacaacggggcggccggcctgccgaacttcttcggccagcacttcgggctggccgtgcgcgtggcggccgctccgcacccggatgcgctgttcggcgccgagcgcgacggcctctttgtggaggccgtgccgctgcgctacgaccacgacgcctacctggcctggttcgacgagctgtggccggcggccagcccggccgccgtgtcgtaccgcggccgcattgtcgacggcgcggatgaccggttggatgacgcgttgctcggcggcttcagccgcggcccctccgcccgcaccgacgccccgccgcttcgggcgcatgcgacgaagggcgacgtggagctggcgctggccgggctcgtgtacttcgaggacgtcgtggacgacgcctcctgcctgcgcacggcgggcgagccgtccacgatccaggtcaacgtcacggcccgctgcaacctggcctgcgcccactgccacgtggagtcgggcccgcaccgtaccgaggccatggaccgcgccgtgctcaaggccgtgctggccgtggccgcgcgccccggaatcgacacggttgacgtgacgggcggcgcgcccgagatgcaccccgacttcgcctggttcgtcgaacgcgcggcaagcatggctcacgtcatggtgcgcacgaacctcgtcatcctgcgcgacccggcgtaccggccgctcatggacctctacgcccggctgggcgtagaggtggtggcctcgctgcccaacgtgcacgacgcgcaggccgagcagcagcgcggcggcggcacgttcgacccgagcatcgaggtgctgcgcgagctgaacggccgcggctacggtcgcgatggccggcacgttctggacctggtgttcaacccccagtggcccgttctgccgcccgaccaggccgagctggaggccgtctaccggcgtcggctggccgcgctgggcgtgtcgttcgaccacctgttcgccgtcgcgaacaaccccatcgggcgctacggtgcgcatctcatcgacgccggcgcgttcgacagctacctgaacctgctcatagacggcttcaaccaacaggcgtgcgacgggatgatgtgccgccgccagctgtccgtgggctgggatgggcgcgtgtacgactgcgacttcaaccaggcgctcggtctgcctgtccgccgcgaggacggcggtgaccgcacggtcttcgactacgcggccgaccctgtgctgcccctcgcacgccccatccgcttccgcaaccactgttacgcctgcacggccggcagcggctcgagctgcggcggcaccatcgtgcaggaatagccccgacgtcgcagggctgcccggttcgcctgccgcctcgtggcctgcacgccgcgccggccccaggtcccttccggggatgcgcgcagcgtctccgctcgatcagcacgccgcgcccccgcacgatcatctttttagttgacatgccatattagtagatataatctattactggcatcaatcaagttaatcagaacgtgaggggacgaccgcatggattcgacaaccgggatcttcttctgggggtttctcatcgtgtacggcatcgtgatgttcctgctctcgccgaagaccgtctcgctgggcgggttcttcaagggcgaggacaagttgggccgcgccgccaacccgtggatgatcacggcatccatcttcatcgcgtggatcttcgcgaagtcggtcacgaacgcagccaacatgggcgcgaacttcggcatcgtgggcggtatcggctacgccatgtactggctgtgcatcccgctgaccggctgggcgctgtaccgcctgcgccgcaagttcaaggccacgggcatgatcagcttcctcaccgagcactacggcatcgcggccgcgttctgcttctcggcagccatcctggtgcgcctgttcaacgaggtgtggtcgaacacatcggtcgtgggcgcgtactacggcgcgtccggttcggcgccgttcatcatcgcggcactgctgttcacggccatcaccgtgggctactgctgctggggcggcatgcgcgggtccatcatcaccgacgtggcgcaggccatcctcttcgccgtgctgctcattgccgtgctcgcgtgggtggttccgcagcacagcctggccgatttcgcgacgtccggcacctggacgctcggcggcggcgtggacttcatcatcggcgcgggcctgcagtgcctttcgtacggcttccatgacgccgtgctcaccgaccgcggcttcatctgcgaggagaagaagatgctcaagagcttcaccgtggccggccttctgggcttcgtggccatcgtgctgttctcgctcatcggcgtgcacgcctacctcgacggcatgagcatcgccggctccagcgcgccggtcgtggtggcgcagagtttgggcatcatggcgttcttcatgatggccgttatcatgatagccacggccggctccacgctggactccacgttcagctctctggcgaagctcacggcgcgcgacctgccgggcatcctggggcatacgcccaagatgaacccgcgcatcatcggcattatcttcatgattgtcttcggcatcgtgggcaacctgcccatgatcatgggcgccgacatcatcacggccaccaccatctcgggcaccatgatcatgggcctcggccccatcttcctgctgcacggcgtggtgaagccgacgaaggtgggcttccagctggcgttctgggttggcatggtgctgggcatcgtggacaccgtggctccggccgccttgggcttcatggatattggcgtcggctcgtacgcgaacttcctcggcgtgaacctgtggggcgccgtggcgtgctgggcggcgtacctcatccccggcctcgtggcacaagccgccgagaagcgtgccggcatcgagcctgcgtggaagggtctgtcgcgggaagagctcgcccacctcgacgcggacgcgaagcgccgcgagcaacaggacctcgaccttgaccccgaggacctggcgcccacaggagcgtaggcggcccggcacccctcccatcagacgtccgcgggcacggagggcctgcactctctctgacgaaggggaagcgccccgcggtttgcgagacgcttcctcttatgagcgctgctggaattcgctcgctgcgattaggctcttagcagtaaaacgatatatcgccttggaaggtttcttgccacttctggcagatgtagccgtggttcaaggcaacgagctccatgatgttggagagatccctcttcgggatgttgctgccattgttggcaaggatgcagccgcccgaggcggtcagccagattttcgttgcatgttccgtcggccgtttgacggcaacgtgaatgtgaaccggttctccgttctccccgatccagaagaagaggatgtaagggccgaattcgagaaccttaggcataagtcttcgtcgcctctcgtgcaaggcggaatatcaaaggggcattatgctgcaggaggtctgcgagatcgtcgatttccttctgtgtgaagccctccacgctggtccatcgataggcgggcaacaggcagcgggcggcatcaaagcctccggcaactggtcgctcaatggctatctccaccgtgttgtcgtcttggatgttggaataggcgatctgcgtctcgtctgcgagtttgatatagttgtacagcataggtttttcacctccagaacgttcgacgccgtctagccgttgattttaccatacgggcgcctcgggttcgcttggtcacgaggcggccgaggtcgcggtccatcctaagctgccggcttctccggcgctttctggtccacgaagtagattttgtaccacatgaggaacatgtagacgatccatatcttgcgggagcggtcggcgccggctttgtgctcgtcgaggaggcgcaccagctcgtcggtgttgaagaacttgcttgcgatgtcgccggtgaaccactccttgatctcgttgtagtagcggtcctggcgcagccagttcaccatgggcacgggaaagcccagcttctccttctgcgcccaatccttcggaatggcgcgctcggcggcctcgcgcagcgtgagcttcgtctgctcgccgttcgccttgaggcgggtggggatggtggccgacacgtcgaacacctgcttgtcgaggaacggcacgcggctctccagcgaatgggccatcgacatcttgtcggtcttgagcaggatgtcgcccacgagccagaagaacaggtcgacgtactgcatgcgcgtggtgtcgtcgaggcccgcgacctcggcgtatgccggcgcgatgagctcctgcggggacggcacgcgcgccccggcgtcagtgcgcttgcccgcgcgcagccgatcgcgctcggcgggcgagaatgccacgccgttggcgttggtgtagtaccagtcctccggcgtctcgctcgcgcgctcaaggtagttcgcgccgcgcacgccgagcgcgcgggccgccttcgacgcgcctttgagcaggcccttcggtgcccacgacagcttctggttggcgaacggggtctggtagatgcggtagccgccgaagaactcgtcggcgccctcgccggagagcacggccttcacctgctcggcggcgatctggtcgacgaagtagagcgccacggcgctcgggtcggcggacggctcgtccatgtgccactgcacgcggggcaggctcgcccagtactcctcctcgccgatgtgcttggagctgttctcgatgtgcagctcgtcggccagctcgcgcgcccaggatatctcgtcgcgctcgccctcgtactcggcgaagcccacggtgaacgtcttgatggcggggttctccttggccaggcacgcggccatgtagctggagtcgatgccgctcgaaaggaacgagcccacctccacgtcggccacgttgtggtagcgcacgctctcgcgcatggcggcgtcgatggcctccacggtgtcctcgcggctgcggccctcgtcgaagttgtactccggccgccagtagcggcgcatctcggtcgtgccgtccgcgcgcacggtcatgcagtgggcgggaggcagcttgaagatgcccttgaagaaggtctcgtcaagggccgagaactggaagcacagatactgctcgagcgcttcctcgttgagctcgcgctgataggcggggtgctccaggatgcacttgatctccgaggcgaaaatgagctgcgggccagaagctccctgctgcaccgtgtagtagaacggcttgatcccgaagaagtcgcgcgcgcagaagagctcgcgggacttccggttccagatggcgaacgcgaacatgccgcgcagccggtcgagcaccgcctcgccccaggccaggtagcccgtgagcagcacctcggtgtcggagctcgtctggaacgcccagccctcggcctcgagctccgcgcgcaggtcgcggtagttgtagatctcgccgttgaacacgatggcgaagtcgcccttggcggccgccgcctcggggctcgcgcagggcgtgccgtccggcatgagcgcgggggaggtgacggcggaatcgtgctcgccggtggcgcgcaccatgggctggttgccgccctcgaggtcgatgagcgagagcctccggtgcccgagcgcgatgccgtcgtcgaggtactgcccctcgccgtcgggcccgcggtgggccatcacgtcgcacatggccttcagggtgggcagatcggcctcggtggccccggtgaatccgcagattccgcacatggtagatggtactcctcgcgtcgtgatcgttgttttccgcgccctcggagggtctgcggaaatgcgtagatatctacgcaaaaaccagcacgtagatatctacgttagcttcgcccatgatagaggaaaacgcaccggcgcccaagcgtctcaaccaagaccgcagatttggttttgcggcgtgcggcgagaaacgagacgctgcgatgtgcgggtcgcagcgcctcgtgcgaggagggctggcggggtatcccgccccacctgccgctcccgtttcgtccaactcttccgtttacgactgctgcttggcggcctcttcggcgtcgaataccttctcgccgcgcaggtacgtggcgagcaccttcgtgttcttgatgtcgagcggtttcgcctcgaggacgttctggtccaccacgatgaagtcggccgccttgccctcctcgaggctgcccgtctcgccgtcgagggacagcgcccaggcggcgtcggtggtgaagctgcggatcatccgcttgatgtccacgcgctcctcgggccacagcaggtaggcggggtcgtccatgtcggtgatgtcgggcacgtcgtagggcttgccgtccacgaggttgcgcgtcacgccgaactgcatcgcatagaaggggttggggttcgaggtcaccgggaagtcggaggcggagacgagcgtcacgcccgcgtccacgaacgacttcatcgggtacatcttctcggcccgctcgccgagcgcggggctttccttcgactcccagtactgcggctctttgaagtgccagtaggggtcggccacggccgtcacctccagctcggcgaaacgcgggacgtcgtcttccttcacgagctgcaggtgggtgatggcgttgcgctcgtcgtcgtccggcacgttctgctcggcgtactcgatggcgtcgagccccatcgtcacggcctcgtcgccgatggcgtggatatgcgcgagcatccccgcgcggttgatggccgcggcggcctggttgagggggtcctgctcccagccggtctcgccgtagttggacgggttgtcggcgtagggctcggatagcagggccgactcgctgtccatcacgccgtcgacgaatatcttgccggcgatcaccttgagcgcgtcgctgtcgtacttcttcttgagctcctcgagcttggtcaggtcctcgtcggtctgccagctggtgacgatgcccgcgccgcgtacgcgcatggtgagctcgtcgcggtccgcgagcgcctggtagccctcgtagggcacggggaagaaaccgttgccgggcggcgtgaagatggacgtgtagcccaacgcgttgaggccctgcagaaacgtcgccagcccgtcggccacgttctcttggttgacggggtatctcgaggtcatcgacatggcggagtcggccagcgtgccccataggctgccgtccgcgttcttgtagatctcgccgccgggcgtggagggcgtgtcgggcgtgattccgaggtactcgaacgccttcgagttcagccacgcgccgtgtccgtcgaacgagtacacgagcagcggcttgtcggggctgatctcgtcgagtcgctccttcttgggcccgcgctcaagctcttcgccggggtagaggctggccatgtagccgaagccgagatatgtgtccttctcggggtgggcgtcgacgtattccttgatggcggccagctcgtcgtcggcagtggggaggccgatgaggctgaagtcgaagaagtcgggcgatcccgaatggatgtggccctcgatgaggcccggcagcacgaatctgccctggaggtccaccacgttctgggcggtgtctttgtaacgctgcccgtcggacgacgatccgacgaaggcgatcttcccgtcgcggacggccagcgcttcggccatgcgatcctgaccgtcgaccgtgtagatgacggtgttctcgtaataggcgttcacgggctcgtccgcgttcgacgcggcgttcggtgcggccgtgtccgtgccggcggtcgagcagccgaacaggccgagcccggccgtggcggcgagcacggcgcttcccgccaggaacgtgcggcgggaaaggcaagcgggatggttcatgggtggaatcctctcgtttcgacggcagagtgagctccataatgcagcgcagagcatcgcgaccggcacgcgaccaacaaccgctaacgaacggtgtccggtgtgcatcccgcccgtaacgacgcgcgaccggacgcgctgcgggtcgggccgcgcgaccctggtcgcccatgagcgcgcttctgcgaaaacgtggtcgccaagcggggttttcccgctataatgatgcatttggatcgcggcgcagagggtggatgttcggcggcgcccgtatccggcctcccgcggacgcgtccgcgccgggggttcccttgcattgatcgatcgacaacggaggttatcgatgtcttctaccggcacgcccgcgcgctcgtcttggtcgggcaaatgggcgttcatcctggccgccgcggcttccgccgtggggctggggaacatgtggcgcttcccgtacctggcggcgaagtacggcggcggcacgttcctgctcacgtacctggtgctcgtgttcacgttcggcgtgtcgctgctgctgctggagacggcgctcgggcgcacgacggggcagtcggccatcggcgcgttcaagcagttcggcaagaagtacgcgttcatcggcatcctggcctcggccgtgccgttcattatcacgccgtactactgcatcatcggcggctgggtgacgaagtacgcggcggcctacctcatcaacgggccggaggcgctggccgacggcgggaacttcttctcgggcttcatcaccagcaacacggagagcttcctgtggatgctcctgttcatggctatcgtgttcatcgtggtgtcgctgggcgtgaagggcggtatcgagaaggcgaacctcatcatgatgccggcgctcatcgtcatggctattgccattgctgcctatacgctcctgcaaccgggcgcagccgagggtgcgctgtattacctggtgcccgacttcagcaagttctcgccggagctggtcatcggcgcgctcgggcaaatgttctacagcttgtcgctggccatgggtattatgatcacgtacggctcgtaccttgaccgcaagtccagcctcacgcagagcgtcacgcgcatcggcttcttcgacgtgggcgtgtcgtttctggccggtctcatgatcgtgccggccgcgttcgtggccatgggctcgggcgacgccgtcgcgggcgcggcggggccgtcgctcatgttcatcacgctgccgggggtgttcgccggcatgggggatgcggccgtggtcgtgggcttcgtgttcttcctgctggtgctgttcgcggcgctgaccagcgccatctcgctcaccgagacgtgcgtgtccatcatccaggacggtgcgggctggtcgcgcaagaaggcgctcggcacggtgatcggcgtggtcgtggtggcgggcatcttcgtgaacctgggctacaacggcctgtcgttcatcgagccgctgggcgccggcaccacgcttctggacttcttcgacttcttctcgaattcggtgctcatgcccatcgtggcgctgctcacgtgcgtgttcatcggctggatcgtgaagccgggcctcatcgtgaaggaagtgaagctgtcgagcccgttcaaggccgagaaggcgtggacggtcatgatcaagttcgtggcgccggtgctggtggtggtgatcttggtggcctacgtggccgcgcagttcgggctgttcagcatgtagcctgcttggagcccataccagcgcattgcggggcgccctcggcaacgggggcgccccgttcgttttcgggatgctgacggggcgggtacgggcgggaaagggacgcccggcgcggcgcctttcgcgcgaggtgcgcgctaccatgttgggaacgcggcgccaccggcccatcctccgccgggaggcgtcgcgacggcggtccgtggggccgcctttttcaaccgcgcattctacgacgaaaggggtctgccatgatggaagacacgatcgacgagttgaagggccagccgcgcgacgagggctacggcaagggcgagaactacgggcacggcgagggcggccgcgagggcgagggctacggcgcgggcgagaacggccgcgagggccgccgccgcggcgagggctatggcgagggatacggctccggcgaaggcgggcatgccggcgagcgctacgccgaaggctccggcaaggccgacgagcagcacggcaagggcgaaggatatggcgaaggctccgagaagggcgagcggtacgcctcgggcgagcgctacggcgaaggcgagcggtacggccagggcgtcgccgagaacgagcagtagccggcaatgcaatcgatacccgcgtgcagcgtggccgacgtggccgcggcggcccgtgcgcacggcatgacgctttccacgatggtggagcgcaccatgcaggcggcgggccgccgctcggtgagacggctctacatcggctcaaacttctgcagccagtacttcctgcgccagcccgaccaggtgtggcgtgaggcgttctcgctttgccgccgcgagggcataccagccacgctcgtggtgccggtgttctcccagaaggacctggccgaggcgtgccgccgcatcgacgagctggtgggagcgaaccgcggcgtcgtcgacgagataacggtgaacgacgtgggcatggtggcgtactgcctcgaccggtacgggttgccgctgaacgcggggcgcctgttctctaaggagccgcgcgacccgcgctacgcggagctcttcgaggagaggcatgcggtgggcgttcccgctctcgtcaccgagctgttccgccaaggcgagctgcagggactcgagctcgatcccacgcatgcggcgctcgacctgtccgagctgcgcggctacatgccgcatctcgaggtgggcgtgcacatgccctactgctatatgtccacgggctcgatctgcgagctggccggcatcggccgccccgtgcgcgagaagttccggccgaacgcgccatgcaagctcgaatgtgcgcgttgcgccatcggctacgggctgccgtacggcgcgcggctgctgaagttcggccgtgccgtgtacttcccgaaccacggctgcaccgtgtgcgagggagaggacttccgcatgatcgtgtcgccgttcgacgtgctggtgccgcgccgcgacgcgagggttgagcacggccccggggccgtgcgcttccaagctaaggaagggcagggatgcgagcgcgcggccgccgccgccgaggtaccggcggcggaactcggtccgggcgaaggtccggccgctgtgcccgatcggggcggggcgacggcccgcgtgtccctcgcggcggccgggagcgcgcgatgaacccgctcgtgccggtgaacgaccgggcatacctcgggcgctacgccgaggcggggggcgaggagttctacgtgggctttcacgatgcggcctggcacgagcgcttcggcgacatggcggacctcaaccgcatgacgggcttccagcaccaggcgaacccctacggcttcgacgaggtgctcgatatcgtggacgaggtgcgcggcctgggcaagaagctctacgtcacgttcaacgcgaacgtctacaccaaagagcagctggacttcctgtacggctacttcgagaggctgcacacggccggcgcagcgggcgtcatcgtgtcggtgccggaggctgtggagccggcggccgacagcggcctggcggtggtggcgtccaccatgtgcggcgtgtacaacgccgacatcgcgcgcttctaccgcgagcttggctgcacgcgcgtcatcgttccgcgcgacatggggctgtccgagatcgaggcgctggcggaagccgtgcccgatgtggagctggaggtgttcctcatgcgaaacggctgcatcttcgcggacggctactgcctgggccgtcacttccagaaccgcaacgcgctctgctgggatgtgcgccacgccgaccgggagttctacaccgtggggcgcggcagaagcctgtcgggcgccgcacgcgagaacaacgaggcctacgggcggttccaccgcaccgcctgcggcctgtgcgccatataccgtttggagcgcgccggcgtggccgcggcgaagatcgtgggtcgctcggacgactcggcctgcatcctgcgcgacatcgaggccgtcgtgcgcaacgtggagatcgcgcgcgcgtgcgtcgacgaacaggagtaccttgcgcgtatggatgtgccgcccgagcgcgccgccgcctgcacggacgggctgtcgtgctactacccggaggtgaggtttccccgcacggtcgcgccgcgcgtccctcggcgcgcggcggggtagggccggcggtgccgatcctcgcgcgctcccagcgcgggcgtgcaggaacccccccctgagccggcaggtgcactgttgcgagcttcttcgtcagcgtgcgttttgccgtggatgggcgcacgctgcctgccttgcccttttgaagcagagcgcctcctcgtaggcttcggccaaaaggtcgccagggttcaggtcgagcgcctccgctatcctcattgccatggtgacggaggtggcgctcttgccgcattcgatgcggcagaggtgcgtgtggctcatgcccaccatgagggcgaacttcctgatcgagagtcgctcgctcatcctgtgccgcgacacgacaaggccgagtgcctgcttgaaggccaccgtgtctcccagatagctgctcgtttcgattgtcatggagaacagtataagcctcgggccgttatccggaccgcattcttgccgtataagcgagattatgcgaggacggccgcgcggtgcctgttttgagtgatggtgcacggtgtgctcgtgcgaggacgggcgttttgctatcatgggacgatacgtttgcaacgatcgtcaaaggaagttccatgtcgctttccatcggtatcgtcggcctgcccaacgtcggcaagtccacgctgttcacggccctcaccaacaagggcggcctcgcggccaactacccgttcgccaccatcgagcccaacgtagggatcgtgccggtgcccgacgtgcggttggacgcgctggccgagatcgaccacccggcgcgcatcgtttcggccacggtggagttcgtggatattgcgggcctggtggcgggcgcgagccagggcgagggcctgggcaaccagttcctcgcgaacattcgcgagacggacgccatctgcgaggtcgtgcgcttcttcggcgacccggacgtcgtgcatgtggcgggcaaggtggatccgctctccgacgtggacaccatcaagaccgagctcatcttggccgacatgtccacgctggagaaggcgctgccgcgtcttgagaaggaagccaagcgcgacaaggccggcgccgccaaggtggccgccgcgcagaaggtgttcgcgggcctgaacgaggggcaccgcgcccgtacgctcgacctcgccgacgacgagcgcgccgcgctgcacgatctgcacctgcttaccatgaagccgatgctctatatcgccaacgtcgacgaggaccaactggatgccgacctgcccgagatcgacggctgcgcgccggtgcccatctccgccaaggtggaggccgacctggccgagctggacccggccgaggcgcgcgagtacctggaggccatgggccttgaggagagcggcctggcccgccttgtgcgcgaggcgtacaagctgctgggcctgcagagctacttcaccagcggcgagaccgagacgcgcgcctggaccatccccatcggcgcgaaggccccccaggccgccggcgtcatccacaccgatttcgagcgcggcttcatcaaggccgagacggccgccttcgaggactacgtggggctgggcggcgagaaaggctgccgcgacgccggcaagctgcgccaggagggcaaggagtacgtggtgcaggacggggatgtgatgcatttcaagttcaacgtgtagcgcgcctttcggcgtcctgcttggctgcatgcccccttcgagcagggggcatgcagcttttcggagcgtttagtgcatgccggggtacacggctccggtggcgggcgcgggcgcgtcggcgtcgtcggacgggatcacgccgaactcggccagcagcccgtagaggtcggtgcccttgagcttctcgatcccctcgtgcagggcgagcttctcgagggggttcatgtccatgtcggtgatgggcctgccgtccctgatgagcgtggtggcgttcagcaggtcgcggatgtcgaacgcgctgccccacacctcgggcacaccgcggtcgacgccgcacagcgtgtagacggcctccatgccggtgcgcatggaatactcggtggtgaagatggtgtcgcgcggcgtttcggcgaactgcccgatgaacgcgaagttcaccgcgccttcgggcacgacgtcggggcggtcgccggcggcgcgcggcatgaagaacgccgtgatgtagggcatcatgcacggaaccgtgttggcgctgttctcggcgagatcctcgatctgcgattcgggaacgcccaggtggtacagccattccatgcagatctccttgccggtgcattcgcgcagggtctttttcacgtagttgccgggcacgtcggtgaacaggccgtacaaccagccgcacagctcgttgccaggttgtgcgcggaactggggctgcctgttgaacgtccagctcaaaagccaattcgagtctttggcggtcacgatgccgccggttacgacgccgcctgagaacggatcgcggcggcagatcctctcgatgtaggggacgatcttctcgtcgagcgtcgtgacggtcgcgctcatccaattggacttctccggatcgccgatgaacttttccggtcgtccgaacgacgggtcctgtcgggcgatgcgccgccacaggtcgaacccggttccccgttcgagcacggtgttgaactgcgccggctcgtcttgcgatccgaaggacgagttggcaacgcagctgccgttggtgatgaacaggaggtcgttctcggagaggtggaaggccttgggcgcgccctcgcatatcgtctgcacctcggtggccaccttgcgctcctcggtattggagaacgtgacgtcgacgacctcggtgttcaagtggaactgcacgccttggcccttcaggtagttcaccgtgggcaagatgagggattcgaactggttgtactgggtgaagcgcagcgcgctgaagtcgggcaagccgccgacgtggtgcacgaaacgctggatgtagcgcttcatctcgagcgcgctgtgccagttctcgaacccgaacatggtgcgccagtacagccaaaagttggaatcgagcacgtcgtcggagaagtagtcggtgatggctttgtcgtcgagctgctcctcgggcgtgaagaacaggttcatgatctccatgcacgccttgtcggacaagccgaactcgttgtcgaggccggcgtcttcgccttggttgaccgtcgcgcggcacagggagtagttgggatcgcgcttgttcagctggtagtagtaatcgaggatgctcatgttctcgtcctcgatggaggggatggatcggaacaggtcccacatcacttcgaagtggttgtccatctcgcgtccgccgcgcatggtgaacccgatctgcggatactcccatccgtcgcaggcgccgcccggtacggcgtcgcgctcgaatatatgcacgcgcgagccgtccatctgggcgtctcgtatcaggtagcatgcggccgtcaagcccgccaatccggtaccgacgatgtaggccgatttatcctcgatgccttccggttttgccgggcgggcgaacgcttcgtagtttccgctggaatagtacacgggttctccaatctctcgacgtgaaggtacggccatcattgtgatgcggggttcttgcggacgagggaagcgtaccgagctgatgacgtgccgttgggaggaggtcatgagggggtgttgcctcgaatgggcgatgctcgcaccggctatttgggtatacttgatcgcgtgcaggtgggctgggatgaaaggggagggaacgcgtatgagcgagttcgtcgaggcgctggtgagcaacggcaagagcccgggattgccggaagagcacgactggttcgggaggctcgtaggcagctggaagctcgactatttcgatcgcaacctatcctcttcggttagaggcgagtggatcttcgagcgggtgctcgagggcatgggcatccaggacgtgatcatcctgcctgcgcgcgacatgcaaacggagtcgccgcaccccctcaccgagtacggcacctcgctgcgtatctacaacccgggcacgtgcgcgtgggacgtcgcctacggctatgcgggcaagatattccggcttgaggcgcggcgtgaggatgacatgatcgttctcacgaacctcgatgacgagcggcataagtgggtgttcgtctccatcgaggatgaccgcttccattggcagaacgtcaacgtgcaagacgacggcagctggcacgtgaacgccgacatctacgccgagcgcgtctagggggcgtgacacggggacggggataatgtcacgctccctttcgcttctctcggtcgtggcgcgtcgcggagcgtgacattatccccgtccccctgtcacgccttcgcgcgccaagtcgcctacaggtgcatcatcagccagctgatgaggtcttcctcgacctcgaacttgaggtcgtcgtagttgtggatctcgtggcggtagccggtgtagagtttcgtcgtcacctcgtggccggtgtcggcgagccagttcgcgcattggtagacgccctcgccgtagttgcccacggggtcctggtcgccggcgatgcagaggacgggcaggtcggcgggcaccttctccgcccactcggggccctcgatgaccagcatcatgtcgatgaaatcgcgcaggcttacgttgtgcgtggggtgcgtgaacgcgtcgaagggatcctccgcgtggtccttctgcacggaggggtcgtggcagatccactcgttgcccagcgcggcgccttcctcgcagcggccgaacatccagcccatgagctcgcccacgaaggccgggttgctctcgtggcccttgccggcggcgatggcctcgtccagtttcgcgcgcacctcatgcgtgttcttgaagatgccggtggtgccgcagtagacggcgcccgccagctcgtcgccgtacttcgcgctgaagtcgcgcgcgatcatcgatcccatcgagtgcccgaacaggaagtagggcaggtcggggtacttctcgcacacgaagtccttgaaccgcttctcgtcctccatcatggtatgcggccccgcgtcgccccagtcgccccaggtgtcgttcgctatggcggtggcgccgtggcccacgtggtcgtcggccgccacgatgaagccggcgtccatgagcgccacgatcatgtggaagtagcggcgggagtgctcgccgaagccgtggaccagctgcacgatgccctccggctcgcaggccgggacgtagatccaccccgtcacctggtctcggtcgttcgacgatggaaagcggatttcatgcagcatggcaagtcccttctctcgtgttcatgaagcggtgcgcgtggacggcggccgcgggtcggcgacctgcgtgccggcgcttgcgagcagctttcgcggtcagactcgcgtggcagacgccaacgggcacccgcaccattatcgcagacaggagccttcggggctccgtgtttttcgcaacgcgccttgcggcggcacgccgttttgcgataatgggcagacgcgccggatccaaggcgcgacgaggacggcgtcgtgagaaagcgggggatcgatggacgagatcgggaagctgggcttcgggttcatgaggctgccggaggtggaaggcgcgggcggctccaaggagatcgacctcgacacgctggccggcatggtggacacgttcatggacgggggcttcacgtacttcgacacggcgcgcggctaccatggcggccgctcggaggcggcgctcaaggccgcggtggtcgaccgctacccgcgcgagtcgttccaggtggccacgaagctgccggcatggatggcggaggatgcatcttccgcgcgcgcgatgttcgacacgtcgctcgagcagacgggcgcgggatacttcgatttcttcctgctgcacaacctgggggaggaccgcacgcacctgttcgacgactgggggctgtgggactacctggccgagaagaagcgcgaagggctcgtccgcaacctgggcttctccatccacgacaaggccgacgccctggaggcggtgctcgacgcgcaccccgaggtcgatttcgtgcagctgcaggtgaactacgcggactgggagagcgagaccgtggagtcgcgcaagtgctacgaggcggcgcgtgcccgcaaccttcccgtcgtggtgatggagccggtgaagggcggatcgctggtgaagctgcccgataacgcggccgccgtgctgcgcaacgccgcgcccgacgagccgctcgccgcctgggcgctgcgcttcgccgcgtcgctgcccggcgtgctcaccgtgctctcgggcatgtccacgcccgagcaggtggaggagaacgtgcacaccatgcgcgccttccgccccgtcggcgccgaggagcgcgcggcgctcgaccacgtgcgcgccatcctggacggcattcccacggtgccgtgcaccgactgccgctactgcctgaagtcgtgcccgcaaggcgtgcgcatccccgccgcgctcgcgtcgctcaacatcttggcgctgtacggcgacgagcatcgcgcgcaggaaaattacgactggaacgcctcggcgggcccggcgtcctcttgcatcgcgtgcggcgtgtgcgagggcgtgtgcccccagcgcataggcatcgtgcgcgagcttgcgagggcagcgggcctgttcgagaagaggtgaggcgcgtcgagccggttggcttcctgcgccgtcggggaggtcgggcactggccctggccagccgcagagggcgtcgaatgcgtctggctgtggtggggtgccgcgcggcactggtttggggagatggccggccgcagtcagcgtgagaggacgggcgcctgccatagccgaccggaaggggggcgggcgtcggatgcgtctgtcgaaggcctggcactggccgcggccggctggaaaagggtgggcgtcggtcgcagccagccggaggaggctgtcgtgaaaatcggcctctgctgtcaaaaacgaggcggtttggcaatcttgggacgcgtttttgcgttcggaaaacgggctgtacggatgaaataccaggtcgtcggcgatcaccttccccgccacatgttggtgcgattgccaaaccgcctcgtttttggcacgatggggcggatggcgttaccgtgcgtcttgccgcggggccatgtgggaccgatatcctgcttgacttggagcgcgctccaagttgtatggtgggtggtatctaatgggaaggaatgcatcgatgttcgaacaggatgaggccccgctcgtcgggcccggccaaaaggcaggtgcggaggcgctcgacgactttttcgcgcgcacgccgcggctggccgtggcgttctcgggcgggtgcgactcgtcgtacctggtggcagcggcgcgccatgccggcgtggatgtgcgcgcctacctcgtgcgcacggcgttccagctgccctgcgagatagccgacgccgagcgcctggtttccgagttgggcttggagctggtcatcatcgatgccgacgtgctggccgaggacgccatctgcgcgaatccttccgatcgctgctaccggtgcaagcgcttcatcttctccacgatattggagcgccttgaggaggacggcttcgccggcacgcccctggccgacggcacgaacgcgacggacgaccccgcgcgccgcccgggcttccgcgcgctggccgagctggacgtggtgtcgccgctgcgccgcgcgggcctgggcaaggacgacgtgcgggcggcctcgcgggggctcgggctgttcacggcgggcaagcccagcttctcgtgcctggccgtgcacgtgccggaaagggagcgcatcacggcgacgtcgctcaaagcggcggcgcgctcgcccgaggtggtctcgcggcttgtgacgcgcaacgcggctatcggggtcgacctggacaccgtgtactcggccgacggcgtggtcgcccatctggtggaggacgcggaaggcggtcgaggcgctgaaggcgcagctgcggtcggagagcccgtcgacgaggaggcgtcgaacgcccttgcgagcgccctccgcggggcaggagctttcggtgggatggaaaaggaaggggcgctctgatggaggaacgcgagatgcgcgcgttgctggcggcggtggcggatgggtcggtcgacccggacgaggcggcgctgcgcctgaagacggccccgttcacggacctgggctacgcgaaggtggaccaccagcgcggtgtgcggcagggcgtggccgaggtcgtgtacggggcgggcaagacgcccgcgcagatggcgggcatcgtggcgagcatgcgtgcggcagggcaggagcgcgtgctggtcacgcggctcgcacccgaggcggccgacgagctgcgggcgctcttgcaggcgtccgacccgctggcggccgaagcgttcgcctaccacgagctgccgcgcctcggcctggtgggcggcctgcccgagcccgacggcaacgggcctatcgtgatcgcggcggccggcacgagcgacctgcccgtggccgaggaggccgcgctcacggccgaagtgctgggcaacgtcgtcgtgcgcctgtacgacgtgggcgtggccggcatccaccggctgctggcacatgcggacgacatcgcgtcggcgcaggtggtggtggccgtggccggcatggagggggcgctcgcgtccgtggtgggcggcctggcgtcgtgcccggtcatcgccgtgcccacgtccgtgggctacggcgcctcgttcggcggcgtggccgcgctgctggccatgctgaactcgtgcgcctccggcgtgtccgtggtgaacatcgacaacggcttcggcgccggcttccaggcgtcgtccatcaaccacctgaaagcgaagtgaatgccatgaccgtccttcatctcgacctgacccatgacgccacgcgccgctccctgctcgccgacctgcgcgcgcggctcgatgccgacgcgcgcgccacgctcgatgccgccgtggaggtggcgggcgtgcccgagcggcatcatcacgacttgcccgacgtgctggccacgatcgacggcctgcaggcgagcagccgcgtgaaggacgacatgcgggccgtgtaccgcatccttgccgaggccgaggcctcggtgcacggatgcgcggtggacgagacgcacttccacgaggtaggcaacggcgaggccgtgcgcaacgtgtgcgccgtgtgcctggccgtggaggcgctcgcgcccgaccgcatcgcggccacgcccgtgcaggtgggcagcggcacggtgacgtgcgcccatggcgagctgcccattcccgcgccggccacggccgccatcctggattcgggcatccccgtgtgcgccgaacgcctggacggtgaacgctgcaccccaacgagtgccgccctcatcaagcatttcgtggacgagttcgatgcctgagcgagcctgcagccggcaatgcgccctacgccgtgacgggcgcctccagcgtgcggcactatgcgcttccggtggcggccgaaccgtcgtatactggcgctgaagcaaagggcgaagacggcgcgtgagggcgtcgcggaaggcgggatggaaatggcgtacgttctcacgcatgcgacggtgctcgacggcacggagcagatggagccccagcccaacatgacggtggtggtggatgacggcgggcgcatcgaccgcgtggggccggccgcctccaccgtggggccgctgggcgcgcgcgagatcgacctcggcggcgcgtacctcatgccggggctcatcaacgcgcatgtgcacctgtgcggctcgggcaagcccatgagcgccgggggcgccggcgacctcatcgataaggtggtgggcaacccggtgggcatgtgggcgctgcgccgcatgatccgcggccatgcccaggcgcagctggccagcggcgtgaccaccgtgcgcagcgtgggcgaccccggcttcgccgacgtggacgtgcgcgacgccatcgacgcggggaagtgcgccgggccgcggctgctcacctccggcgtgggcgtcacggtgccgggcgggcacggcgcggggctgttcgcccacatcgcgaagacgcccgaggaggcgcgcgagatcgtgcgcgcgtgcttcgcccgcaagtgcgacctggtgaagctgttcatcacaggcggcgtgttcgacgctgaggtggagggcgagccgggtgtgctgcgcatgtcgcccgaagtggcgcgcgccgccgtggacgaggcgcacaagctgggcatgccggcggccgcgcacatcgagagcgccgagggcgtgcgcgtgggcctggaggccggcgtggacaccatcgagcacggcgcggagctggacgacgagctgatcgcgctcttcaaaaagaacggcgtcggccgtgcctcgtcgctcacctgcaccgtctcgccggcgctgcccttcgtggagctggcacccgagaagacgaagtccaccgaggtgcagaaggtgaacggccgcatcgtgtacgagggcatcgtgcgcgccgctcagcaggcgctcgcggccggcatccccgtgggcctgggcaccgactcgtcgtgcccctacatcacgcactacgacctatggcgcgaggtggtgtacttcgagcgcctcgtgggggcgtcgcgccagatggcgctgcacacggccacgctcggcaacgcgcgcatcctggggctgggagaggagacgggatcggtcgaggagggcaaggccgccgacctcatcgtaaccaaggcgaacccgcttgagaacctggaggccctgcgcgacgtgtcgatggtgatggttcgcggcaagctcgacgagcacccccgcgtgaagcgcatccccgagctggacgccgagctcgacgggttcctgccgaaggcctgctagcgattgagccggcctccgtctgcgtacgaggaggccgcgggttcgcgcgaacggagggcgagcgtttccagcaggcgggcgaactcggcgcgctcctcgctgccggcggcatccaccaggtcgcgggccgattggagcgtcgccgtgcccgcgtggggcgaatggcgcagcaccatggtgcactcggcgacggcggcggccaggcgccagtcgctgctcggctcgtcggtctggtcggcgcgcccgacgacgcgcgcctggctttgcgtgacgtcctcgccggcggggcggtagcgcacggagcaggtgagccactcgctgccgtcggtgcagatggcaaggccgccgcccccgtcgccgcccgacgcgcccgcctcggcgtctcccgcccctgcggcgtcgccgtccgagcggccgtacttcagctgcgggacggccacctcgaacggcgaatcgaccggcaccacctcgtaggccacggtgaacgcgtgccccgcgcccacctcgccggcgtccgccgtatcgtccaggaagtcctcgtcggccagcgcacggttctcgtagccgataagccggtagcctttgacctggacggggttgaattccacctgcagcttcacgttgtcggccagcggggtgaagttcgccagcaggttgcggcccagcacgcgccgggcctcttcggcgcagtcgatatagtggtaggagccgtcgccgtggtcggccagcacctccatcttggcgtcctggtagttccccgtgccgaacccgagcaccgacaggtacacgccttgcccgcggcgctcgtccacgaagtcgtgcagctcgtcctccgaggtcatgcccacattcaagtcgccgtcggaggccatgacgatgcggttcgcgccgccttcgacgaagttccgctcggctacgtcgtaggctgtgcgcaggccggcctcgccgttcgtggagccctcggcccgcaggctgcccactgcgcgcaggatgcgctgccggtcggcgccgctcgcgccttccagcaccacgcgctcctcgccgctgtacgtgaccagggacacgcggtcgttctcgcccaggccttgcacgagcgtggcgaacgcctcctgtagaagcggaagcttgtcggggtcggccattgagccggacacgtcgacgaggaaaacgaggttcgagccgacctcgggagcaggctcggccggagcggtggcgaaacccatgaccaggagcttcgtgtcggggttccatgggcagtcggccatctcggcagagatgccgaacaggtcgtcgccctcgggcggtgcgtagcggtaatcgaagtagttcagcagctcctcggtgcgcacggcgcctgcggggatgtcggcgggccacgccccgtcgcgcaccatgcggcgcaggttggcataggaggccgtgtccacatcggcggagaacgtggagagcggccgtgcggccgtggacacgaagccggtctcctccacgtgtgcgtacccctcgccggcataggggtacgcaggcaggttgccgtcgggcccgggagggcggccggcggatgcgcctcccgcgttcatgccggccgcgcccggggcttccgatgcggatccgtcccgggctgcaccgacggcgtggagctcttcgcctggcgccgcctggaggctggccgggagcgtgcaccaccaccaggcgcctgccgccagcaccgccgcaagcgcgaaggctcctgcggcgagcaggcgggcatgcgggtggcgcggggcgggggagcggtgctcgttcgcgcgggcgggcatagaggctttcatgggcattccttctctcgcttgctgcccttaacacgatcgaggatgccggtttgtcggggagattccgcgcgatgggccgcaccgctcggaggggcgtggcgcggaccgtcgcgcttgcgtccgctgcgtgcggttcccgtgtgcggaatcccgcgctatgcggcttcgtcggcccagtagcaggcggcgtcgcccggatagcgcacggcgtagggatgcgcgtcgctcgccgaggcgaaaaccgtgcaggctacggcatggccgccggtgccgtcggaggcggtcgcctgctcgatctcggcgcccacgagggccgggtcggcgacgagcgggtgtcctgcgtcgtcgaccgcaatgcgcagggcctggccggaggcgagcgtgacgaacgggtagcgcgcgtcggcatcgctgccgccgctggaggagccctcgttggccgaaccgtcggaggacggcgcatccgcagagccgtcggacgggggcgcgcccgcggagccgtcgtttcggcccgcctcgggtgcgccgtccttggcgccgccggacggcgagccgaggtcctcggaagccatgccgtccgagatgctggcaagctcccctgacgacgaggcggctccgctgcccgctgtctgcaggctgctgttcagctgcgcggcgaccagcccgtgataggcgaacgcgcccacaccggccagcagcaccaggcacgccgccgccggaagcagcatcttttttgcatgctggcgccgggtgctgcgccccgtgccggtctgcgcaaccgggccgcgccccttcgggccggttgcggccgcatgctcgccgcaggttgcgagcagggcggcgagcatgcgctcctcggctgccgcggatgggcccatgcggtcgaaggcgcgtgcgatcgccgcgtcgagccccggctcgcagaagggggggtccgccgcctggcgcgcatcgggcgcgttgggggcgataggcggcgcgaaggcctgctcgtcctcgaaggggtcgtcgacggcgaataagtccttgcggtcacggtcgttcacggcgctcacctcccaacatggtcttaagcagcgcgcgggcctcgctcaggtggctgcgcaccgtcgaggcgggcgtgccggtgatgagcgcgatgtcggcggtgcggtacccttcgtagtagtacaggtacacgcacgtcttgtacttcgggggaagggcgagcaccgcctcgagcgtctcgtcgccatcggcggccgtccggtcgtcgggcacgtcgtccggcagctcggctgcgcatcgccgcgccgcgcttcttagcatgtcgcggcagtggttctgggcgcacacgatgagccacgccttctcgtgctcggcatcgttgaaacgccgcggcttgcaaagcaacttcgcgaacacggtctgcaccgcatcctccgcatcggccgcgttgccgagataggcgtagcacaggcggtagaccgtcttctcatggcggcggaacaccgcggctatgtcgtcgttcttcggcaggttctccctttctgcccctaacacgatcgcaggggcggaaatgtcgggaaaccggcatacttttttgcgcgcgattgccttgttccccgctacggacagtgtagcggatgcgtaggtgatggagggaagcggttcgggccgtgtcgggtcccactcgccaaccgtcgaaatgccgttcgaatcttgcgcggcaaccgtcgggaccttgcaaggaccttgcagggatcaagcagattgccggctcaaattataaacgagatatcacctgttcaaacagcaaaattgaagacgcttcaacatgtgaaaccagtgcggaacgtgctagaatgcctcgcgtcagcggtgtccgcttccagcgggtgacgccttagagataaggaggatccccatggatagtttcaacctgatcgcaggactttgttccatcttgtcatttcttctggcagcctacgactggtcgcagcgaaacggaaagcgaggggcaaggcgaaacaagcatcaaaaaggcggtcgagctagcactctgaccgcctaacctagtcccgcgtcacccgcccggactcacaaccccgcgggcaccgctgaccctgcattatacacaccgcagcgtccggtgcaagcccgattttcgggggcgttgcggtatcatgatggcgagacgagcgagggcgcgaatgcccagagagggaagggcccgatggttgaggcggtggccgcgaaggcggcattgcgggagcatttcggctacgaggagttccggcccgggcagcagggcgtggtggaggccatccttgccggccgcgacgcgctggcggtcatgcccacgggcgccggcaagtcggtgtgctaccaggtgcccggcatcgtgatggagggcctcgcgctcgtggtgagcccgctcgtgtcgcttatgggcgaccaggtgcgcgcgctcctcgacgcgggcgtgcgcggtgcctacctcaactccacgctcacgcccggccagcaggccaccgtgctgcgccgcgcgctggcgggcgcgtaccagatcatgtacgtggcgccggagcggctggccgacccgcgcttcctcgagttcgcgcgcgaggccgccatcccgcttgtcgccgtggacgaggcgcactgcgtgtcgcagtggggccaggacttccgcccgtcgtacctggccatcggcgacttcatagagcagctgcccgcgcgccccgtcgtggcggcgttcacggccacggccaccgagcgcgtgcggcgtgacatcgtgcgccttctggatctgcgcgacccttacggggtggtcacgggcttcgaccgcccgaacctctacttcggcgtggagcgcttggagcccaagcgcaagctcgcctggattggaagctacgcgctcgcgcatccgggcgactcggggatcgtgtactgctccacccgcaaggacaccgacaaggtgcatgccgcgctcgtcgccgcaggcgtgcgcgcgacgcgctatcacgcgggcatgccggcggcggagcgcgccgagagccagcgcgcgttcatcgccgacgacgcgccggtcatggtggccacgaacgccttcggcatgggcatcgacaagtccaacgtgcgctacgtgatccaccacaacatgcccggcagcatcgaggcgtactaccaggaggccggccgcgccgggcgcgacggcgagccgtccacgtgcatgctcctatggagcgacggcgacgtgtccacctgccggttcttcatcgagcaggagtcgggcaacgaggagctctcgcccgaggaggccgatgccgtgcgcgcctcgcgccgccgcctgcttgaggccatggtgggctactgccacaccacgggctgcctgcgccgctacatcctgaactacttcggcgaagacgccgcccctgcggcgcccggccaagcccccagcgtgcgcgaggcgtacatcgcgttcggcgaggccgcgccgaacgacggcaccgcgccgaccggcggcgcttccgcgtctgtcgccgggtgcaacaactgctccaattgcgagggaacgttcgacgccgtggacgtgaccgacctggcgcgcgccgtcatgcgctgcgtgcaggagctgcgcgggcgcttcggcaaggggctcgtggtggacgtgctgcgcggctcgaagagcgcgaaggtgctcgatatgcacctggacgaggcggccagctacgatgcggtggacgcctccgccgcccaggtcaaggaggttatcgagcttttggccgccggcggctaccttgcgattaccgaaggcacctaccctacggtgggacttggcccgcgtgcccgcgaggcggcggaggacgggttctccctctccatgaagaaagtcgtgcgcaaggccgaacgcgtgcggggcgtcgaagcgggcgccggccgtgcgttcggcgcctcgggcacggcggccgcgtcgggcgaggccgatccggagctgttcgagcgcctgcgcacgctgcgcaagcgcctggcggacgaggccggagtgccgccctacatcgtgttctcggacgccaccctgcgggacatgtgcgcgaagcgccccgccaccgaggacgcgttcctagacgtctccggcgtgggcgccacgaagctcgcccgctacggcgaggcgttcctcgccgagctcgccgcctatgaaagtgcaggatagcccgcccggacgccttcgcgccgggcgggctgacggccaccgtcctgcgggccctcctacggggcagcaggcgctgccggcgcggcaggtgccccgggtgccgacgggctgctgccgtctgacgaggcgccgtcgttgccgcgccttgcggaatcgggagccgcttccacgttgaagtcgaggtcgatgctgccgctcgtggtgcgcacgacgatgcgcttgccgacgccgatcgtaccgctgggggcgtccacgcggccgctcgtagaggagaccgcgatgtcgtagtcggtcgcagggttcgcgaacatgacgtccaccctgccgcttgtcgcctctatcatggcctcgttcgcgtccagcccggctccgccgatgcttccgcttgatccgcggatatccagcgtggtcgcgcgcacatcgctcaagtcctggcgcccgctcgcggtgcccgtctccaccgtggcggcctcgacgtcgcccagggagagcgagccgctcgacgtgcgggccgagaagcccttggcatccacgcccaccacgccgatgctgccgctcgacgttttcaggctcatggtgccggcgctcgtgcgcagcaccgacaggctgccgctgctcgccgtgagcgacacggcttccaggccgtcgaggtccgccacgtcgatgcttccgctgcccgtctccacggtgagggagcccgtatagctgcgcggcaccttcaccacggtggcatggtcctggaactccaccttcatgatcatgagtcccgtgagcgacgtgccgtggccggttatctccagtacgcccccctcgtcgacgacgtccacggtcttctcgctgctggtccagcacgtcacctcgaaggcgtcgccgtcggtctgctcgaagcgcacgtccccgccggcgtccctcaccacgatggcggtgtggggcgcctctgcctcgggttccaggatcctcgtgtccgacacccagtcgcgcgtggtgttggacaggttctcgaagcggaagtccgccgcggcgaacgccccgagggcgagcgccgacccgccaaccagtaaaacggtggcgacgatcaggactgctttacgcgcggtggtcatggctctgcgctccttccggggccgggttccccgccgcaggcgcgttcggcgcggtcgggaaggggatggtgccctgcgcggtggcaggggggtacgcgccggggcagggggccgcggcgtaggcggcgccgggatagggcgccccgtacggcggggcgggcggggcgccggcggcaaccggtacggccggcgagcccggtgcgggagcgtacggcggcgcggcctggccggacccgcgtaccttcttcacgaacagccccttgatccaacgggcgaacgagtgggtgagctgcacgagccccttgctggcggcaaggacgccgaacagggcgaacagccccgtccccgcggcggccagcccgcagcccagaagccaggcggccgtgagcgggtagccggtggcaaggcaccacaccaaacccacgatgccgatggggccgcacagcagcagcgtggcgacggtcgcccacagcgccacgacgaccatccagatggacaggtacaccatcaaggccgccatgaccagtgccagcgccacgggcacccagatgggcgagaacaccacgagcagcaccacgttgagcgtgcggctgccggtgttcgccttcgcgatggccttcgggatgaccggtgtctcggcgatgatctgggcggcgatggcccccaccggcccgagcgccgccacggcgtcggcctcgctcatgccgtcctccatgcggtcgtcgatcatctccaggtagaaggcgatcgactgctccacctcgtatgacggcagcttgccgagcgcgcgccgcagcgcgtcggagaactcggtcttgttcattttctggcacctcgtttcacgtaatcgtagatggagacgacgtcgtcccgctcgcgcaggaactcgtcgatatggcgcacgcctgcctcggtgatgcggtagtacttgcgcaaccgcccgctgtgctcgacggagtacgtggtgagcagccccgctgcttccaatcgtttgagcagggggtagagcgtcgattcggtcaggttcaggatcgcgggcacgtccttgacgatctggtagccgtacgaatcctgccggttgatcgaggcgagcacgcagacttcgaggaaccctcgcttcatctgtgcgtccattgcatacctcctttcgcccgatactatacaacgcatagtatcgggcgtcaacgggtattcggaaaacgttcagcgagggtaggtgctcatacgcctaaatgcgcgaacagccggcactccggtgagtgtcggctgttccgcctgtggtcgttctgcaatatggtcgagaaggttgaaaagtcatctcggcgtgcgcggtggtgctcgtaggcttaagcgaagccgaacagggcgcagagcgctggcagcagcgtcacggtcaaagcgatgagcaatattgtgggtatccagccgatcctcgccatgtcggacatgcgatagtatccagtggagtacgtgaggatgggtacgcaatccagtggcagcaggtaggctagcgaagcctgccaggcaactaccatcagcatacagtacatgctgatgccgaagtctcctgcgatgatgcccaagggataggccaagattcccgccacggcaggacctacgggtacgatattgtgcacgatcgcaccgatggtcgaaagcaccgcgagcacggcaaggggcgttttccagttctcgggcaaggctgcgaccacggtcgagaccatccagtctccggcgccggtggacaccacgaagtgggctgcggataagatgcacatgatcatgatcaagacgccccagttcatacgcgataccatcgatttgaagtcgagggtggagcagccgggtaccgagagcagcaccacggcgcagatggcgatcatggcagtgttcagatagctgatccaagagctgagtatccagaacagcatggcgagcgcgatgatggcaaccgtcattatctcggagcgcgtgagcctgcccatacccgagacctcttccatggtggtgtcgatggacgattgcaagatgggctctggtttgaagaaccgggtgatgacgagccacgaggcaaacagcatgatcgcgcagaatggaagcccgagcatcgaccattcgacgaaattcatattcacaccgaacaatgacgagaacagcccaaccgtgatcacgttgcaaccgttgccggtcatcacggcgcatcccccggcatatgatgcccaaggaatggctatcatcatggctttgcccatgggcgatttcaacttttcagcaccgttcaactccaacaagcgctttccaaccgagataaacacgccgcaggcggcgacatccgacatgaaaaaggagaggaatgctgtggcgcacatgaagcccagcagcattttgttggtgtcggtgcccgacctcctgagtacgaaggctgcgatgcgggtgggaatggtggtagcatcgagggcaaccgtgaacgcgaacgtgcccatgaggaagaacaccgttgatcccatggcgttagagtacgcctcatcgaacgagcatacgcccatgatgggcatcatgatgagcacgagcagcgccgttgctggcaacggcagtgattcggttacccacagaagaatgcctgccgctaaaattcccaaaaccatgcggccctcgtaggtcagcccctccgtcgtcggggcgagagccgttgcggcgacgatggcgatggcgataagtatgcaagcaacgttgcgcggccgcagcgaggcatgcaggacggcttcagacacggttgaccccccaagttataaatgctctccccccatcgaacagaccccttttccgaaagggcgaggggtctgttcgacgcagaacacgatgtaactttacatagctccgagcatcggcggaacaacgagcaggaacgcactgaagaacaccatcgtcgccaaggtgacgggtaggccgcccttccacatctcgttgaacttgtagtagccccctgcgtaggagaccagcagcaccgagtccaagggaaccaggaagcataaggcgcaccacagcgcgagcatcaggatcgtggcggtaaagttgccgcccactgcccccaccaaccccagcaccggtgcggttacgagtgctgccagaccgggacccgacgggaaaaagttgtgcacgatggccagcacgacgctgatcaccaagaacagcatgacgaagctcatgttggccgtcacacccagaagcaggctgacgatccaagccaccgatccggctgccgacatagcggcgacgatgccgttgatggaagccatcatcagcaggatgtcccacgggctctccgagcggtactgcttggtggtgatcatggacgttcccggcaggaacagcaggcccagagcaaccaacgcaatgaaggttgtattcagcaccggtagccaggagctgacgatccagcatgccagggctaccagcaacacgccgatgttgaacttctccttgaagtccatgggcggcagcgaggatacctcgcctaggaacttgtcgacggtctcctggcttaaaggttcaggcttgtataccttgaccaggatgagccagcaagctaccaggctcagtgctaccggaatgatggtgtaaccgaaccattcggcgaaggtgatgctcacgccgcaggcgctttcggccagtccaagcacgaccacgttgatgggtgtgccggagggcagcagacagccgccgaacatcacggcgaagggaatggcgagggccaggcagcggcccatgttcgattcgcccggcttggcgcccgccgcacgcagcagcgaggccgcgaagcccatcatgatggccgtgagggcgatgttcgacataacggtggaaataatggcagagatcaccataaagccgagaatgaccaggttaatattgcctttcaccatgcgcacgaccatggctatgaggcgctgtggaaatgtggacaccccgaggaacgttgtgaagccgaaaatacccacgaacatccacagtgagctggtgaacgtggccgcccagatatcgttgtaggatgcgatacccaggaatccgcacagcgcaaccatgacgagcgacgtgatgggcagcggtagcgcttcggttgcccacatgacgacggcggccagcaagaccatgatcgcggtttggccttcacgggccaaatcgggtgaccagagcgggccgaactggcctatgagaatcaatgcgatggcaatgacgatccatgcccatttgaacagaaccttgttgcccttggctgtttcagccatggtgttaccccttcctgttgcttgtccagaaacccgcacgacgccatatccccaacgccgtgcggaaacccccggcaacgtttacgcgatggccttgaggaagatgtctcccagaaccacgtcctcagcggtggtgtcggcatcgaggacgatgtcctcgtagccctcaaccgttgcagctacggtgtaagggcgttcgtccagctccttgaagcggaactccccgaacgcgtcggtcttcactgtggcaacctcattgccatcggtgtccagcaggcgcaccggcgtgccgatgatcacctcgtttgccacgcgatccaccagtaccccgtacacccagcgcttgggtatgccacggtagaacacatgaggatggttctcggctacgcttggcaggggcacggcgtcggcaggtacgttttcctcgtcgacgtaggtcaaggcgccggtggcgcatacgtccacgcagcgggggacgctccatccgtcgtccagcagatgcgcgcagccggtgcacttctgcgggatgtccagggattcgttccagtaaacggcgccggccgggcaggcctcggcgatggctcgctgccccttggccttcaccgggtcgatgatgatcagaccatcctcccggcggtacacggctccgtccttggacgcctccatgcaggctgcgttgtcgcagtggccgcacatgaccggctcgtattgcaccttcacctcgggtattttgcctcgggtaacctggtcgacccggcaccagaactgcccggtcatgggctgttctgcggcgatggggctccaatcgtttccgcagtgctcgtctttgcacgccatctggcagccgtagcagccgttgcacaaggtggcatcgaacagaatggtcttcatgatttaagcctcctgcaggtagtcgtagacgttcgtgcccgtctcgatcgtgtaatgctcggcctcgaaggcctcggggtaccgctccatcagggcgtggatgtcgcacttgcgcacgcccaccaagaacccgccggtcacctcgccggccgcattcttggaagacgtggcgctgggggcgatgaggttgttcgcgccaccgcggtcgatgcctcccacgccgggaacgatggggtcggtttcggcaccgtggtcctgcagcaccgcgccggggatgacgcgttcggtgacataggctccgcctagtaccgtgcctcgctcgttgaacacctccacgatgtcgccattctcgatgcctagcctggccgcgtcggcaggatggatccataccggctcgtaggcatagccgtcgacgcccacgaccttgcacgtctctatctcgcgcgtccatgggcagtcatcgaaattggcgtggatgcgccagcgcggatggttggacaccagcaggaagggatagtccttggcacgctcgcagctgatgcgctcgtggtgcgtctccgactcctcgatccatttggccacgggctggcgctcctcgtcgtcggggaagaagtttgccaggccggtggagtagaactcgatcttgcccgtgggggtttccatggggttgttcacgggatcctcgtagaactcgatcatgccggcaggctcctggtcccagccctcgcgtgtgggcagcatctggtagccctggcgcttgatcaactcgaggtcctgctcctcttcgggcaggccagatccctggtagcccacttcctgccattcctccacggtcatgtcgccggtcaggtggctggcacagtcctcgtaaattcctccataggcctgcagcttctttgctacctcgaccacggcttcgtagtctgagagcgactcgagctgccggtcgcaggcgcgctgctcccagatgatggagttgaactggcccgagtacgtgtcaacgccgaagtcgtccaattcgagtgttgtggagatgggcaggatcatgtcggcgaacaaggtgtcgttttccatccaggggtgctgcaccaggaagaactccaggttggggttcagcaatgcgtcctgaaactcgttgccgccgttccagcaggttgaccagcagggggagtcggaccagatcatcttgataccgtggtcaccatcctgcgggaactggaatttcttgaactgatcggtgcgatggtggcggctcgtggtgtggccgtaccattccaccttctcgccatcctcgacgttgatgcactggggcacgagcgttttggggatgaaggatgcgggaagctcgcccaataccgagccgtggtagcaggcgcgcacctcgggaaggaagtgacccgggggcagcgggttgaaggagtccatgccgatgagagcccattcgatgaacttgacctggttgcgaccgggttttcccacggcctgcatggccagcaagtacacctcgaggcgcgccggctcgtgcgagtagcatgagcggatataggaaccgccgttgcagtggccgatggacagattgtgcgacgcccagtaacgcgccagcgccttgatgcggtaggctggcacgtggcatttctcctcggcccactcgggcgtcttgggcacgccgtcttcgttgcctagcacgtagtactcgaaccagtcgaagccttcggtgtggctttccacgtagtccttgtcataggtgccctctgtcatccacacataggcgatagccagctgcagggcggcatcggtgttgggcagcacgggaatccaccggtcggcgtgcacggcgttggcgtagttcacgtcgggggcgatgtggatctgctccacgcctatctcgctgaaccagaagcataggcgcgatgcctgctgccccgaccagccccacggcgtggtctcggggtcgcagccccagaacagcacggcgtcggagttctcggaaatgtccttgaacaggttgtgctggtgggtgttctgccccaggggctcgttgccccaagcgtgctttgcgccccagtaccagccttcccacgagtcgggctggcgtgcctgcatggtaagcccgccggtcatgtccaacaagttcgccatagtcccgtgcgggccgtggatggaaccggtttcgccatgcccgtcgccttggcagaagatggagttgcggccgtaggtcttgtcgatgcgcacgatctcggaggctatgatgtcggtggcctcgtcccagctgatgcgctcgtacttcgactttcctcggttctgcgggttgcgctcgccgttcggatcccagtccacgcgcttcagcgggaagggcacgcgattgggggagtacgtgcgagtcttgtagatgaaggtgaacggggagttcagcgtcttcatgccaggttcgaacgagtggcccttcgcgttgatagtccagtagttcagatcctctttcgtgtagtgctcgtcgtagtgcactgggcgcatgcgtacgattttgccgtctttggagtcgacggcggtgaggttggcgccgttgccgaaagaacacagcgacatgtttttgtagatggtcttgtcagacgtcttcatactcctcctactttctcgtcctctgctctcttgtcccgagcggcgggcgcgacctgtcgggcacgcgtgccgattctgggtgggcgatgcgaaaaccagcagcctagcgcgcaaggcgttggctcgattcaccactgcgagtgtaggcgccggcgcgggcggtgaaaacaagcggcccgttgggctgcctcccgttttcgtgggggctgtcgggagcttcttgtttcgtggggccgtcaccacatttcgttggcctgtgcaccctctccgaaggcttcgaacacgcgatctcgcggcttttgcagcctcgttttgccgtacaatggcggtgcttcggttggggacgacgcagggggtgcctatgaatatcgagtacttgcactatttcttggacgtggcgaaaaccaagtccatcacccgggcggcaaagctgaacttcatttcgccgcagggtatgagccgcgcgatgaacgagctcgagaaggaactcggttgcgagcttctcatccgttaccccaacaagctcgccctttcccctgtcggcgaggagctcgttcccaaggcagccgagatcatcgatggatatgcggagatgctcgagtttgccgctgcgaagtcccgagtgctgcatgcgggtggtggccggtccgttcagctggaatgccagaacatcgccatgctggccttcttgacgcaggaagccaaagattatatcttcgaatcgcgtgacctgcgttttcgcgagtctcagaactcccagatccgtcgcgatctccttgccatcagcgcaagtgaggccgatgaagtctgccctgccatcatcggcctcacttgcttcttcaaccaagagcgctccagtttcgggggcatcgacgacttggaggccaagggcttccagtaccggccctacttgaaaacctacgacaaggtcatggtgtgcgcgcgctcgcccttggcagagaaggacgttctttctgatgaggacgttatctccaagccgctggtgtcgaccaacacgcatttgtacagccttctatcaaagcgttatgggcgtgatgccatcgagctttccagtgccgatttctcgctgcgaaggcgcatggtggaatgcgatgcggctgtgtcgttcctgcccgccatcgcctcgcttaccatgcttggggaaactgggttcgtcctacgcgacatggagcgttcctacgaggtggagatagggttcgtgggtatgcagtccgacctcgagtccgcctgttttcaagggctcatgcgcatcctggatggtttctaccgtgatcacgtggactcgggcctgtacgtgctgtgcgactgaatcctccctcgcgcattgcgcggaaggccctccccgctgcgaagcagggagggccttccgccttacggtccggatagaccgtttagatgccaggggctttcggggcgcaaggtgccttcggcgcacccggggccttgggagccccgggtgctttcggtgctccgggtgccttaggagcgcccgaagaggtggcgcctttggcggagaacccgcattcctcgcacacctgggacgagatcgggttctcatgaccgcacatggggcaggcgatgacgtttgaatcgatagctgctggtctgaagcacatggtttcctccaatcggattgcttgacggattaccagcataaataagcgccatgcgtccgaacagcagccagataggggggctccccatgaaaaagtggggcaccgatttcgtgggggtacccccacgaaggtcggacgagcatgcagtgggtgcgttgccggtcgagttcggctgccttcgcatggcttgcatatctgtagctggcggccatcacgcttctgttgcgcaggcccctgttttcattggtctggtctcggtgtttttccgtgattgtgcacgtactatttgagcgcgtgcaaaccaataggtaaggaggaagaaatgctcggaccgctcggtggggaccgtctgtggaacccgaaggaactcgacaagtgcaaagccgctgcacaggaattagtggacgcccaggacaaaggtgccgaagaagggggcatcatctacgggtacatgtataccatgaacaacagcaattatggctaccagggcgacgacctcgaattcaaaagcgcggccgatatcgcggcgttcgatgcgaacggccaggtcaagaagacttacatagcatacaagaatggttatggcaacgcctgtgagggcgccgctttcgcggcgccctcacaggctatacgcttgcgcacgaacggtgtcacggtggccagcaccaatggtgccggcagctcggagatgccgagcgccgtgacgtgctcacgtatacgatgggcggatgcggggctgcaggggcgggcggttccgcaggaggcgcgatggtcgtcgaggcggtgggcatgatatttgcgagcacgttcgatctttttcgttgtgcgcctggctgcggcatggtcgacaggcggggtcgcgactccccttcccgcctcctgacattctccccgcccttttccggccggtgtttccttgcgtcgccgcacccgcagcgagccttcctttgctatcatgggcgacgttatgttttcacctgttccaccttcggttccaccggtgcctgccgcgggccgatgcgtgaaaacgagaagggaagagccaccccatgacccaacatgtaaccgaacatgatgtgcgcgacatcgcggagtacacgcgcatcggcctcacggacgaggaggtgtcgcagatgacggtcgacctgaacgccatcatcgacagcctcgcgcccatcaccgagtacgacctggagggcgtggagcccacgttccaccccatcggcagcctgtcgaacgtcatgcgcgacgatgtggaggcgccctccttcacgcaggaggaggcgctcgagaacgcgcccaagcagcaggacggctgcttcctcatcccgtccattctgggagaagggggcgatcgctgatgggcgccgcatcctcttccgcgttcggcgcgatgggcgcccgcgagatccgcgcgggactcgccgccaaggacttcagcgcccgcgaggtcgccgaaggctcgctcgcgcgcatcgaagctgcgaacaaggacctcaacgccttcctcgagaccaccgggcagctggcgctcgatgccgccgcgcgcatcgacgcggccgtggccgccggcacgctggacgagctcggtccgctggccggcgttcccgtggcgttcaaggacaacatgaacctggcgggcacccataccacgtgctcgtcgaagatgctcgagaactacgtgtcgcccttcacggccacgtgcgtggagcgcgccatcgcgtccgggggcatcccgctcggcaagctcaacatggacgagttcgcgttcggctcctccacggagacgagcgccttcggccccacgaagaacccgtgggacgtcacgtgcgtgcccggcggctcgtcgggcggcagcgcggcggccgtggccgcgggcctggccacggtcacgctcggctcggacacgggcggctccatccgccagcccggcagcttctgcggcacggtggccgtgaagcccacgtacggcgtggtgtcgcgctacggcgtggtggccttcggcagctcgctcgaccaggtgggcccgttcgcgcgctcggtggaggacgcggcgctcgccatgaacgccatcgccggacgcgacgtgcgcgactgcacgagccaggacgtcggcaccgacttcacggcgaacctcgccgagggcgtgcgcggcatgcgcatcggcgtggtgcccgccttcatggaagccaagggcctcacgcccgaggtcaaggccaaggtggaggaggcggcggagcacctgcgcgccctgggcgcagagctcgtggaggtggagctgcccaacgcccaggccgccatgagcgcctactacgtgctgggtccctgcgaggccttcagcaacctggcccgcttcgactccgtgcgctacggctactgcgatccgggccataaggatctgggcagccagtacgaggccagccgcgccatcggcttcggccccgagacgcgccgccgcgtcatgctgggcagctacctgctgtccgccggcgtgtacgacacgtactactacccggcccagcaggtgcgcacgctcatcacgcaggattacgcgcgcgcctacgagcaggtggactgcatcctggcgcccgtgtcgccgcgcacgtcgttcaagttcggcgaggtgagcgatcctacggacatgtacctgtccgacatgttcaccatctccatcaacatcgcgggcaacggcggcatgagcctgccggtgggcctgggagcggacacgcacctgccggtgggcgtgcagctgatctcgccggcgttcaaggacgagaacatgttccgcgcggccgcggcgctcgagacggtgtacggccccgcccccgtggcgcccgcctacgccgatggaaaggcaggtgagtagccatgcgcaagctcgaagaggtgctgcaggactgggaggccgtcatcggcctcgagatccatgccgagctcaccacgctcgacaccaagatgttctgcggctgcaagctggagttcggcgccgagccgaacacgcacacgtgccccgtgtgcctggggcttcccggcgcgctgcccgtgccgaaccgcgcggccatcgagtccatcgtgctggcgggcctggccacgaactgcgacatcgagaagcactcgatgttctaccgcaagacctacatgtaccccgatatgtcgaagaactaccagaccacgcagggcccggtggccttctgcatgcgcggccacctcgacctcgacgtggacggcgcggccgccaaggagcgcgtcgacctggacgggctcgaggtgggcgagagccgcggcaacgtgacgcgcacggcggacggctacaccgcccacgtgggcatcacgcgcatccacatggaggaggacgcgggcaagatggtgcacatcggcggcggcgagggacgcatcgccggggccacgcactcgctcgtggactacaaccgcgccggcacgccgctcaccgagctcgtgaccgagcccgacctgcgcacgcccgaggaggcgcgcctgttcatgcagaagctgcgccagatctacctggcgctcggcatctccgactgctccatggaggagggctccatgcgctgcgacggcaacgtgtcgctgcgccgccgcggcgccaaggagttcggcgtcaagaccgagctcaagaacatgaacagcttcaagaacctccacgacgggctggcctacgagatctgccgccaggcggaagtgctcgaggagggcggccagatcttccaggagacgcggcactgggacccctccaagaagcgcaccatcgtgatgcgcgtgaaggagacggccgacgactaccgcctgttcccggacccggacctcgcgccctacgacctgaccgacgagtggatcgactcggtgcgcgccaagctccccgagctgcccgaccagaaggcggcccgcttcgaggacgcgttcgggctctccgcctacgacgcgcgccacctggtggagcatcgcgagacggccgacttctttgaggcgtgcatggagcttgccggcggcgacgcggccaagctggccaagccggtggcgaacctcgtgatcaacgacgtgaccgcctatctgaacgccgcagacggcgtgaagctcgccgacacggcgctctcgcccgcgcgcgcggtggcgctcgtgaagcttgtggctgccgacgccatctcgtccaagcaaggcaaggaggtgttcgccgccatcctcgaggaggacaaggacccggaggccatcgtggccgagcgcggcatggagcaggtgtcggacaccggcgccatcgaggccgtcgtggacgcggtgctggccgcgaaccccgacaaggtggcccagtaccaaggcggcaagaccggcctcatcggctttttcgtgggccagtgcatgaaggagatgcgcggccagggcaatccgaaggtcatcaacgagctgctcgtgcgtcagcttaacagctgacgcacgcgctcggcgcctctcgctgatgttacgaacgacccgtgggtcgaggggaaggggattccaatggacttcaacgaatggctcgtcgggttcaccggggagttgagcgggtttttgtacacgtacatcctgctgttgctgctcgtggtggtgggcgtgtacttcaccatccgcacgaaggcggtgcagctgcgctacctcaaggacatgttctcgcagctgaccgagaagaagcacgtccagggcgagcggtccatctcgtcgttccaggcgctcatggtgtccacggcctcgcgcgtgggcacgggcaacatcgccggcgtggccacggccatagcaaccggcggtccgggtgccgtgttctggatggggctcatggccatcatcggcgcggcgtcggcgttcgtggagtccacgctcgcgcagatctggaaggtgcgcggcaaggagggcgagttccgcggcggtccggcctactacatcgagcaggcgctcgggaagcgctggctgggcgttttgttcgccgtgctgctcatcctgtgcttcgcgttcgggttcaacgggctgcaggccttcaacgccacgtcatcgctcgagtactacatccccgactacgcaacgaacggcacggccatcgcctgcggtatcgtgctggcggtgatgacggcgttcgtcatcttcggcggggcgaagcgcatcagcgtcatcacctccatcatcgtgcccatcatggccgtcggctacatcggcattgcggtatggaccaccatcgccaatatcggcgagctgccgaaggtattcggcatggtgcttgcctcggcgttcgacttccaggcgatcttcggcggcttcgcgggctccgtcgtgatgctgggcatcaagcgcggcctgtactccaacgaggccggcatgggctccgcgccgaacgcggccgccacggcgagcgtgtcgcacccctgcaagcagggcctcgtgcagagcctgtccgtgtacatcgacacgttgctcatctgcacgtgctcggccatgatggtgctcgtgttctacgtgcaggaccccgaggccgccgccgcgctcaacggcatgccgctcgtgcagatggcggtgaacaactcggtgggagaggtcggcatccacttcatcacgttcgccatcttcgcctttgcgttctccagcctcatcggcaactacttctacgctgagaacaacctgcgcttcatcaagggcaacagcagggcgctcttgttcgtgttccggatcgtgtgcctgggcgtcatcttctacggcgcggtgaacagcttcgaccttgcgtggaacctcgccgacatcttcatgggcttcatggccatggtgaaccttgtggccatcctgcttctggggaagtgggcgctcaaggtgctcgacgactacacggcgcagcgcaaggccggcaaggacccggtgttcgtggctgaccgcatccccgggctgccgaagaccgagtgctggcacaccgagacggtagaggatttcggcaagcccccggtgcaggagtacctcgacgagcagatagaggtggagtacgcggggctgaactgacggcggcgcgcgtgtccggcaccggttgcgttcagcggcggacgcgggcggcggcaggcgcgcgagcggcgacctagcgttccggtaacggaacgccaacgcccggcgctcgatgcgccgacgtggtaggatggcaggaaacgcggaagagcgccaggcagtgtgtgctcgagggaaggggacggcatggcagacgagaaccgacgcgcgggcgactggcagcgcaaggacctgcggcagaacgcgaacgacctggtggaggaccccaacccgaagaagtggcaccagcagacgttctggatcgtgttcttcctgctcgtcttctggccggtgggcatcgtgctggtgtggcggagcggttggcacttggcggccaaggtgctcgcaagcgtgtacgtggtcgtggccgtgtacttctcctacaacatgttcctcaccgtgcaggcgatgcaggctgccggcatggcgtagcgccgcattcgctccacatgcaggcgggctcaaggattcgctcgctgggattcgctcgctgctctggctaaagcgagctttgcgtgagcgaaggcgggatccggcgtgccggatcccgcctttctgggtttcggcgcgtcctagaccatcccccttctctcgtacttcgtctccgaggtgcaccagggccagacgtcatggaggtagccccagccatagcccacccagtacacgctttcatgccgtgcggctgttacgccgcgcagtacccgggatgctttgatgtcgtacacgtctaccgaaacggtgcgcacgtggcgaacggctagctggtcgctcaccttgttgtagctcgcatcgcttaccaccacatgggcgggcggcgcttccttgctcttccactgcacgagcggtttcggacgccccttgggggagtcgccggtatgggtgttttcggtgcggaccgctagcatggtgaagcctagcgcgcgcagttcgctgaagatgttgcttgcgtcgctcatgtccagcccgtagtcgtgaaggggcttttggctgtacttgatctttcgaacctggggcaggttcgcttccatctgctgccattgagccagattgagctcgccggtgaacgagtacatcagaacatcgtcgcgctccacgctcttcccgaacgaggcgtttccgaagtatgcatcgtcgtacatgcggccagaaagcgggccggtgtggttgtcgagcgaatacacatgctcgttgatcaagcagcgtatttttttgttcgcaagcggctcggtggcttggcgcagcggggacttctggaacttttccttataggtcatagagtcttggtcccatacgcgctcccgttgcccaacaagcttcttcagcacctgatcggcctgtttcctgaggtcttctttggcgagcgtggcgttgagcttctcggcgtcggtgccggtgccctcgacggtcgaaaggtaggccatggacgacaggtagccgtacaggtacgaggtgatcatgcagcccaggtacacgtctttgatctcgaaggtttccggatcccagttgtagtacgtttcgatccagttatagtagtcgctcaccacgtctttggtgccggttcccgtgatcatgctgcccaggttcaccgtatcggcgtacacggtggtgttgagcagcccgtttttggcgtcgatggcctgcttgaagctcgtcagcgtcttctggttctcttccgtcaactcttcgaacgtcgccgcatcaaagccgccgttcgccagctcttcctctgtcatggtgccgatggtggccgtgtacagggttccgtagctgttcaggtggtccatgagccacttcacctggtaccagtccgactcgaagccgccgcgcttgtcgatggcgcgcagctggatagccaggttgtcaacgctggtttccatgcgcgtgagctggcccttcatctgattcagctcgtcaagcacgtccttgatgtcgtattgggggccggtttccagcagcgcggcgatgatacccaggatctgcgagatgccctggccgatgttggatgggtcggacgagcagaagtagctgatagccgaaaccagcttctccagcacctcgaacaccgttttcgcggtgcgcatgtcatcctcttggctgtaaagcgccgttccgcccacgatgctggccagcgattcgtcggagaggttgacggcgcaaggtccctgggcgatgcccagcttgttgagcaccacgccgtcggccaggtcgacctcgtgaccgcacatgagctgcgtcatctcttcgaggaactgctcgttggcctgctctttggcaaggccgctctcagtgtaggcgccgtaccagcttttcaccgtttcggcgtcgatgccgaaatcgaagtcgaagccgttctcgcgcacgtcggtgaacaccacggctccgggattgccttccaggatgccggcgtctccggtttcgccgaggccgtaatccgggggaagggtgggggcctggcccggcagggtgatctgggagttgccggtccggttgaaatcggtgatcttcacgctgccgtccagcgcgctgaactcaaccgtgttgtgcacggtcaaggagccatcctggttttccgtgacgcttttagccttcacggtgccgtacggaacggctgctgcggcaccggcggtggagacggcgtcttcggtggcctcgtctccgtcgtagtaagaggggtgcgcgatggcgacaggtgcctccccttcaagggcgattggatcgacggcaagctggtcgtcggcatcgagggcggcggacagcgccttgaactggttgagcggcgtgtcggcggttgccgctacggcaagggtgccgcgcgtcgcgtcgttcgcgtcgacggcgaacgacgttgcggacaaagacgggtcggcgaaggagaagtgcccagcctgcgcgtcggaagagaatcgcccgttttcgagcgagacggggaaggtgaacgtgtcgtcctcgtagaagccttcggcaacgtggaacgtgacgagggcttcctcggcggccagcgtggcttcgccgcttgcggcggcgttggagaacgatcccgggccgaagaccatgactcctcgtgcgcccggtgcgccaaggtcgcccccaagggtgacggcaagggccgacccttcggtgccgtcgagcatcgtcgcagtgccgacatgctcaacggcagtgacggacaagccctggaaatcaccgtcgagcgagatggcgtcgagcggcagctcgtcggcgaagggcaggtcggacaccaggttgatccgagcgcgtttcgcgtttgccgaggctgctgccccgccgatcacttccacgttcgcctggtagaacgcggcttcctggtcggtggaccccaccgtgagcatggcggctacggtggcgcccggcgcggtgcaggttgcagaaccttcgagcgtgaacgaggtcaccgcggcctgctcgccctcctcgtcggcgtgggcttcgcgcggcaccaggggcgccaggcccgctacgagcacgacgcccatgagcgcacccatggtcccctttgcccggcggctgcgcgcctgcttgcgcgagaacgtggaggccgccagcgcgatgaagcccgcagccgctgcggccgccagcgcgatgccgacggcgttccccttgtcgcccgtgggcgcaagccgcttgaacagggaaggttcaaacaacacgttcagcttcagctctatcgtttcgccggctgccaacgtgtcggcctcgcgagccgcggcatcgccgtcgcgagccagtttcacgccctgcggcaggtgggcttccagtcgcaccttgttccaagcgatgggcgtgtcgttcgtaacggagaatgcgacgacggcctgatctccgggttcgtatgcgtccctgtcgaaagagccgacgatcttcgggatgggagggttgtcggcccctgcttcctcggcttgcgcatgcgcgggaaggatgcaggcggcagcgatcaggagcgcggctatcgccaggaggcggaccgctgcgaagggggtcttggtacgggatagcgcttggcgtgccatggtgcctcgtttctgcgggaggggacgggttgttccccggcttgcacacgacgatgccagtatagagcggtgctcccagagggggatacggcccttcgaaggcggtcgcgccccctgcgaaaccggctgcgcggcaatcgccggcggctggcggtatccgccgcgtgccgtcggcttctgtgcggattccggccctttcgccgcattcccccgccgctaatgctcctcgtgcgctatcattctcctcgaaacctgacgggatgcatagcagttaacgcgaggtcacttatatggacaacatcgaaaccggccgtgcggccgtgctggctgggcacggctgcgacgaagacggaccctacctgctggtgaacgaccgcgtgcgcaacgtgcaggtgcgcgtgggcgtgcggggacgcacgttctcgctgcgacgcctgcccgtgcgccgctgcgtgggacgccacgacctggagagccacgccaagatgccgtgcccgctggacgtggagctgccgcccgagtccaaggtcacggtgtgcccggcctgccaggaggcaaccgggttcaacccctcgttctacaacacggacttcgtctccccgcagcagcgcgcctacaacgcggaaccgcatatcgcctatctggcgtacttctcgccggcgcatgtgaaggcgggcatcacgggcgcatcgcgcggcgtccgccgcctgctggagcagggggcgcgggccgggcgcatcgtcgggcggttcgacgacgcctacgcggcgcgcgagctggaggcggcgctctgcgcgcagcccggcatcgccgagaccatgcgcgcgtccaagaaggccgacctgctggcgaacgagcgcttcgacgccgccgaggccgtctccgtgctcgaccgcgagaccgcgcgcctcgcgcaggtggaggccgtggtgcgcgccgggttcgcgcccgagccggtacaggacttctcgccctactacttcggcgggccctcgccctcatgcgacgacctccagcagccggatggcgcgcgcgacgtgtgcggcggccgctgcatcggcatggtgggcagcgccatcgtgttcgaacagggcggcgcgagcttcgtcgtgtgcctgaaagactgggagtcgcacgaggtggagctcgtggagaacgaggtgctgtgcacctacgatttcgctccccagcagatgtcgctgctgtaggggagcagggccgcgccctcgatgggtggtggccgcacgccgttcgtccatgctctcttgctcggtgattctcgctgcgggcttgatttcctattgctttatcactctactgtgctaaagtatagcgacgcgatgcagaacggcccgcttgctgccgcaggcgcatgagtcggtggtatcatcgggtcgaatcgccgcgatgaaggccgcagcgacggatgcggaaccgcttctcgcccccgagcccgcccggcgctcggccggcgaagccgaagaggtggagcccggcatcctggctgcgtcgtattggagaaccgcgagggaaagaagcgcgaacctatgaattatgtgacaccggcaggattccgcgacgtgctcacggacgaggcgcagcagcgcgagcgcatcacgcgcgccgtgcaggagcgtttcgcggcgcgcgggtacctgcccatcgagacgcccacgctcgaggtcatggacgtcatgcgggcgggtggccgtctggccgggtccccgtttcgcttcttcgacgcgcgcggcgaccttttggccatgcgccccgacgtcaccttgcaggttgcgcgcatgacggcaacgcgcctggcgggccagccgggaccgttcaggttccgctacctgcagcgcgtgttccgcgaggccgaggcggagatgcaggcgaaggcgcgcgagctcacgcagatgggcatcgagtgcatcggggaggagggccccgaggccgacgccgaggtcgtgggactgctcgccgaggcgctcgacgtggcgggcgcgcgcggctacacgctggcgctggccacggtgggcgtgctgcgggcgctgctcgaggcgagcggggcgcccgcatggtggaaggagcaggtgctcgacgcctaccatgcgtcgaacttcgtggagctcgaccgcctgacggcgcctgcgggcgccggtcccgctccggatgcggaaccgggtgcgcgcgcttcggtgccgcctgtgttcgcggccgccatccgcgcgctgccgcgcatccgcggcgggcgcgcggccatcgacgaggtgcgcgcgctcgtggcgccgctcggctgcgaggacggcctcgacgcgttcgcccgcacgtacgacctgctggaggaggcgggcctgggcgagcgcatcctcgtggacttctcggtcatgagctcgttcgactactacacgggcctcgtgttcgaggcgtacgccccggggctcggcaccccgctcggcagcggcggccgctacgacaacatgatagccgcctacggcgagagccgccccgccgccggcttcgcgttcttcttggaacaagccatggctgccgccgccccggttccggcgggctgcgagaacgcgcccagcgtacctgcggctcccaacccctgcccgctgcgcatcgcggtgcccaaaggctcgctcaacggcgacaccatcgcggcgctcgccgcggcggggctcgacgtcgcggggctcgcgaaccccggccgccagctcatcatcaagaacccgggcgtggagtacgtcatcgtgcggcccaccgacgcgcccacgttcgtggcgctgggtgcggcggactgcggcatctgcggcaaggactcgctcctggaagccgattcggacgtcgtggagttggtggacctggcattcggcgcatgccgcttcgtggtggccgagccggccgccgcggcgggagcggccgacgagcgctaccgcgagctcggttccatccgcgtggccacgaagtaccccggcatcacggccgcccacttcgcccgccagggcagggaggtggagatcgtgaagctgcacggcaacatcgaactggcgccgctcaccggcatggccgagcgcatcgtggacataacggccaccggtaccacgctcgccgagaacgacctcgtggtggttgaagaggtgctgtcatcgactgctcggttcttcgcgaacgcatgcgcgttccgcaccgatgagcgtatcgtacaattgacccaggcgctcgcgcaggccgtccaggccgccccgcaggcgcaggacgaccctgcgccgcaggcgccgacgaagcaaggataaggagcagccccatgcgtcgtgtgatactcgaacccggcgaggttttctcgaacaagcacctcaagcgcaccggcgcgttcaacgccgccgcgctcacggcggccaccgccatcatcgaggacgtgcgcgagcggggcgacgccgccctgcgcgactacacggagcgcttcgacggcgtgcgcctggaggatttccgcgtgccgcagctggccgtcgacgaggccgcagcctacgtggacgacgacacggcgcgcgcgctgcgccaggccgcaagccagatccgcgactttcacgagcgccagcgccagcagagctggttcaccgtgcgcgaggacggcgcgctcgtgggctcgaaggtggagccgctggaatccgtgggcatctacgtgccgggcggacgcgcgctctacccctccaccgtgctcatgaacgccctgcccgccgccgtggccggcgtgccgcgcatcgtgtgcgtgacgccgcccgcgaagtcgggcaagctcgacccggccatcctctacgcctgccgcctggcgggcgtcacggagatctacgcggtgggcggcgcgcaggccgtggccgcgctcgcgtacggcacggagtccatcgagccggtggcgaagatcaccggccccggcaacgcctacgtggcggcagcgaagaaggtcgtgtcgggcgatgtcgggatagacatgatcgcgggcccgtccgaggtgtgcgtggtggccgatgccacggccgacccggcgctcgtggccatcgacctcatggcccaggccgagcacgacccgttggccgcatgctacctggtgacgttcgacgaggcctacgccgacgaggtggagcgcgccgtggagcgccacctggaatcgtccacgcgtgccgagatcaccgcggcgtcgctggccgaccaggggctcgtcgtggtgtgccgcgacatcccgcaggcgctcgcggccgtgaacgtcatcgcgccggagcacctggagctgcatctcgaccacgccttcgaccttctgggcgccatccgcaacgcgggcgccatcttcctgggcgcgtggacgcccgaggccgtgggcgactacgtggccgggccgaaccacacgctgcccaccggcggcacggcccgctatgcctctccgctctcggtggacgagttcgtgaagaagtcgagcgtcatccagtactcgccggccgcgctcgcccgcgacgccgacgccgtcaccaccatcgcgcgccacgagggcctgtgggcccacgccatgagcgtggagatgcgccagaacctgctgcgcacgggcaacgtgttcggcgaggagggcggccccatgggcgcggcctcgggtgccggcgccgtgggaagcgggggcgccgatgcgtagcgtgtgctgctcggccccgcagctcgcagggctcgagccctacgatccgaagtacctgcccgccgaggccgtcctctcggcgaacgagaacccgcatgacgtggagcaggaggtgcgccacgagatcatgcgcgaggtgaagcgcgtggccctgaaccgctatccggacccgttggccaacgacctgcgcgacatgatcgccgaggcgaacgggctcgaccgcgaccaggtgctcgtgggcaacggcggcgacgagctgctgttcaacctggcgctcgcgtggggaggtccggggcgcacgttcctcaacctgccgcccacgttctcggtgtacgacgccaacgcgcgcctcacgaacacgacggtggcgaacgtgccgcggcgcgccgacttctccatcgacgaggaggccgtgctcgcgcgcgtcgccgagggcggcatcgattatctcgtggtcacgagcccgaacaaccccacgggcgagctggcaagcgaaacgttcgtctgccggctgctcgacgccaccgacgcgctcgtcatggtggacgaggcgtacttcgagttctcgcgccagacgatgcgcccctacctggcacagcacaagaacctcgtgatcctgcgcacgttctcgaaggcgttctccctggccggcgtgcgcatgggctaccttctgggcgatgccgaggtcatccgcgagttcgtgaaggtgcgccagccgtattcggtggacgccgtgtcgcaggccatcgcgcgcgtcgtgtacgcgaaccgtgcgaagttcgagccgggcatccgcgccatcatcgaggagcgcgcccgcgtcgtcgacggactcaagcgcatacccggcgtgaagccgtacccgtcggacgcgaactacgtgctgttccgcctggagaacgccggcactgtttgggagatgctctacggccgcggcgtgctcgtacgcgatttctcgcgtgcgccgggcctcgaggactgcctgcgcgtgagcatcggctcgcccggggagaacgacgcgtttttgcgcgccctgcgcgatgccgtgatggggaagtgcgacttgagggttccttcggcctgacggctggaccagcgagcttagagaaagagacgaacatgaaccaacgaaccgccaccgtcgagcgcacgacgaacgagacggacatccgcatcgccgtgaacctcgacggcacgggcgccgtcgaggtcgagacgggcgttccgttcttcgaccacatgctcacggcgttcgggcggcacagcctgatcgacctggccgtgcgcgcgaagggcgacatcgaggtagacgcgcaccacacggtggaggacacgggcatcgtgctgggccaggccgtcgaccgcgcgctcggcgacaagcgcgggatcgcgcggttcggctcgctcgcgctgccgatggacgaggcgctcgtgctggcggccgtggacctctccggccgcggccagctgcactgggccgtggacgtgccccctgtcatgctgggcacgttcgatgcatcgctcgccaaggagttcttcatcgccttcgcggcgaacgcgggtctcacgctgcacgtgcgcagcctggcgggcgagaacgcgcatcacctggtggaggcgtcgttcaaggccgccgcgcgcgcgttgcgccaggctgtcgagcgcgacccgcgcatcggcgacgcgcttccctccacgaagggcgcgctgtgacggccccgcgcatcgcggtcgtcgactaccgcaagggcaacctgaagagcgtcgagcgcggcatcgacgcggcgggcggtagcgcgttcgtcgcgtccgaccccgcggccatcgcccgggccgacgccgtcgtgctgccgggcgtgggcgcgttcgccgacgcggccgccacgatggaggagctcgggcaggtcggcgtagtgcgcgagcgcatcgccgccggcgtgccgttcctcggcatctgcttgggtatgcacctcatgttcgaggagggcgtcgaaggcgccccgcaggaggatgacgaggcctccacccacaacgcccgcggcctcgccgtgctgcccggcgttgtggcgaagatgcccaagcaggacgagcaaggcctcttctacaaggtgccccatgtgggttggaacacggtgcacttgcgatgcacgcagcagacggacggggcggcgcccgccaagcgagttccgcacgagccgaacggtccagtggaccgttcgtgcgagtcaggactgccgagcgactgggcgttgccccgcccgtctgcggacggttccgaaacctgccccttgttcgacggaataccgacgggcacctacttctacttcacgcacggcttcgtggcgccgtcgggtccgttcgtcgtcggggagacgacgcacagcgtgacgttcccgagcgccgttcagtacggtgacgtcgcgttcggcgtgcagttccatcccgagaagagctcggacgccggcgcgcgtctgctgcgcaatttcgtgtccatcgtgaaaggggcgtgagcgccgtgtacctgcttccggccatcgacatcctgggcggcaaggccgtccgcctcgccaagggcgattacgaccgcgtgaccgtgtaccacgacgaccccgccgcccaggcgcagctgttcgaggagcagggtgcgacgtggctgcacgtggtggacctcgacggcgcgcggtcggggacccccgagaatatcgccatcatcgagcgcatcatgcgcaagaccctgctcaaggtggaggtgggcgggggcgtgcgctcgctcgacaccatcgcgcgcctggccgacgcgggcgtgtcgcgcgtggtgctgggcacgtcgctcgtggccgaccccgccttcgccgaggaagccatcgcgcagtacggcaggcttctgtgcgcgggcatcgacgcgaagggcggcgaggtagccgtggccggctggcgcgaaggcgcgggcgtggcggccgaggagctggcgcgcgacgtggcggcgctcggcttcagacatcttgtgtacaccgacatcgcgcgcgacggcatgcaaaccggcgtcgacccggccgcctacgtgcgcatggccgaggcgttcggccatccggtgatcgcttcgggcggcgtggccggcgtggacgacctcgcgcgcctgggcgaggtggccggctgcatcgagggggtcatcgcagggcgcgccgtgtacgagggcgcgctgtcggtggccgacggcgtgcgcgcctgcgccgaggccacgcgccgcgccgaggccgctgccatcgcgtccgacccgtgcgggatgggaggtgcgcgatgctagcgaagcgcgtgatcccctgcatggacgtgaaggacgggcgcgtggtgaagggcgtcaacttcgtgaacctgcgcgatgcgggcgaccccatcgagctcgcgcagcgctacgacgaggagcgcgccgacgaggtgatcttcctcgacatcacggccacgagcgacgaccgcgccaccaccgtcgacctcgccagccgcgcgagcgagcagctccacctgccgtactgcgtgggcgggggtttccgcagcgtggcagacatccgcacgatgatcgcggccggcgccgacaaggtgtcggtgaactcggccgcggtggcggatccgtcgctcatcacgagcgccgccgcggcgttcggctcgcaggccatcctctgcgccatcgacgcgaagcacgtcgcgggcgcgggagacaagtgggaggtctacgtgcacggagggcgcaaggctacgggcatcgacgccgtggagtgggcgcaggaggcggcccggcgcggggcgggggagatcctgctcaccagcatggaccgcgacggcagccgcgacggcttcgattgcgcgctcacccgcgccgtggcgcgcgccgtggacatcccggtcatcgcctcgggcggggtggggaagctcgagcacttcgcccagggcgtcatcgagggcgaggccgacgccgtgctggccgcgagtgtcttccacttcggcgagctcaccgtgcgccaggtgaaggagcacatgcgcgcccagggaatcccggtgagattgtagcgcattccacttgaaataagaacaagtgtttgttatactgctttttggttggcaagccgcctaacccaagcccggcgttctggctgtggctctcgggacagcctgctgaatactcgaatcaggggaaagaggaggctgcgccatgctcgccaacaaccatgactgcttgaacgctctcggtcggatcaagagcgagatagccgaggcgcagaaccgcgccgtccaaagcgccaacgcggaggtgatccggctgtattggcgcgtggggcgcttgatagacgaacggtctctgtggggaagcaagtatcttgaaagcctttcgcaggatatacgcaccgcgttcccgggcatcaaggggttttccgtgagaagcatgaagtacatggtcaaattcgcgcgcgaagtagatggccaattgtgcagcagctgctgcacaattccttgggggcacattatgtttcttctcgacaaaacggatccgggcactgagcgcgagtggtacgtgcaagcaaccatcgaaaacgggtggagtcgtgcggtgctgtcccatcaggttgaaaccaagctgtacgaacgtcaggctctggttggaaaagtgagcaatttcgagcggacgcttccggcacctgaaagcgagctcgcccagcaggcgctcaaagacccctacatcttcgacttcatcacggcgaggcagggggcggtcgagcacgaggtggaagaccgcatgatggagaacatcacccggctcctgctcgagctcggcacagggttcgcattcgtcgggaggcagtaccacctttcggttggagagcaggacttttacatcgatctgctcttttacaacatcagattgcggagctacgtggtcgtggaattgaagaacgccgcgttcaaacccgagttcgccggcaagctgaacttctatctctcggcggtggacgacctgctgcgcaccgagcatgacaaccacagaatagggcttcttctgtgcaagacgaaggacaacgtggtggccgagtacgcgctgcgcgacatcggcaagccgatgggcgtgagcgagtaccggctcgccgagttgctgccggaggggttcgccgagttgctgccgtcgacggaggatatcgagaagcggatgtgagaaggcgattgtgcaacagctgttgcgcaatttgcgagcgaggagaaagaatcatggacgtccccgaactgacttacaacaccgacgggctgatcccctgcatcgtgcaggacgcggacacgcgcgaggtactcatgatggcgtggatgaacgaggagtcgctcgcgctcacgatggagtgcggcgagacggtgttctggagccgcagcaggcgtgagctgtggcacaagggagctaccagcggaaacacccagaagcttgtggagctgcgctatgactgcgacgccgacacgctgcttgcgctcgttcgtccggcgggtcccgcctgccacacgggggagaggagctgcttcttccgcacgatgggctaggcccgcctcgcgccgaggggctttcccgcaccgccttgcttgatgacgaagcgtgccccaacctccatcgcaattccacgatatgcggcctgatgtgcttgaacgatcgcggatcatgcgctaacatgatcgaagttctgaatatcccaccgttggaaagtcatctaacatccaatattccacttcaggcatgcacgcgtgcgcttgcgcgcgtttccaagcagatatacccataagcataaggaggactaggtgaaattctttctggacaccgccgatctcgcggagatcgaggaggcggccagctggggcgtgctcgcgggcgtgaccacgaacccgacgctctacgcgcgcacgggcggcaagctcgccgatttccacaaccacatcaagcgcatctgcgagatcgtggacggccccgtgtccgccgagagcgtggccatgacgcgcgacgagatgatccgcgacggtcgcgagctcgctgcgctcgccgacaacgtggtggtgaagctgcccacgatgatcgagggcctggccgccacgaagcagctggccgccgagggcatcccggtgaacatgacgctgtgcttcaccgtgccgcaggccatcatggccgcccgcgccggcgcccgctacatcagcccgttcgtgggccgcttcgacgacatctccgagaacggcctcgcgcagctcgaggacgtggtggccgccgtgaacaactacgacttcggccacgatgtggagatcatcgccgcgtccgtgcgcagtgcgaaccacgtggcgcaggcggccctcatgggcgccgacatcgccaccgtgcccttcgccgcgctcaagaagtgcgtgcagcatccgctgaccgaccgaggcctcgaggcgttcctcaaggactgggagaaagtgcagaacgcatgagcgagaacgaatcagcaaccgtggcgcccgaggcgcccgccccggcagccaagcccacgcgccgccgttccacgagcgtgaacgccggagccgccgccgcgaaggcgccggccgccaaggctgcggagccgcaggccgaggccgcagcccccgcaccgcgcgcggccaagacgccgcgcaagtccgtgaaggccggcggccaggccacgtcccagcagggttccggcaccgccaagcgcccgggtcagaactccagcggcaacaagggcggccaaggccagaaccagggcaaccgtccgaagcagaacaaccagcgccaaaacgcttcggggggcaagcagggcaacaataacaaccgccgccagcgacgcccgcatgacaacaaccgcggcccgcgcgaggtgcagcccagcgtgtcgcgcgacgatctggcgaagctcaaggtggccgagctgcgcgagaaggccgccgagctgggagtggacgccaccggcctcaagaaggccgagctcgtggaggccgtgttcggagccagcgtgaaggccgagggcttcatcgaagtgtccggcatcttggatatcctggccgacggctacggcttcttgcgcacgcagggctacctgcccagcgagacggactgctacgtgggcctctccaccatccgccgcaacggcctgcgcaagggcgatatggtgtccggccagacgcgcccggcgcgcgagaacgagaagtacgccgccatccagaaggtcacggccatcaacggaacgcccatcgaggagtgcggcaaccgcgtgcgcttcggcgacctcacgccggtctaccccgacgagtgcttccatatggagcacggcaagaacaccgtcacagctcgcgtcatcgacctcgtgagccccatcggcaagggccagcgcggcctgatcgtcagcccgccgaaggccggcaagaccacggtgctgaagaacatcgcggccgccatcaccgcgaacaaccccgacgtgcacctcatgtgcctgctcgtggacgagcgccccgaggaagtcaccgacatggaacgctccatcaagggcgaggtcgtgtcctccacgttcgatatgcccacagagaaccatatcgccgtgtccgagctggtcatcgagcgcgccaagcgcctcgtggagtgcggcaaggacgttgtcgtcctgctggactcgctcacgcgcctcgcgcgcgcctacaacctggcgcagccggcatcgggccgcatcctctccggcggcgtggattccacggcgctctatccgcccaagcgcttcctgggcgccgcccgcaacatcgaggggggcggcagcctcaccatcctggcctcggcgctcatcgacaccggctccaagatggacgaggtcatcttcgaggagttcaagggcacgggcaacatggagctcaagctcgaccgcaacctggccgaccgccgcatcttcccggccatcgaccctgtcgcctcgggcacccgcaaggaggagctgctgctcgacccgcaggaggcgccgctcatctgggccgtgcgccgcatcctgtcgaacacgaacagcaccgagcgcgccatggacatgctcatcaagtcgctcaagcagaccgagaccaaccaggagttcctgctgcgcacggccaagaaggcccagcacaccaagggcgacgccatcgagatatagcaacggaggaccactatgccccaggacaacaactggcagcagcaggtgtggcagcagcccgccgccccacagggcgccccggctccccagccgcaaggcttcccgccgtactaccagcccgagccgccgaagaagagccgcggctggatcgtagcgctcgtggcggtgttgtgcgtgttcggcgtcatagcgctgggaatgtggtcgtgcacgtcggccgtgtcctcgtcgttcggcacgctgggcgcgctggggtccacggcggccacgtcggacgtggactacctgacctcggacgcggtgggcgtcatcgacatcgacggcaccatccagtacgatggcacgacatgcagtcccgagggcttgaaggcgcagctcgacgtggccgcggagaacaagcatatcaaggccgtggtcctgcgcgtgaactccggcggtggcacggcgacggctggcgaggagatggccgcctacgtgcgcgagttctccgaggattccggcaagcccgtcgtggtttcgagtgcgtccatgaacgcgagcgccgcctacgagatctcgagccaggccgactacatctacacggccaagaccacggccatcggcgccatcggcacggcgctgcaggtcacggacttgtcgggcctgctcgacaagctgggcatctccatcgagaacgtcacgtcgtccgactccaaggactccagctacggcacgcgcccgctgaccgaggaggagcgcgcctattaccagaacatggtgaaccaaatcaacgagacgttcatccagacggtcgccgagggccgcgacatgacggtcgaggaggtgcgcgcgctggccaccggcctcacgttcaccggtatggaggccgtggagaacggcttggccgacgagataggcacgcgcgaggacgccgtggccaaggcagccgagctggccggctcgtccacggccaagaccgtgatgctcgacaatccgagctcgagcctgtccgaactgctgaacctgatgtcggagagccgcctgtcggccgacgatctggcccaggccttgaaggagctggaaaacgatggcagccttgcccgataacgcaccaactttgagcgccgctcccgccgaggagcgcgtcgtgtggccgaagcgcgccgtggtcacggcgggcatgccctatggcaacaagccgctgcacttcgggcatatcgccggcgtgttcgtgcccgccgacgccttcgcgcgcttcctgcgcgaccgcatagggcccgagaacgtgcgcttcatcagcggcacggactgcttcggctcgcccatcaacgagggctaccggaagctggtggaggccggcgagttcgacggcaccatcgaggagtacgtgcagagaaaccacgacgcccagaaggccacgctcgacgcctacggcatcagcctgtccatctacgaggggtccggcatgggccactcgggcgacgttcaccagctcatcagcgagaagttcatcgagaagctgcacgagaacgggcacttgcacaagcgtgccacgctgcagttctacgacgccgaggcgcacacgttcctgaacggccgccaggtgacgggccgctgccccgtgcagggctgcaagtcggagcacgcctacgccgacgagtgcgacctggggcacagctacgcgcccgaggacctcatcgcgccgaagtcgtccctcaccggcaccgtccccgagatgcgcccggtggagaactggtacttcgacctgcccgccttcggcgacttcctgcgcgagcgggtggccgcgatggaggccgacccgaacatccgcgccatcgtgccccaggctgtaaaggagttcctggcgccgccggtcgtctacatcaagaacgacgcgcgcgaggcctacgaggccgtggccgccgagcttcccgcccacgagctgcgagagcccgagcgcggcaagcagagcttcgagatagagttcaaggacatcgacgcccgcgacgcggcgcgcgatgcgctggggcgggcgggcatccgcttccgcaccggcaaggcgctcgtgccgttccgcatcacgggcaacatcgaatggggcgtgaaagccccggtcatcgacgggcttgaggggctcaccgtgtggtgctggcccgagagcctgtgggcgccgatgtcgttcaccatggcagtgaacgaccagatgggcctgccgcgcggcagctggcgcgactggtggtgctcggacgatgccgaggtctaccagttcatcggccaggacaacctgtacttctacggcgtggcccagcctgcgctcatcgaggccatccgtccgggcgacctcatcatgccgggcgtggccgagcatccgctgcaccagacgcggctcgtggcgaaccaccacatcctgttcggcgacaagaaggcgtcgtcgtcggggtcggtgaagcctcccacggccgatgagcttctggacttctacacggtggagcagctgcgcgcgcacttcctggcactcgggctcgaccagaagtcggtgggcttcaagcccaagccgttcctggccaccgaggaggagctggccgacccgcgcgtggccgacccggtgctcaaggagggcgcgctgctcacgaacgtgttcaaccgcctggcccgcagctgcttctacgaggcgcagaagaacttcgagggctacctgccgctcggccgccccacggacgccgcgctcgcgcgcgcgaacgagacgcttgcggcctacgaccgcctcatgctgaaggtggagctgcactccgtcatgtcgctgatggacgacttcatccggttcgcgaacaagcactggtcggacggcatcagggccgccgagctggagggagacgacgaggcgcgccgccaggtgctcgtggactcgttctacctgctgcgcgtggccacgctgctcatgcaccccatcgtgcccgcgggcaccgagaagatctgcgactacctgagcttcgagttcgacgacttcttcagctggaactacgacctggaggacatgggcgagttgtgcagcgccggcgagatcgacgagggccgccaccgcatccgcgagctgccgccccgcttcgacttcttcgagaagcacccgtcccaatacaagtaacctgaaggcgccgctcatgcggcgccttccatcgcgaaagggcattcatgcaggtagagatcttcaccgacggctcggcgcggggcaatccggggccgggagggtacggcgcggtgatgcgcttcgtggatagctccggcaaggtgcacgagaaggagctctcgcagggattcgagcacaccacgaacaaccgcatggagctcatggccgtgatagcaggtctcgaggcgctgaagcgcccgtgcgatgtcacgttgtattccgactcgcagtacgtggtgaacgcgttcaaccagcattgggtggacggctggctcaagcgtggttggaagaactcgcagaagcagcccgtgaagaacgacgatctgtggaagcgcctgctggccgccaagaagccccatcgggtggagttcgtatgggtgaagggccacgccggccatcccgagaacgagcgctgcgacgagctggccaccgccgccgccgacggggaggggcgcatcgcggacgaggggttcgccgggtagaggccctgctcgttcatggacgcgcgccctcgccctatcccgtacccgcttgcgctgtgatgttcctgtatcgatacggttgtgccttgggaacggagggtcagggtctgttagactgttgctcaacgtatcagagctaacgaagcaggtggaggccccacatgcagcatagtgcaacgaaggcgcgcgccaagggcgcgctggccggattcgtcgcggcatcgctcgccgcatccctcatgatcccctcgctcgccttcgccgagccgacgtctgccgagaaacaggccgaggcccagtccgccctcgcctcgctgaacgcgatgcaggacaggctcgatcaggcttctgacaactatggtacggcactcctagagcagcaggaggccgaacataatcgcgatgccgcccaagcgcgtatcgaggaggccaacgcccagatcgccgacctgcagggtcatcttggcgctcgcgcccgcagcatgtaccgtaccggtaacagcaccctgctcgacctgctgttcggctccactacgttcgaggcgttcgccacgaactgggatctgctcaacactctgaaccagaacgatgccgacctcgtgcagcagacgaaggacctgcgtgccgaggtgcaggagcagaaaactgtgtacgccgagcaagagcgcgtcgctgccgaaaaggcgaacgaggcgaagcgcatcgaggacgaagccgctgcaacggtatcggccatgcaggctacttacgatagcctgagcgcagaagcagccgccctgctcgagcaagaacgtgctgcccagcaggccgctgaggctgcgcaggcccaggccgtcgtcgaggcgtctgtccagcaggcgacgggaggcaacggcggtggaggcggcgagcctggcggtacgtccacgccgtccaacaacggtcccacctacaaccccgtgactggcaatgccatcgttgatcgcgcctacgggtgcattggactcccgtatgtgtggggaggcgttgggccgaacgggttcgactgttcaggtttggtgagctatgccgttaccggtagcttctctcgcttgggtacaaccggcaccttcatgggttatccccaagtaagcgatcctcagcccggcgacatcgccgtgaattcgggccactgcggcatctacatcggcaacaaccagatgatccacgcccccgatttcggtcagacggtctgcatcggtcccgtgcagggaggcatgatcatcgtccgcccataagctcaatcagaatacaatgtgaaaggaagggcggccgacggccgcccttcctttcacatttgcgcttggcacgagtgtgcgtaggggcgttggccgcgcctacgccaccgcatccctgatgatcttccgcagctcctcgatgccgtcgcccttcgcggatgacgttaccaccatagaggcgtcgtcgcccagcgcgagctggcgcttgagggcggccttctgcttcatctgctgctggcgggacagcttgtcggccttcgtgagcgccacgacgaaggggaggtcggcctcgcgcaggaagcggatcatgttttcgtccagctcggacgcctcgtggcggatgtccacgagggccaccacgagcgcgaaggagcggtcttggttgaagtagccctcgatgagctccgaccagcgtgccttctcggacttcgacaccttggcgtagccgtatcccggcaggtccacgaacgtcacgccgtcgccgtcgaagaagttgatggtggccgtcttgccgggcgtctgtgacaccttcgccaggcccttgcggttgaatagcttgttcagcaacgacgacttgcccacgttggatcgccccgagaacgcgacctcgggagccgtcgaaggcgtaagctgcgccgacgtgccgaacgaccgctcgaatcgcacgttgttgaagttcatgctgcgctccttcccatcggatgcgagcgtcggcgggaagcggctcgcccgtccatggtagcgcagcgttgacggggaaaccgcgggaaccgcgtccctgcccggtatttccatgcgtccgctgcgaccgctcgacgggtggtgtcgaatggggggcgtttgggaagggggccgcggctttcactcaataattacccatggtttactttttatcgcgacttcgctatcatgcaagtgaaataagttagctatagcaaactatgaacggagtcaaggagatggaaaaccagatgcaggaagccgaaggggagcagcgagcacgcagcggccggagggccgtgcactacgcttgggcggcggccgggttcgccgcatttgggctcggcgccctcggtgctgtgatgcctgttttgccgacgacgccctttttgctggtggccgccttctgctttgcccgcagctccgagcgcctcaacgcctggtttcgctccacgaaactgtaccgcacggtgcttgagggctacgtggtcaagcgatcgatgaccgtgaaggccaaggtcacgctgcttatacccaccacgatcatgctttccctgtcgttcgcgctcatgggctctataccggtcggccgcgtggtggtcgccgttatctgggtggcccacgtggtgtacttcggcttcgtggtgaagaccgagcgcgcgggtgcggctcatggcaacggcgcaggtgcgggtgagggtgctgtgctggttgctgccgtcgaggctgcgggtgtcgcgagcgctgccggcgctggcagcgccgttgcggagcccgtccgcaagtccgcaactgcaagcgaggccctgcgccacgcgccggttgcggcgcgcctgcgcgccgatggggaaggggcctaaccgccgtgtttgacaaacgcctgctcgccctcgtcccgtcggcgcggaagtttatcgctgccgacgtcgtgttccagtggattgctcttctcgccaatatcgtcctgttcttcatgatcggctcgtttttgcagacgctgctcgccgatgcggtcaccgtgcaggcggcggcgaacctcgctgttttcgccgcgctggccgtggtcgtgcgcatggcgtgccagacgctcgcgcagcgtatgggactggcagcaagcgaggttgccaagcgcgccgtgcgccaagaggtatacgacaagctcgtgcgcctggggccgtcgtatcgcgagcgtgtctccacgagcgaggccgttcagatcagcgtggagggcaccgagcagctggaaagctacttcggctcgtacctgccgcagctgttctacgcggtgctggccccgctcacgctgttcgcttgcctggcgccgatctcgttgccgtcggctgcagcgctcgtcgtgtgcgtgccgttcatccccgcatccatcatggcggtgcagaaattcgccaaacgcaccatgcgcaactactggggctcctacaccgatctcggcggcatgttcctcgagaatatccaaggcttgaccacgctcaaaatctaccgcgccgacgagcgggcgcacgagcagatgaacggtcaggccgagggcttccgccgccagaccatgcgccttttgcgcatgcagctcaactccatcaccatcatggacctgttcgcgttcggtggcgccgcggtgggcatctccgtggtgctcgggcagtatgcggcaggcgccgtggcgttcggcgccgcgtttgccatcgtgttcttgtcggccgagttctttctgccgctgcgcacgctggggtcgtttttccacacggccatgaacggcatggccgccgccgagaagatgttcgccattttggacacgccggaggaccgcgacggcgcgcgctcggtggacccggcgggcgctgatatttcgtgccgcggcgtgggctactcgttcgacggcgagcggacggtgctccaaaacatcgacttcgaggctcctgccggcagcttcatcggtgtggcgggggagagcggatcgggcaagtccacgcttgccggcattctgaccggggcgaatgcctcctatagcggcacggttgaagtgggcgggatcgacctgcgcgacgtctcgcgcgcctcgttgcgagagacgatcacggccgtgtcgttccaaagctacctgttcaaggggacgctgcgctcgaatctcgcgctggcgaaacccacggcgaccgacgacgagctgtggcacgtgctgatccgctgccgccttgatggcttcgcgcgcgaggccgggggcttggatgcccccgtggccgaggccggccgcaacctttcgggcggccagcgccagcgcctggccatggcccgagcgctgctgcacgacgccccggtgtacctgctggacgaggccacctcgaacatcgatgcagagagcgagagcgccatcatcgagcttgtgcacgagctggcgcgcacgaagaccgtcatcatgatctcgcatcgactcgcagccctgcgcggcgccgattgcatctacgtgctcgaggacggccgtgtggtcgagtcgggcccgcatgatgcccttgtcgaagcctcgggcgcctacgcccgcctctgggggcagcaagccgagctggaagccttcgcccgcggcgaagcaaaggaacctgccaatgtcgccgccgccgcgaccccttgcggcaaccctgcacccgaagctccattgagcggctccgcccccatggcctcccacgactccgccccctgccattccgccgccgttaactccgggagcgctttcgacgagtcggcggtcccgggaggtctcgccgggtcatcctcttgcgcagactccgcaaacgccacagcctccgctcctcatcgctctcatctctccgttatgctgcgcctcgtgaagctcacgcggccgcttttgccggtcatggcgcttgccgtggtgctgggcgtcatgggctttgcggcggccatcttcctcaccgtgttcgccgcctacgcgctgctcggccttgcggggctgccgcagcctgtcgccgccggtgccgctatcgtggcgctcggcgtatgcggcgtagtgcgtggccccctgcgctacggcgagcagctgtgcaaccactacctggccttccgcatcctcgcgctcgtgcgcgaccgggtgtttgcggcgctgaggcgccttgcgcccgccaagttggagggccgcgacaagggcgacctcgtgtcgctcgtcacctccgacgtggagctgttggaggtgttctacgcccacaccctctccccggcgctcatcgcgctcatcgtgtcggtaggcatgacggcgttcgtcggcttccagtcgccggtgctcggcgcgcttgcgctcgcctcgtacgtgctcgtgggcgtggcggtgccgctcgtgtcctccagggccagcggaagtgcggggcgtgccgtgcgcgaccgcatcggcgacatgaacgcgttcgtgctcgacagcctgcggggcctcgccgagacgctgcagtacggccgggcggccgaccgtgcgcacgagctctcggcgcgcatggcgaacctggccggcgtcgagcgccgcctcaaaggccgcacggcgctgttcatggcgctcgtcggcgccgtcgtgattgtctgcgacgtggcgatgctgctcgtttccgccgcgcttgcgatgcagggggatatcggcgtgggtgccgccgtgctggccaccacggcgctcatgtcgtcgttcggcccggtcatcgccgtggcgaacctgggctccaccttgcagcagaccctggcgtcgggcgcgcgcgtgctcgaccttctggacgagcgcccgcagaccgaggaggtggccgacggggtggacctggacggcttcgagggcgcggccgcacggcgcgtggacttctcctacggtggcgcgcgcgtgctcgagcaggtggacgtgcgcatcgagccgggcgagatcgtgcgcgtggcgggccgcagcggcgcgggcaagtccacgctgctcaagctgttcatgcgcttctgggatgccgagaagggcgtcgtggaggtgtcgggccgcgacgtgcgtcgcgtcaacaccgccagcctgcgcgaggtggaagggttcatgacgcaggacacgcatctgttcgagggcaccatccgcgacaacctcgtgctcgcgcgccccgatgccgccgaggccgagcttgccgacgccgtgcgcaaggcatcgctcgcagatctggtggagcgcctgccgcagggcctcgacacgccggtgggggagcttggcgacacgctctcgggtggcgagcgccagcgcatcgggcttgcccgcgtctttttgcacgacgccccgctcgtgctgctcgacgagcccacgagcaacctcgacagcctgaacgaggccgccgtgctgcgcgcactcgccgagaaccgcgacggcaagaccgtgctcatcgtcagccatcgcgcctcggccgccgccatcgccgaccgcacgttctccgtcgagcacggccgcgtgtcgtaggcgtcacctggctggccgagcgctccgccagctgctcgcccccgctgtctcggaggaggaggggccggccggcatgcagttttttcgcaacaccgtgaacggggggttgcaatcagaaggcgctgtggtaaactttcgaagtttctaattacgcatgctcgtgcgacccgctccgccagtggccaaccggaaaaggctgcggaggcaggggatgacctcgggcagaggactaacgaatggagagagcaatgacgaaagtcagcattcagacgctgctcgacgcgggcagccacttcggccatcagacgcgccgttggaaccccaagatgaagccctacatcttcggcagccgcggcgacatctacatcatcgacctcaagcagacgctctacggcctggacgcggcctacacgttcgtgtccgagatcgcccgcaagggcggcaccgtgctgttcgtgggcacgaagaagcaggcccaggaggccgtggccgacgctgccaacaagtgcggcatgccctacgtgaacgcccgctggctcggcggcatgctcacgaacttcgttaccatccgctcccgcgtgacccgcatggaggagctggaggccatggaggccgacggccgcatggcggtgctgccgaagaaggagcagatcctgctgcgcaaggagctcggcaagctgcagacgaacctcaacggcatccgcaacatgaagcgcgtgcccgacgccatcttcgtcatcgacacgaaccgcgaggccatcgccatccatgaggcccgccgcctggacattcccgtcgtgggcacgctcgacacgaactgcgacccggacgacgtcgatttcggcatcccggccaacgacgacgccatccgctccgtgcgcctgctcgccgacttcgtggccgacgccgtgatcgccggcgtgggcgtgccggtgacggccgccgagatcgctccggccgacgccgaggccgcccctgccgccgaggccccggctgccgtggaggccgcccctgccgaggctacccccgaggctgcggccgcccctgccgccgagtaggctgcgcgcggcgaacccgccccgcttctgcgggagcgggctttacgagagaagagtcgcgccctccccgcctatgcggcccgagggcgcttccaccccggcaccgcgcatgcggcgccgtagagagaaaggaacaacgtggctgagatcaccgcttccctggtcaaggagctccgcgagatgaccggcgccggcatgatggagtgcaagaaggcgctcgtcgaggccgaggccgacttggaaaaggccgtcgacgtcctgcgcacccgcggcctggccgccgttgccaagaaggccggccgcgccaccaacgagggcacggtcatggccatcgtctccgacgatgccacgacgggcgccgtcgtggagctcaactgcgagaccgacttcgtgggcatgaacgacaagttcaaggcctacgccgagaagatcgccaaggccgccctggccgccaagcccgccgacctggaggccctcaaggccgccgacgccgagggcgagacggtggaggccgtggtgaccgacgccatccacacgcttggcgagaacatccagctgtcccgcttcgcgctcgtcgagggcggcgccgtgtcgtcctacatccacggcggcggcaagatcggcgtgctcgtgcagttcgacgtggagggcatcgaccccgcgtccgacggcttcaaggcctacggccgcgacatcgccatgcaggtggccgccgcgtccccggtcgccgcgaaccgcgatgccgtcgacccggccatcgtcgagcacgagaaggccatctacatggcccaggccgccgagtccggcaagcccgaggctatccaggagaagatggccaccggccgcctggagaagttcttcaaggagagcaccctcaccgagcaggccttcgtgaagaacccggatcagagcgtgtccgagtacaccgacgaggtggccaagagcctcggcggcacgatcggcatcgtcggcttcaagcgcttcgtgctgggcgaagaggcgtaaggccccgcatcgaccgcggcccatctgctcttctgctttcgctgtgaaggcccgcttcgtgcgggccttcgctttctataatggcagggtgctgcaaacggcgccggggcaacggcgcgtggacgatagacgagcgatgcccggccgccttcgagccgggtgcgaaggacaatccatggctgaagaaatcatcatcgtgcagggcacgggcgtgctgaccggcgaggttcccgtgtcgggcgcaaagaactcggcgctcaagctcatggccgccgccttgctggggggtggaaccaccgccatccacaacgtgccgctcatctcggacatcgccatcatgtccgaggtgctgcgatgcctgaacgcgcgcgttgagcgcgagggccacacgctcgtggtggacaccggccccgtggacaagtgggagaccccctacgagctggtgtcgaagatgcgcgcgagcatcgccgtgctgggcccgctcatcgggcggttcggccaggcgcgcgtcgccatgccgggcggctgccagatcggcgcccgcaagatcgacatgcacctcgtggggctggaggcgctgggcgtggaattcgtggtggaccacggcttcctggaggccaccacgccgcacggcctgaccggcgcgcacgtcgtgctggacttccccagcgtgggcgccacggagaacctgctcatggccgccgtggcagccgagggcaccaccaccgtggagaacgcggcgcgcgaaccggagatcgtcgacttggcgaacatgctgaacgccatgggggcgcgcgtgtccggcggcggctcgtcgctcatcgaggtggagggcgtgcccgtcgagagcctgcatccctgcgagcacaccacggtgggcgaccgcatagaggccggcacgttcctcaccggcggcgcgctcatgggcggcccggtgacggtgcgcggcatcgacccgtcgtacctgcgcatggcgctcatgaagctggaggccatgggctgcgacgtgcaggccggcgccgactggatcaccgtgcggcgcgaggggcccctcgcgcccatcgatttgcagacgctgccgcaccccggcttcccgaccgacctgcaggcgcagttcatgctgctggcggcccgcgccgaggggacgtccgtcatcacggagaacgtgttcgagaaccgcttcatgttcgccagcgagctcatgcgcatgggcgccgacatcgtcatcgaggaccatcatgccctcgtgcgcggcgtggatgggctgcagggtgccgacgtgtcctccaccgacctgcgtgccggcgcggcgctcgtgctggcgggcgtctcggccgagggggagacgcgcgtgcacgacatccgccatatcgaccgcggctacgaggactacgtgggcaagttggacctgctcggcgccgacatagagcgcgtgacgatagacgacgcgctgccggcgtgctagcggggccgttgcatggctaggcgcaagaagggcttcaccgcagcccaatcgaagctcacgtcgcaccgcatgaggtcggcgatgctcggcacgcacgtgccgcggcgcatccgcccggcatcggcccgcatgaacgccgatgccgtgggcttctccagcacgcgcaagaagaagcgcgccgcgcgcggcgtggtggacacgttgctgccctccacggccacgcgcgagacctcgtcggactacagccgccgcgtggggcgccgcgacatcgcccaagagctgcagcgcaaggcgcgcgtccgccgcatcgtggccgccgtcatcgccgtcgcggtggtggccgtggtcgccggcggcgtggggctggccacgttcttcggctcggtggatgggaagatggggctgggcgactccgacgcgaaggccgccctcacggcgccgaaagagggcgcctggtacgccctgctcgcggccgacctgggcgccgccacggccacgcaggagcaggagggccccgacgcgctcgtgctcgcgcgtgtggacgcttcctcccgtgcggtcacgctcgtctcgattccggcgaacttgcaggtcacgctcaaggacggcaaggtgcatcccctgcgagaggctgcggcgcagggcgatgcggcgctcgtgtcggcggtggccggtttcgcgggagtggacatcgcgcactacgcgaagaccgatgcggcgggcatcgcctccctggtggattatttggggggcatagaggtcgacgtggcgcaggaggtggacgaccctgcggcaggcgacgtctacctggcccccggcgtgcagacgctcgacggcaatgcggccgtcacgttcctgcgcgcgcggaacttctcgaacgggatcgacgatcaggcgcggaaccagcgtgagttcctggcgtccttggccgcgcgcatgctcgaggacggcggcgctttggcgttcgccacgcagctggacgctgtgggcggctcgttccataccgacgttgcggctgtggacgccctcaagctggctggcgcgctgggcggcatcgatgccgcgagcgtgcagggagcgctcgtgcccggttacgaggccacacgcgacggcgcgacccgctacgtggcttcgagcgacgcgtgggcgggcatgatggagctggttgacgcaggtcagccgcccgttgtggacgaggacgcgtacgcgcaggtcgaccgcggcagcttcaagctggaagttcgcaacggcgcgggcataacgggcggggcggcccaggtgggagaaatcctggcggccgacgggttcaacgtggccggcacgggcaacgccgacagctccgagttccccgagacgctcgtggtgtacgacggcgaggagcacaaggagcaggccgaggaagtggtgcgcgctctgggcacaggccgggctatcgtgggcgcgggctattacgagtacgagaccgatgtgctcgtgatcatcggcagggactggaagcccgtggcgtaggcggggcgcgacgcggctggctccggtgcctgcgacttgctcccagcgacggccccgccgcctttcgggccgctcgatgcgttgctcccgcatgccttgcagccatccgtcccggaacgcggccggccggtcggtgtcgcccgcgtgcatttacggcaccgagcgcgtcgcgcccgccgcgctatggtagaatcggcacccgagaaacatcatttcgacgaaggagcttttcatggtagacaagaacgacgtggcggcggtgctcgagctcatccgccccagcctgcaggccgacggcggcgacgtgaggttcgtcgatgtggacgaggacggcgtggtgtcggtggagctgcagggtgcctgcaagggctgccccatgtccgagatgacgctggcgaacggcgtggagcgcatcctgaaggagcgcgtgcccggcgtgacgaaggtcgtcgccgtccacgaaggctagaacggagggaccggggccatggcgaactgttgggagcggcgcgggtgcgacgaagagatgatgtcgcgctgcccgcacaacacgcccggcgagccgtgcccggccgactgccactacgccgcctgcgaccggccgacgcacgtggtggcgaccgacttcgcggtgctgctcaaccccgagcggtactacgatgcggccgtgaaggaggtgtgccgcttctgcgagcacttcctggagcacggcccggacatcgccgacgcgcccgaggacgggccgcgcgccggcaacccgaaccgcttcctgctgtaaggcgggccgcggctgccgcttgcacggcgggacgccgttcccgctgtccgcatgcgcgtttggggtatcatgagcaaggcaggaacgcgcggccgcccgggagggcggccgcgttgcacgcagggccaacgatggaaacaggaggaagcatgaccgagcaggtgcagggcacgctgaaggttaagatcgggttcgcggagatgatgaagggcggcgtcatcatggacgtcgtgaaccccgagcaggcgaagatcgccgaggatgcgggagcggtggccgtcatggccctcgagcgcgtcccggccgacatccgcgcccacggcggcgtggctcgcatgagcgaccccaccatgatcgagggcatcgtggaagccgtgtccatccccgtcatggcgaagtgccgtatcggacacttcgtggaagcccaggtgctgcagagcctcggcgtcgacttcatcgacgagagcgaggtgctcacgccggccgacgacgagtaccatgtgaacaagtgggacttcgacgtgccgttcgtgtgcggcgcccgcaacctgggcgaggccctgcgccgcatcgccgagggcgcggccatgatccgcacgaagggcgagccgggcacgggcaacgtggtggaggccgtgcgccacatgcgcaccgtgaccaccgacatcgcccgcatcaagggcctgcgcgacgagcagctgttcacggccgcgaaggacttgcaggctccctacgagctggtgaaatgggtggccgagcacgggtgccttcccgtggtgaacttctccgccggcggcatcgccacgcccgccgacgcggcgctcatgatgcagctgggctgcgacggcgtgttcgtgggcagcggcatcttcaagtcgggtgacccggccaagcgcgcccgcgccatcgtggaggccacgacgaactacgacgaccccgacaccatcgcgcgcgtctcgcgcaacctgggcgaggccatggtgggcatcgagatctcggacatccccgagaacgagctcatggccggacgcggctggtaaggctcgcatgacgaggaagcgcatcggcgtcctggctctgcagggcgccttccgcgagcatcggcgcatgctcgaagggctgggggccgacacgcgcctcgtgcgctggccggccgagctggacgggctggacggcctcgtgatcccgggcggcgagtccacggccatcgcgaagctcctggccatccacggcttgtacgagccgctgcgcgccgcgcatgcggccggcatggccgtgttcggcacgtgcgccggcgccatcctcatggcgcgcgatatagagggcgcgcgccccgaccaggagccgctcgccctcatggacgtgcgcatccggcgcaacgcctacggccggcagatcgactcgttcgagacggcggtgccgttcgacggggtggcgggaggcccggtgaaggccgttttcatccgcgcaccccgcttcgccgatttggggccgggtgtgcaggtgctcgccgccggcgacgacggcgagccgcttgccgtgcgcgaaggtcgcgcgctggccgtggcgttccaccccgagctcaccgacgacgaccgcgtgcatgcctatttcttcgaaagcgtggtcggcgcgtgacgttcggcctcggggaagtctgctacaatgggtttcattggcggacccggcaaggcgaaggagcgtgaggcgcatgagtcagacgattacctgcccggcgtgcggcgcgtccgatctggacgtgtgctgctacgactccatgatggtcgtgcgcgcggacctcgccatgttcacgttgcgctgcccctcgtgcggcgccaaggtgtccagcatgcagaccatcccctcccagctgcgcgaagaggtgcggttcgccgccatcgaggtgggcgcgggcatgggccgcgagtaacgtcacgcgcccggctgcgcgtcggggcgggcccgcacgcggcggagccttccgccggcgccgcagggccggcgatcggcaaggcaaaggaatcctatgctcaacgacctttactggaatctcgaccccgtcctgttctcggcggggccgttcaccgtgcggtggtacggcatcgcctatgtggcggggttcgtgtgcgccgccctgctcatctggcggctggccaagcgctggcgcatccgcgtggacgccgacgcgctgctcaccatcatgttctgcgtcatcatcggcgtcgtggcgggcggtaggctgggatacgtgctgttctacggcaacggcctggagttctacctgcagaaccccctcgaggtgctcgcgttcaaccatggcggcatgagcttccacggcgggctcgtgggagcgctcctcgccggcatagcggccgcgaagatgacgggcatcccgtacctcacgttggccgacctgggctgcgtggcggctcccattgggctcttcttcggccgcctggcgaacttcgtgaacggcgagctgtggggcggccccaccgacctgccgtggggcgtcgtgttcggcggggccgcgggctccatgccgcgccacccctcccagctctacgaggcgctgctggagggcgtgctcatcttcgccgtgctgttcctgctctcgcgcaggctcccgccgcgtccgcgcggcacgttcctgggcgtgttccttattatgtacggttgttgtcggttcgccatcgaattcgtgcgccagcccgatgtgcagctaggatacctgtggggcggttggctgaccatgggccagcttttgtccgtcccgctcgtgctcgtgggaatcggcgtgctcgtttatgcgcttcggatgaagaagccgcaacagggtcttcctgaattgccacaaggcgagtaacatataaggcgtgccatcaaggaacgaacctgaagcccggtcgggccccgcgcaggcggtggttgcggtcgggaacgacctcgaagggggaaccatggagctcaaattctaccattgccgccactgcggcaacatcgccgtcaagccgttcgactccggcgtgccgctggtatgctgcggcgagcagatggaggagcttgtcgccaacacgaccgacgccgcgctcgagaagcacgtgcccgacgtgaaggtggacggctcgaacgtccacgtgcaggtgggcagcacgctgcatcccatgacgccggagcactacatcacgttcgtgtgcctgcagacgaagaacggctaccagttcgtgcagctcacgcccgaggacgctcccgtggccgacttcgccgtggccgagggcgacgagccggtgaaggtgtacgagtactgcaacatccacggcctgtgggtggccgaggtctaggccccgcttcccaagccgcatcgagcgcccgtcccgcaccgcgcggggcgggcgctcgcgctttccctttgtgaaactccgcttccgattcggccgccgcccggacgcgcggcggggttcgcggtatcatgcaacgtgcagggcccggttcgggcaccgcatggcggaaggagcagcatggcaaggcgcacgaagatcgtttgcacgctgggtccgtcggtggacgacgaggcgtcgctgcgcgccctgatgggggcgggcatggacgtcgcgcgcttcaacttctcgcacggatcgcacgacgagcaccgcgcgcgcatggagcgtttgcgcaaggtgcgcggcgagctggactcgccctgcgccatgctgctggacacgcgcgggccggagatccgcaccggccgcctggcgggaggccgaccggtggagcttgcggccggcagccggatcgtgctcaccgagcgcgcggtggagggcacgccccagctggtctcgcagagctgcccgggcttggccgcggccgtgggggcgggcacgtccatcctcgtggacgacgggctcttggagctcgaggtggaggacgtggacggcaccgacatccgctgcatcgtgaggaacgcgggcatgctcggcgagcgcaagtccgtgaacgtgccgggcgcggcgcttcccctgccggcgctcacggaccaggaccgcgccgacctgctgttcggcatcgggcaggacatcgacttcgtggccgcgtcgttcgtgcgcgacgccgacggcgtgcgggccgtgcgccggttcttggacgggcacggcggcgagggcatcaggatcgtcgcgaagatcgaatgctctgaggccgtggagaacttcgacgccattctggaggccgccgacggcgtcatggtggcgcgcggcgacctgggcgtggaagtgcccgcctggcgcgtgccccatatccagaagaacatcatccgcgcgtgcaaccgcgcgtcgaagcccgtgatcacggccacccagatgctggagtccatggtgcgcaacccgcgccccacgcgcgccgaggtgggcgacgtggccaacgccgtgtacgacggcaccgatgccgtcatgctgtcgggcgagacggcgtcgggatgctacccggtggaggccgtgcgcatgatggcgcaggtggcggaggcgagcgagccgtacctgcacgacgaggccgcgcccgaccgcagccgcgagcatgcgcgcgtggccttggccgtgggcatggcggccgtgcaggccgccgagacgctgggagcctcgtgcatcgtggcgcccacgatgtcggggcgcacggcgcggctcatgtcgaacctgcgcccgcgcgtgcccatctacgcggtcacgccgtttccgcgcgtcatgcgccagcagcagctgagctggggcgtcacgcctatgctgggcgacgtgcagggcgacatgcagcacgtggtggagaacgcgcgggccaaggtgctggagcgcggcctggtggcgcctggcgacatcgccgtgttcacggcgggcgaccgcgccacgagcccgctggaggacgtgggctgcgggcgcaccgacgtggcggccacgaacgccatgtacgtggtgcagatccgggaggactaggacgcgcgggcggcccggttcgcgccgagggcgcgggctgcgggcgcgcctgcagacgagggccgccgcgggcggccggacaaggagcaggacatgggctttttcgacaatgcgcaagaagtgatcgaccgcggcgtctcggtggcgaagggcgccgtgtcgggcgtggccgtggagcagcagggcttcgtgaagggcttcgtgcggctgtgcaacgacggctgggagcaaggctggcacgagcgcaacggcggcaacgcgacgtaccgcctcacgccggaggacgtggcgtcctgccgctcgttcttctacgacacggccagctcgtgggtgccgctggggcttgccgcgccgggcatgcgccactcgttcttcctggtcacacgcgccggcgcgttcatgcgcaacgtggcgctcgatccggacgccacgcttggcatcgtggagctgaacgacgagggcgacgcctggcgcatcgtgtggggcttcaaggagggcggcatgcccacaagcgagctggccagccatgtgctcatccacgagaagcgcgccgccgccacggcgggcgcggcccgggtgctctaccatgcgcacccggtgaacgtggtggccttgtcggctgtgatgccgctcgacgcgcgcacgttcacgcgcgcgctctggaaggccatgaccgagtgcgtgatcgcctgccccgagggcctgggcgtcgtggggtggatggtgccgggcggcgcggacatagcgcaggccaccgccgagctcatggggcgctacccggcctgcgtgtgggcgcagcacggcctgttctgctcgggcgcggacttcgacgccacgttcggcctcatgcacacggtggagaaggccgccgccgtgtacgcgcaggcgcgcctgctcaacggcggcagcgatgccttcccgaacacgatccccgacgccggcctgcgcgccatcgcggaaacgtaccacctgccgatcaacggggagttcctggaggggtaggattccgctgtgagcgttgcctgttttccctcgcatgagcgttccgactgtgctatcatgcaaaggcttgtcttcgccttggtcggaaaccaaggcctgtctaaggagaaccaaatgaaacagggaattcatccggaatacgtcgagtgcacggtgaagtgcagctgtggcaacacgttcaccaccatgtcgacgaagccggagctgaagatcgacatctgcaacgtgtgccacccgttctacaccggccagcagcgcttcgttgacaccggcggacgcgtgcagcgcttcgccgacaagttcggtgccgccaaggagaccgtggccgagcgcgaggctgcgaagaaggccgccaaggcagcagccgtcgccgaggccgaggcaaagcgcaaggccgagcgcgaggcgaaggctgccgagaaggccaagcgcgccgaggagttcgccaagaaggccgagcgcgatgccgccaaggccgccgaggccgaggctgccgcccctgccgaggatgccgcccccgaggccacggccgaggaagtcgccgccgtggacgcgctcgtggaggctccggccgaggagaaggccgccgagtagcgcgcgcctccgcacgagacatcgcaccgaacggaagcgcccggccatcggccgggcgcttctgcttccgaaggaggggagggaagccgtctacttcgcctgcgcgtgcgcggcgatctcgtcgaactcggcctgcgagaggtcgtagccgtagaacgtcttgaagtagcccgccacggtgtcgtacatatcgtcgtcgtactggtcgggatacagcaggcggggcagccactgcatgcccagcacctggttcacggtcggcgggttgttgagccagcaccacggcgcgccgggcacctcgtagtagttcccgtcctttaccgccgtgaggtcggcccaggccgggtcgctgcccacggtgtcgtagatgctcccctcttggaacaagatgagctcggggtcccagagggagagctgctcgaggctgatctcggtgccgctgccgctgcctgacaccttgcccaggtcggccacgttgctcgccacgaggtcgacgacctggccctggtaggagtccttggcgatggtgttcgtgcccttgtcgcccagcaggtaggccacgcgcacccgctggtcgtcggggatgcccgccatcacggacaccgtctcgtcgtacgccttcttgcaataatcggacagctccgcgccgcgatcctccatgcccaggagctcgccgagcatctcgtaggcgtcgccgtaggtgtccatggtggtctccacgaacacgacggggatgcccagctgctcctgcagcgtgtcgaggtcctccttgatgccgtccttggcctcgccggtgtcgatgaggatctgcgcgccggccgcggccacggcctccttgttgaggtcgcccttggcgccgaacgcggcgccggtgacgggcaggtcggcgtagttgccgcccaggtacttcacctggtcgtcggtgagctcctgcgagagcgtgaccagcttctcgggggccatcgtcagcaggacctgcgtggcggtgtggccggcgggggcgatgcggtcgagctgcgcaggcacctcgaccgtgcgtccggccgagtcggtgaacgtgcgcgtggcgtccacagccgcctggtcgctcttggcgtcgccgcctcccgatgtgctcccattgccgccgctggaacagccggcgaatgcgaacgccagccccaggcagagcgcgcaagcggccagcagccgcacgagccgtgcgtgtttggatatcctcgttccttccatgtgccttcctttccctttcgttcccttttcctggaatctatcgttgtatctcgcgcacgggcacgcagacgcgcaccttgtcgccatagagggagttgacctccacgtccacgccgtagatggtgctcaccagctcgcgcgtgatgacgtccttcgggtcgccgtgcgcgaagacgcggccctcgtggatgacgagggtttggtcggcgtagaggaacgcctggtcgggctggtgcgtggactgcacgatgctcaggccctcgcgggccagctgccgcacgcacgacagcacccgcacggtgttgccgtagtcgagcgcgctcgtgggctcgtccatgatgatggtgcgcgcgttctgcgcgatggcgcgtgcgatgagcacgagctgctgctcgccgccggagatctgcgtgtaggggcggtggcccaggtgcgcgatgccgatgcgctcgagcgcgttccacgcctggtccacctggccgcgcttcggcgtgccgaacaggcccacgcggccgccggcgctcatgagcaccacgtcgagcacctcgtagttgtacacgggggcgtgcgactgggggatgtaggctatctcggaggcgcggtcgcggatggacagggcgcgcaggtccttgccgttcaccgtgatgccgccctcccagttcctgttcaggcacaggatgcagcggaacagggtggacttgcccacgccgttcggacccagcacgttcaccagcgtgttgtcggggatggagaacgtcaggtcgtgcagcacctcgcggcgcccgtacgagaagctcaagtgctcgacgtcgatgctcatagctgcttcttcctcgtgatgaggtacaggaagaacggcgcgccgataaaggcggtgaggatgccgatgggtatctcggaggtggtggcaaggcgcgccacatcgtccacgacgagcaggaagctggcgcccatgagcatgctggccggcaggagcttgcggtagtcgcagccgatgaccatgcgggcgaaatgggggatgacgaggcccacccagccgatcatgcccgtgaccgccacgctggcggccgtcacgagggtggccgcgaagatgaccacgatgcgcacgcgctgcgcgttcacgcccatggtggacgcctcgtcgtcgcccatggtgaggatgttgatgcgccaccggagggcgaacaggaccaggaggccggctgccatgggcgctgcggccatggccaggtcggcgggcttcgcgccggtgaggctgcccatgagccagtaggtgatggccgccagctgatcggtggggtcggcgatgagcttggtgtaggacacggccgcctgcagaagcgagctcatcatcacgccggccagcaccaccaccatcatgtggttgcccttggcgcggctgcttaccaagagcaccagcatcacggtgacgatggccgccgcgaacgcgaacgcggagatgccgaaggccccgagtcccaggaggatggccacggccgcgccgaacgccgcgccctgcgaggcgcccaggatgtccggtgacacgagcgggttctggaacgtgccctggaacgccgcgccggcggccgcgagcgagcagcccacgagcagcgcgagcgcgatgcgcggcaggcgcacctggaagaacagcgtttcctgctgggcggtccagaacggctcgatgggcactaccaggttcgccagcatgcccccggcctcggccggcgtgatgggaaagcggccgagcatgagcgaggcgagcgtggacgcgaccacgagcacgccgagcgccacgaggacgatggccgcgcgccgccgctggttgcgcgaggcgcatcgggctgcgtgggcatcgtcgcgggaggtttcgcgagatgcgtcgcacgtggcgtggcgggcggtttcgtccgcgcgccgagggggtaccccctcggcgcctctgatgcttccagcatcagaggcgccctcgtctcccctgaaggtatgctcaagagccccgatcgtccccgccccctatagactgaaataagaataataccataaccaatatatcctaaaaaatgaatattatcaattgggaatatataaatcgggaattggaagacgatggaaaatggcgggaagggggtcgatgcgaaaggggcgctatattcaaaacacccgctcttactgcccctttgacgcacaatcagtgattagcgcaatctgccgaccttcgcgcgcagtggccctcgaaacagctgcctaacgcgcggggtacgcggtgccgtggacaaaaaggggcagttttcgttattctggataaaagatagttaaaacaccgggcttgctaccaggtgtttcgcaaacgccgcattcaccactccttgattcccgcccagaatctatagattaccgagcctttttgtccattaccctttcgatcatatattgagtcgccgcatgcgcgagcaaagcgctttgcgcatgcggtacgaccgcgatcatcgactatgcgtcaaagggggagtcggagcattcgtttgaaataatgaacgaactttcctttgtccggcgggagggttcgccgatgggcggcttgcaaggccggtacgcccgcgctgggagcgcgcgggccccgcctacgcccctggccgggtgatggacatcatctgcagcgcctcgccgaagaactggccggctccgttctggacggcgaagcgggccttgtcggggtcggccaccacgctgccggccagcatctccacgccccagtcgaacaggaacggcgacatgaccacgctcgggcccaccatgacggtggtgccgttcctcgtgaggtcgagcaggcgcggggccgtcttgttgatgatggtgacgccggtgatgaacgtgtagtcgcttttcggcagcacgtactcgcaggcggggtcgggcgtgtcgagggcctgcgtgcagttgcgctcaagcacggtgaggtcggcgtactcggcgatgcggtcgacgtgcgggaaatggccgaccacggtgacgcgggcgcggccgtccccgccgcgggcctccccggcggcctcgatgcgcgggcggtactgctcgaaggcgtcgcgcggcggcacgcctccgcgcgagccgcgctcggagcgctcgacgggcgggtcgtacacggcgcccagcgggtcgagcaggggcttctgcgcgtagtaggcgttgagggccgccacgccgagcgtggcctcttcgaagcaccacgacttcgccagctccgccacggcgcgcagcggcaggccgcgcaggtccatcgtgtgcttgcgcttggcgccgcccttgcaggtgaagctgatgcccatgccgcagtccgcctccacgtaggaccagtgcgtgcccaaacagtagtcgcggacgaccaggtcctcgggaacgtgccctatcaggtggttgtagaacttccacggcgtgtcgtggccgtgcgtgccggggaagcttataacgtcgttgccggggttgttcgcgcagcagtctttctcggggcatcccatggtcgtaccgtccctctctctcgtgcggagccgccggacgggcgtctccttcggggccgttcacggcggccctgtccgtatcttcaatagagtataatacagaatcaaggagaaataaatgcagggcgagggcgacgcgaggaaggggatgcgatgctgttcatcttgacggggggcgtgcagtcgggcaagacgcgctggctcgagcgtctggttgccgagctggcggccgacggcgtggagagccgcggcgtgctggcgcccggcgtgtggcgcccgcgcgcggacggggacgatggcggcctgcgtccgcccgggtcgggagagggggcctacgagaagctgggcatcgacaacgtgctgctgccccagggcgagcgcctgcgcttcgcccgccgccgcgacctggccgagcgcgacggccagctgaacccggccagccagagcgcggcggcgcagctggcatgggagatacccggggaatccctcgcacgtgtgaacgcgcacttcgagatgctggcgaaatcaacccttcccgagcaatggacgtccgatggcgctgcggtttccacgcgctccggacaacgggcgcccaacgctgccgtgaattttccgcattccgaaaaacggccgccggatggacggtcgttcgaggaagcggcacatgtttcacgtgaaacatttgttcgtaaggaaggcgagggaggagcggctgcgcccgcggcaggggaaaacgcatgcattcctgcggtggggagaaccgtggctgccgcgcgcccttggctgctcgtggtggatgagctcgggcgcttggagctggagcgcggatgtgggctgaccgccgcgctggacctggtggaacgggggccggtccccgggtgcccgcatgcgctcgtcgtggtgcgcgcgcggctgcgcgatcgcgccgaggagcgcttcgccgcggcatggggcggctgcgaggcgctcgcgcccggcgacggggcgcgcaaggccgtccgccgcgcgttcggccttgcttcccttatcgataacgagtatcattaggtttcagagaggcatccgaaggtcttatcgcaagccgggcgcgagtgcgccgcggcggaaaggcgcaccatgatcgatcaaaccgcgttcttcagcctgagctacgggctctatgtgatctcgtcgaaggacgcagaccgcgcggccggctgcgtggccaacacgttccagcaggtaacctcgtcgcctctgcaggtgagcgtggcgctgaacaaggggaacgccaccaccggcgtcatccgcgctgcgggccgcttctcggccacgtgcctggcacaggatgcgcccatggagctcatcggcacgttcggcttccactgcagtgacgacttggacaagttcgccgcctgcgagcacgccttcgacgccgccggcctgccctacgtggccgagcatgcgtgcgcgcactactcggcgcgcgtggtgcaggagatcgacctgggcacgcatgtcctgttcgtgggcgaggtggaggaggctgagaagctgctttcctgcgagcccatgacctatgcctactaccaccaggtgaagggcggcaagaccccgccgaaggcctcgagcttcctgcccgacgccgtaggcgcccccctgccggccgacgcctctgccgaggcggccgccgccgaaccgggtcagccgaagatagcctggcgctgcaccgtgtgcggccatatggagtacgtcgaggagctgcccgacgatttcgtgtgccccgtgtgcggtgtgggaaaggatatgttcgagcgggtggagctgtaaggaaccccctgcagagacgtattgcggatcgcccgcgcggagggcgctgttgaggcaatgcggcgagcgcaccgttcgctcgccgcattgctttctgcccgatggggaagccgtgcggctggtcggcgattttcctgagcaggtttccgctacttgtcccaggcgatgaacgcccaggtgactttgcggggctcgcgcagggcgaggcgcttctcgggctcgcccttccggccgggctggccggcgcgggggttctccacgaggttgtcggcgagccaggggcgcaggcgcgcgagggcggcgtcccgctccgcggtggtgacgagggatcccacggtgtcgtccaccatgcgtgagaacgtctcgtaggcctcctcgggcgtgtcgaacgtgtcggggcgcgcgctctctatgtaggacacctcgggcttcaggccctcctctgcaaggatggcgaacgcgtagaggtagtcgcggcccagctggttctgcaggccgagggcggtgagcacgcgctcgtcggtccgcggtgagccgccggtgggcagcgtgatgcacacgcgacggcgtgccgcgtcggtcaggcgcatgagcgagtccttcaggtcggcggtggctatggagcgcgaggccacggccacgtcggccgagccggggagcacgccgtgggcggcccaatcgtcctcccagctcatgagcttgggcgtaacggacacgatgccgcgctcggcgagctcgccctccaagacgcccagcatgccctgcgagaagtcggcggccaccacggggtgtcccgccgcgcccagcggcaccgacagcgctccggtcccgcagcccatgtcgagcaccgactcgcccggccggatgcccgccaggtccaggaaccgctccacgtaggggttcggggcgtccttcgagccgaacgtggccgcgcgcttgtcccagtgcgaggcgtcgtccgcggcgcggcgggccttctgcagctccttccattcctcgttccagtcgtgcgtggtgagcagcggcgtgaaggcggttgcgggcttgtcggggtgggagccgtcgggcgtttcgtggatggagttttcgaccatagggaagcctttcgcatcgcgggttctcggcatcggttaccatactagcgaaagacagcgccgaaacgagccgtatcgtcaaaattatcccgaattgaggagtatccgacccatgcacgtcgaacttctgtaccacactcccgaccccgagcgcgccatagccacggcggcgcgcctgtgctacgcgcccgtgggcgccgccgagctcatggagaccatgcccgaggagcgcgtgcgcagcgtgctctccaccatcatgggcagcggccacttctccacgctcgagcacgccagctacaccttcgcggtggacggcgtgtcgcgcgcgctcacgcaccagctggtgcggcaccgtattgccagcttcaaccagcagagccagcgctatgtgaggttcgcggacggcgtggccacggtgaagcccgagagcgtcgcggcgagcgaggaggcgagctcggtgttcgaccaggccatcgccgccgccgtcgaggcgtacgggaagctgctggatgcgggcgtgccggccgaggatgcgcgctacctcttgccgaacgcggccgagacgaagatcgtcatcaccatgaacgtgcgcgagctgctgcacttcttctccctgcgctgctgcaaccgcgcccagtgggagatccgcgacatggcgcaccgcatgcttgagctggcgcgtcccacggcgccgttcatcttcctggacgccggcgccccctgtgtgggcggcacctgccccgaggggaagatgacctgcggaaacccgtatccgcgcgtgaagaggggctagcatgggcgaagagaagagcgacctctcgcgcgcattctccgaggacggcgcgcgcaagacgcacgtgggcgggcaggccctcatcgagggcatcatgatgcgcggcaagtacaactggtcggtggccgtgcgcgagccggcgggcggaatctacgtggaggagcatgacctggcgagcgggcgcgcgaagaacggctggctgcactggccgctcgtgcgcggctgcagggcgctcgttgagtcgctcgtgctggggttcaaggcgctcgagatcgcggcggagcatgcgtttgcggaagatgattctggcgaggcggccgctcctacctgcgagaccgcggagggaacgggaggggcctgtggctcgggcagtcctgctcgcacggacagcccgctgggctgtccggctcgtgcggaactcgccccaggcccctcccgctccctccgccccgaggcggtcgagggggtgcatgctggcggcgagccttccgatgcggatgctgcggtatcggacgtcgaagggggcacgggcggctccctcgccgatgaggggaagggcttttcttggaaggacgacttcgggcggccgggcacgatgatggacgccctcggggcgcagacgtcgctcgaggttgtcggcgggcctgacgctgagggcagcggcgatgccgatgccttggacggcggacgcccctgcgccgcggagcccgagaagaagtccttcctcgacgaggaggcggagttcggcaagggggccatggcggtgtccatggtgctcgggctcgtgctgggcgtggtgctgttcatcgtggcgcccgccttcgtcacgaacctcatcgtgggggagtacgaccagaacaccgtgctctggaacgtcgtggacggcctccttcgcgtggcggtgttcgtgttctacctgtggctcatcgggcgcatggccgagatcaagcgcatgttcggctatcacggcgccgagcacaagaccatccactgctacgagcacggcctgcccctcacccccgagaacgcgcgcagcttcccgcgcctgcacgtgcgctgcggcacggcgttcctcatcatggtcatgatcatcgccatcctggtgtacacggtcacgcccatcaacgggctcatcgcggcctggggcgtgcccgacggcgcgccgaagctcgcgctggtcatactcgtgcgcatcctgctcatgccggtcatcgccggcatctcctacgagatcaccgtgcgctgggcgggcagccaccccgagaacccgctggtgaaggtggtgctgtggcccggcatgcagatgcagtacctcaccactaacgagcccgacgacggccagatcgaatgcgccatcgcggccatgcagcgcgtgctggagcgcgaggaggccgaggcggcgggtgccgccgacgcccggaagggcgaggagggcgatcctggcacggcggtgtcggctgcctgacggcacggctgcccgaatgctcctgctacgccacgaccgagcgtcccttgccggagcgcttggcctggtacataacctggtcggcgcggtcgtataggtcctggtagcgctcgctgcccgcggccttcaccgctccgacgctcacggtgtaggggcagcccgccgcgcgcgatgcggcggctgccgagcgcacgagctttgcgcagcgctcctcgagccgtgcggcatccacggggccgacgaggcacacggcgaactcgtcgcccccgaagcggcagatcaggtcgtcttcgccgaacgtcttgcgcagctcgtccgccagcgtgcgcagcgccttgtcgccggtctggtggccataagtgtcgttcacgcccttgaagtcgtccacgtcgatcaccgcgaacccgcccacctcgccgcgcgaggccagcgtctccacggccttgcggaaggcgcccatggcgagcaggttcgtcaggccgtcccggtcggccaccgccttgaggcggtccttctcggcgcggatgatcttgagcgccttcgagctgttgcgcacgtagagtaccgacagcgccacgacgaccagcatcacgcccagtccgacgagggcgagctccttggcgtacgcctcgacgaaacgggcgagggtcggctcgtcttcctcccgcacggcgtcgtagatgctctcgttcacggcgccgcggggcatctcgcgcaccgcctcgttgaacatgcggataagctccaggtcgctcgacggcgcgaacgcgaagcaggtgtcgtttgcctggtccgagttggcgagcgaggtgatgttgcggtagcggttctcgttggcgtagtagggggccgagtagccgtcggtgtacgtatagtcggccctgccggagtcgacggcctcgatgcagtcctgcagcgtgttgcacacgacggcgtccccgatttcggggacgtaggcgtccttcgtcacggcgatccgctttgtcgataggtcggcgacgtccaagccgtcgcggaccaccgtccaccgccgcgacgtgagataggatgtgctcaaggacagtccatgccgctgtgcgaagtcgaagttgtggaggacgcccgccaccgcatcgaggtcgaggcgggccatgtcgtcgacccagctgctgttccccgtcagggggacgagctctaccgagagtcccgtgtagtcggcgatgaagtcgatcacggcctgcgacgccccgacgagctgcccggtcttctcgtcgacatcctggacgggcgcggcgccgggaaggtagcctattcggacggagcccttgcgcgatgcgtactcccgcatgtccctcgaaaggccggtggaatcctcgtagctgttgaagtacttgtcgtacagatcctgctcgagcgtgggctcggccttccgcgtctggacgatggcctcgttgagggcggcgactacgtccgggctccccttcgtggcggcgaagtagaagggcgtctgcgtgagcgtggccacgacatgagcgcccccgatgagattgatgtccacgcccgtgaggacgtcgacatcgcccgattccagagccttgagaaactcgtccgcgctctcgtaggtcacggcttcgagctcgatgccgttcatatcgcagaacgtctgcactgcggcgcgcgttttgggggagggcccgttgaacgccgcacgcagcttgtctttcgtgtagatgttggtgaaggacagatcctcgttctcgttcgaggcgaacagcgccgtgtgcgccgacccgtaggcgttgatggcgaaatcgtactgctcggcgagctggtcggagtagttcatggccccgatgatgtcgacctcgccgttcgccaccatgtcgagcagcatggtgagctgctcgttgaggtcgccttccacatgaacgtactcgtagtcccagccggtgtactgggcgatctgctggaggtagtcgtacgtgtaccccgagtgcgtgccgtcctccgcggtttcggtgaggcccggttggtcgggccaggccacgcgtatcgtcgtgcggccgccctcggcggcgttcgcggaggcgagggcgccgactccggctcccggtattccgcaggcgagggctgctgcgaccagcagcgatgcgagtaccgataccgccctacgacctttcatgcccatcccgcccttcttgacagcctccctatgcggccagtatagcagaccggtcgggagccgcggcggcggtcgaaatacgctcgccccactagagcttggaccaggctttgccgggttttctttccggcccggaaccgggttatgatgaaaaggagcctgcggggttgctggccgatcccttcccctcgactgctatactgatccggatgcgagggcgagatgggggcgggttgctttcgctccacggtgcgaggcgccttcgtgttgccttgcgggaggagacgtcgcccttcccgcctccgtctcccgatgcgacaccgaaaggcttgccgatggaaccagccatcaccgttacgaacctgcggaagaccttcaggctctccgccaagcagcgcaagctcgagcgcaccgacgcgaggacgaagacggccgtcgacggcctctcgttcgaggtgcggtgcggcgagatctacggcctcttgggcccgaacggcgccggcaagaccaccacgctgcgcatgctggcggcgcttgtgaaaccggacgagggcagcgcgttcgtggagggcgtctcggtggtggacgaccccatgagggtgcgcggcatcatcgggttcctgacgagcgagctcaagctggaggatacgttctcgccggactacctcttcgacttcttctccgagctgcaccacgtggagccggccgtgcgcgacgcgcgcaaaagggcgttgttcgggcgcttcggcatcgaccgtttcgcgcagacgaaagtggccgacctgtccaccggcatgaagcagaagacgtcgcttgcggtgtcgctcgtgcacgaccccgacgtcatcatcttcgacgagcccacgaacggcctcgacgtgctcacggcgaaggtcgtgaccgacttcttggtggagctgaagggccagggcaagaccatcctcttgtccacgcacatattcagcctggtggagaaggtgtgcgaccgtgccggcatcgttatcggcgggcgcatggcggccagcggcaccctgccggagctcacgggagggcgctccctcgaggacgcgttcttcgacctgtacgccgcgagcgcgggggaggcctcatgagaagcaacgtgctcacgatagccaagaaggagctggcgaggttcttcagcaacaaggcgtcggccatcgtctccatcgtgctgcccggcctgctcatcttcctcatgtggaccgtcatgggcgacgccatgggctccctgttctcgcccgacgagggcaagcgccccgtggtggccgtggtgaacgagccggcgagcatcggggcgctggcgcccgagggcggcatcgacatggtgggcgaggaggccctgcccggggccgaggagatgcgggagcgcatcggtcagggcagcgtgcaggcgttcgccgtgttccccgccgggttcgacgaggccgtggcagcctacgacccggcatcgggcgagccggctccgcaggtggaggtctactttgactccaccgaccccaactcgtcgcaggcgtacgcggccctcaccggcctgctcgacgcctacgagtcgtcgctggcgaaccgtttcgatgtgaacgcggggcagggtgaatacaacgtggccgcggaacgtgacatagccggttcgctcgtggtgtccatcgtgcccatgctgctgctcatcctgctgttcaccagctgcatgaacatcgcggcggagtcggtggccggcgagaaggagcgcggcaccatggccacgctcctgtccacgcccatcaagcgacgcgatatcgcgctcggcaaggtgctggccgtcacgctcatcggcctggccatcgccgcgtccagcatgctgggcatcttcgcggggctgcccggcatcatgcagggcgcggtggacatgaacgtgtacggcccggcggactacctgctgctggtgctggtggtggtgtccaccacgctgctcgtggtcatgctcatcaccgtggtgtcggccctggccaagaccacgaaggaggcgggcatgtacctgacgccgctcatgatcgtggtcatgctcgtgggcatcctcggcatgttcggcggcggtgcgaaggaggagctctggttctacctcgtgccgctctacaactcggtgcagtgcatgatcggcatcttcacgttcgacttccagcctctgaacgtggccgcgtgcgtgctgggcaacctggcgtacacgggggccggcgtgctcgtgctgcagcgcatgttcaacagcgagcggctgatgttcgcacgctaggcgggggcgagacgcggggaggggcgagacacggggacggggatgacgtctcattccgcggggcgacgcgcggcccggtgctccgcccctgacgagacgtcatccccgtccccgtgtctccccgcgtgtgccggtttcgcttccatctccgtcgatttcgctatcgtcagcctcccgtaacctccctgccatctggggcgatgacgtgcatgctagactggtcgatgcacttcgtcatgaaatcttgcaagaccgcggcgcactgacgatcgcggcctttcacgcgtgaaacgggaggctccgacggtgggaagcgcgatatcggtcaaggacatacgcaagaacttcggcacggtcgaggcgctccggggcgtgtcgctggaggtcgacgaggggcagaaggtggtggtcatcggtccctcgggctcgggcaagagcgtgctcatccgctgcatcaacgggctggagacgccggatttcggctccatcacggttgagggcatggacctgtccgaccggcatgtgaacgcccgcgcgctcgcccgcgacgtggccatggtgttccagagctacaacctctacccgcacaagacggtgctcgagaacgtgacgctggcccccatcaaggtgctgaaggtgccgcgcgatcaggccgagcgcgacgggcgcgcctacctggaccgcgtgggcctgtccgacaaggtggacaagtaccccgaccagctctccggcggccagcagcagcgcgtggccatcgcccgcgccctcaacatgcatcccaagatcatgctcttggacgagcccacgagcgcgctcgaccccgagatggtgcaggaggtgctcgacgtgatcaagtcgctcgccgagaccagcatgaccatcgtcatggtcacccacgagatgggcctggcgcgcgaggcggccgacacggtggtgttcatggagaacggcctgatcgtcgaccagggcaccccgcactatatgttcgacgagacggacaacgctcgcgtcaagagcttcctgtcgaagatcctgtgaggccgcccatgatcacgagacgaaccttcatccgcacgtcggcgctggccgcggccggcctcgcgctggccggcggtccgatcgccctcgcgggctgcgcgcccgacggagacgtgctgcgcgtgggcacgaagatcgacgtgccgggcttcggcttccagaaccccgagacgggcaacatcgagggcatggaggtggacatcgcgcgcgagctggccaagcgcatcaagggcgacccgaacgcgctccaggtgaccggggtgaacgtcaccacgcgcggagcgatgctcgacaacggcacgctcgacgcgacgctggccacgttcaccatcaccgaggcgcgcaagaaaagctacaacttctcgcgcccgtactataccgaccacatcggcgtgctggtgaagaagtcctccggcataaccgacctggcggacctcgacgggaagaccgtgggcgtggcgctgtcggccacgacgcgcgacaaactgacggccgccggcgacgagatcggcatccatatgaagttcgccgagtactcgacgtatcccgagatcaagatcgcgctcgtcaccgggcgcgtcgacgccttctcggtggaccgctccatcctgaacggctacgtggacgactccaccatgctgctggacgcgcagttcgcgccgcaggagtacggcgtggccacgaagaagtcgaacacccagctagccgaccagatcgatgccgccatcggcgccatgtccgacgacggcacgctgcgctcgctccaggagcgctgggggctcgtggacgacgcgcccgccggagacgggaaggacggtgggcaggatgcttgacatcttcgcgccctacaagtgggaggcgctcttccagcgctggcccgacatcctggccgcgttcggcaccacggtgggcatctccgtgctcgcgctcgtcatcgcgctggcgctcggcatcgtgttcggcgtgctgtcggtgtcgcgcatcgcgcctttgcgctgggtgacccgcgtgtacgtggaggtggtgcagaacgtgccgctgcttctgcaggtgttcgtgttctacgccatcttcccgctgctggggttctccctcgccgcgttctggatcggggttctggccatcggcatctaccacggcggctatatctccgaggtggtgcgcagcggcatcggctccattcatcgcgggcagttcgaggcggcgaagagccagggcttctcgtactggcagtcgatgttcgtgatcatactgccccaggccatccgcatcatcatgccgcctttggccgtgcaggcggcgaacctcgtgaagaacacctcggtgctggcgcttatcgcgggcggcgagctcatgtacttctcgaactcgttcgccggcgccacgagctactacggccccgtgtacgtggtggcggcgctgctgtacttcgtcatctgcttcccgctgtcgcgcctggcgctgtacctcgagcgccgcacccgcgcgcaccggcatctgtccacgggcgacgcgaccgaggagctggccgaggacgcgctcgaggtcacgccgggcacgcacgacatcaccgggcgcgcggcggccgacgcgcttgccggcggcgtgggcaccatgttcgagacggtggacatagccccggcccgccaggccccctctccgcgccacccgctgcacgtgctgggggacgaggcggacggcccgggcgagcgcgggccgatggagcaggcgtacaccggccgtgtggccgccgagatcgccgacgagataggccgcgagatagcgcaggagatagccgaggaatgcggcgacgacgaggcctgcgcagcgcgcgtgatgcgcacgaaggccggacgcgtgaaggctcaccgccgcctggagcgccgcgcggccgcccgccgcggggtggagagcacggttgccggcaaggccgaggccggcgccgccgcgcccgcgtcgccggatgccgtggccgagggcgtgcgcgacctgggagcgaggcgctcgccggaggccgacgaggccttggcctcgcgggccgagacggccacgagcgaccgcatcacccgcgacgtgcgcaagcgcgtcgacggcggcgccgcgttggaggccgatgcgcaacgcgctcccgtcgaggctgccggcgcggagggcggacgcacggtgcatcgccaacgtgccgacgcgcacgacgaggccgagctgggagcggaggccttcctcgacaacgactacgtgcccggcgagctggacgcgccggcagagcggcccgcccacgtgcgcgcgccgcacgacgaggccgacttcgacgccgagagcgaggatgcggccgcgcgccaagctcgccgcgaacgccgcagcggcgacgaggaggcaagggagtccagcgggccggaaacggtcgtgcccgaggacgtggacatggaggcgcttgccggcatggctgcgcgcgcggccgacgatgccgccgcgcgcatggagcgcctgcggcgcgagggcctcgagggccttggcaaggacaagcgaggggagggcaaatgagcgagataaccgcccttttcacctgggtgaacatacgattcctgctgcagggcctgggtatgacgctgctgatatccgcgctggccatcctgtgctcggtggtgctcggcaccgtcatctcggtcatgcgcacgtcgagcagccgcgtgctgcgcggcgtggccacggtctacatcgagatattcaagaacaccccgctgctcctgtggatcatgttcacgttcttcgtggcgcagctgccgcccatcggcgcagccgtgttggcgttcacgctgttcacgagcgcgagcgtagccgaaatcgtgcgcggcggcctggcgagcgtgccgttcggccagtacgaggccgcgaagtcgcagggcttctccaccgtgcagacgtacctgctgatcatcttgccgcaggcgctgcgcaacatggtgcccgcgctgctgtcgcagttcgtgaccaccatcaaggacacgagctacctctggggcgccatggcgctgcaggagctcatggggcgcggcatgatactcatgaacagctacaactcaacggtgcagatattcgccatcttcggcatcatggcgctcatctacttcgtcgtgtgcttcacgctctcgcagatcgtgcgcgcctaccagcgccgcctgaaggaggcgcgcacggcgtaggggcgagacagggggacggggatgatgtctcattccccgacgcggtacggccttgcgaacctcctgggaatgagacatcatccccgtccccctgtctcgcccctgtctcgcgggcacccagaggcatctactgcgcgagtgccaggtacggcaggtacgcctgcgcgctctcggggacggcgagggtgacgttctggccataggccgagacggtgacgtagcccgggtcgtcgtaggtggtgatggtgccgtcgatgccggcgtacgacccgtccacggtgccggtctccacggcgtccgcaggcaacgcggcggcctgccagccgtcgatgtccagctcggccacgagcgcgtccacctggtcggccgtgaggccggttgcggcggctatgtcgtccttgcgctcgtcgatggcgttctttacctggcccttgaggtcggttgcgtccatggcggcgttcgcgacggccgccttggcgccctgcgccgcatcgctcacggggccgagcgaggtgttcgagaacacgacgacgcccacgccgacgagcacgacgacggcgagcagggcgagaagcgctccgaggactttcttcatgaggtgcctccttgcagtttggatggcctgcgcggcgtgcggtgcgccgtgcggcgctgctgcgcggtcgcgcggctgcgggcggttccgccgctggtgcgtttcgtggtcgatgcgcgcggcggtgggtgtcgtggttcggcggcctacccgaaggatagcctacccgagaatcgcccggttcacgaaacgcccgcagcttctccaacgcgcggtaacgaaatccccatcgcatttcccgaagcggttcggcttcattccagggcaggcaatgcgtcatcaggggttttcgtgcgaagcgaaaaactgctaggttcatgcggcaatcgtgcaaggattcggcaaggaacaggcggtcgccgcgcaataagcgcacggccgacacgcttgaggcgcgcgaggtttttgcggtttcgcagcggtcggccgacgactgccatgcaaggtcgcggcgctatgatcggcggaagcctgctggtatgagatgggcggatgcttgtgtatataacatatatgttatatactgtttgcaccccgcaaagggggaggaatggaagacttcgaggttgttttctatcgtaagttgaacggaacggtacccatggacgagttccttgagtcgcttcccccgaagctgaacgcgaaggttcaccgcgacctcggtgctttgcgcgaggaggcccataagctgcgcgagccacaatcgaagtgcatgggggaggggctgtccgagcttcgcagcaggcagggcgacgacattgcgcggtcgttctacttcttcttctcgggtagccgcatcgtcgtgacgaacgggttcgtgaagaagacgcggaagacgcctcgcagagaactcgcccgcgcgcttgccttcaaggccgattgggaagagaggtttgtcaatggatgatctggacaggagccatcagaggtacatgcaggaccccgagtacgccgccgagtacgagcgcctggagccggtgtacgacatcatcagcgccatcacgatggcgcgcgccgagcagaacctcacccagcgcgagctggccgagcgctgcggcatgaggcagagcgcgttcgcgcgcctcgagtccggcaacgcgaaccccacgctcaagacgctgcagcaggtggcaaagggcctcggcaagaagctgcgcatcagcttcgtgtgagcgccctaccgccgcgtcacctccgccgcggtgcggcccgccggttccgcgctcgcttcaagatgcgtatttttcgccgcaaccgccgcaaatcgtgtatgctagcgtctgctgcgcgcccaagcgcgccatccccgcacacgttaataaacgaatggggcatcgtgtgaacgaccgagccgcgggaggcggcccagaagacgaggaggaaccgcgtgaagctggtggtaaccgagaagaacgacgcggctcagaaaatcgccgacttgctcggcgtcaagaaacccaaggcggacaaggtgtattccacgccggtgtaccgcttcgacgtggacggcgaggagtgggtgaccatcggcctgcgcggccacatcctggagcccgacttcaccccgaccatggtgtacaagaagcgcggcggctggcagggcgtcacggaggaaggcgagaccttcccggcgcagctgcccgcgacgctgcccaagccccccttcaaaaagaaaaagcccttcactgaggatggcgtggagctcaagacctggaagatggacgcgctgccgtacctggtgtacgcgcccatcaagaagctccccaaggagaaggagatcatccgctcgctgaagaacctggcgaagaaggcggactccatcatcatcgccaccgacttcgaccgcgagggcgagctcatcggaagcgacgcgctctcctgcattcaggaggtgaaccccgacgcgcccgtgcagcgcgcccgctactcggccttcacgaaagaggagatcacgcacgcgttcgacaacctggtggagctggacgtgaacctggcgtccgccggcgcgtcgcgccaggacatcgacctcatctggggcgcggtgctcacgcgctacctgacgctcgtgaagttcgccggctacggcaacgtgcgctcgtcgggccgcgtgcagacgcccacgctcgccctcatcgtggcgaaggagcgcgagcgcctggcgttcgtgcccgaggactactgggtgatccgcggcgcgttcggcgccgaccccgacgcgttcgaggctccgcacgccacggcccgcttcaaggcggaggccgaggcgagcgccgtcatggcgcacgtggagggcgcgaccaccgcccgcgtgtcgggcgtcgagaagaagaagcgcacggtccagccgcccgcgccgttcaacaccacctcgctcatggccgccgcgtccgccgagggcctctcgcccgcgcgcaccatgcgcatcgccgagagcctctacatggacggctacatctcctacccccgcgtggacaacaccgtgtacccctcgtcgctcgacctcgccgacacggtgcgcgccatctccggcaaccccgcctacgcgccgtactgcaaggagctgctggcgaagggcgagctcaaggccacgcgcggcaagaaggagacgacggaccacccgcccatctaccccacggccaaggccacgcccgacgacctcgcgccggccgactacaagctgtacaacctcatcgcgcggcgcttcctggccacgctctccgaggcggccgtcgtcgagggcacgaaggtgtcgctcgacgtgaacggcgagccgttcgtggccaagggcgacgtgctggtgcgtccgggcttccgcgccatctacccctacggcctgaagaaggacgagcagctgcccgcgctcgcggagggcgagacgatcgcgttcaacggcgccacctgcacgaagaagcagaccgagccgcccgcgcgctacagccagggcaagctcatccaggagatggagaagctgggcctgggcacgaagtccacgcgccactccatcatcgagcgcctctacgcggtgaagtacatcgtgaacgaccccatcgagccctcgcagctgggcatggccgtgtgcgacgcgctcgacaagttcgcgccgcacatcacgcatcccgagatgacggccgagctggaagaggagatggacaacatcgccgagggccgcaccacgcgcgtgaaggtggtggacacgagccgcgaccttctggccgaccagctggccagcctcctgccgcactccgaggaggtgaaggacgcgctcgccgacgccgtggccgccgacgcctacgtgggcccgtgtcccaagtgcgggaaggacctgcagctacgcgcgagccagaagacgcgcggcatgttcatcggctgcgccggctggcctgactgcgacgtcacctacccgctgcccaagggcaaggtggaggccgtgcccgagccgtgccccacctgcggcatgccccaggtgaaggtgacggcgttccgagccaagccgcgcaccatctgcatcgacccgaactgcgccaccaacaaggagcccgacgtgatcgtgggcgagtgccccgtgtgcaaggagaagggcaagcaggcgaacctcgtggcgcagaagaacccgcgcacgctgaagcgcttcatccactgcgagaactacgaggagtgcggggtgggctatccgctgccgcagtacggcgcgctcacggccacgggcgaggtgtgcgagcactgcggcgcgccgatggtgatcgtgaccaccgcgcgcggcccgtggaagctctgccccaacttcgactgcccgggcaaggaacaggacgaggagaagaagggcaccgccgcgaagggcggcgcgaagaaggccccggccaagaaggcgcccgccaagaaggctcccgccaagaaacccgcggtgaagagggctcccgcgaagaagccggctgccaagaaggtttcctccgacaaagcctagcgaccaattcccgatcgatcgtctggtcggccctgacctacctcgacagcgcagccccgcggctgcgctgtcccgtacctacgcatcgaccggtcggccgggcaacggcttcgggctcttgctgcacacttttcaccagttttttacgttggaaggcgggttttccgacttgtgaagccgaacaggctatcagcgttgaccgtttcccctgatcgcgtttccttgcggcgaggtctcaagtgcctgagtgcagaaatctggtgaaaagtgtgcagtgcggctccgcgtcgccaacagtcaccaactgcgacgtgccgtttcgctggagatgcgggactcgtcgtcgcagcttggcgcgtggggcgctacaatgcggggcgcagaacctgacttcgaaggagaacaatcacatgcccaaggtaaccatcgtcggcgccggcaacgtcggtgccaccgccgcccacatcatcgcgtccaagaacctggccgacgtcgtgctcatcgacgtggccgagggcctgccccagggcaaggcgctcgacatgatgcacatgcgcagcgtggagaagttcaccgtgcacgtgaccggcaccaacgactacgccgacacgcgcgactccgacgtggtggtcatcaccgccggcatcgcccgcaagcccggcatgacccgcgaggacctgctcggcgtgaacgccggcatcatgaagtcggtgatcggccaggccaaggaggcgtccccgaacgcggtgttcatctgcgtgacgaacccgctcgacgttatgaccacgctggcgttccgcgagagcggcctgccggcggagcgcctcatgggcatgggcggcgtgctggactcctcgcgcctgtcgttcgcggtgtgcgagaagctcggctgcgagccggcggccgtggaggcgtgggccgtgggcgcgcacggcgagggcatggtgtgctggccgcgcttcaccacggtggacggcacccccatcaccgagctcatggacgaggcggccgtggccgaggtcgtgcagcgctgcgtgaagggcggcgccgaagtggtggcgcacctcaagaccggcagcgcctactacgcgcccggcgcgtccatcgccaagatggtggaggccatcctgggcgacacgcacgagatcatgagcgtgtgcgcgcacatcgacggccagtacggcatcgacgacctctacatgaacgtgcccgtgcgcttggggcgcggcggcgtggaggaggtcgtggagttcgatctcgacgacgaggagctggcggcgctgcgcgcgtctgcggacagcgtgcgcgcggggttggcgaacctgccggagtaggtcgacctgcggggcgggcggagggaggccgtgcggcactcttcgcacacttcgcgaaagctcgtcgcaccgcacggcctccctccgccctaggcgaggggctgcgaggtggcgggcttccgtgcggctcacaaggaggcgtcgcttgaggcggcgtcttcttcgttgggggggggtcggactcccttgggaagagagggttcaacatgctgatagagatcgacgccgggcgctgcatcgggtgcgggaagtgcgttgccgactgcgtggggtctaatctggccgtggaagacggcatcgcgcaggtgaaagggcgctgcatcctgtgcggccactgcgtggccgtctgcccgacggcggcggtgtccattccgggttacgacatggccgatgtggagccgtctgcgccggcgggcgagacgatcgacgccgccgacctcctgcgcgccatcaagtcgcgccgcagcgttcgttcgttcaagccggagccggtgggacgccaagagctcgagttcgtgctgcaggcaggtcgctacacggccacggcgaagaatgcgcagggctgccggttcatcgtggtccaggacggcctcgccgagctcaagcggctcgtgtgggacggtatcgacgggcttcttgctctgccggcagacgagaagccgcgttgggtgaagctctacaagccgtttttgcgcgacgcgtgcgcgggcaggcaggacttcctgttccgcgacgcaccggccgtcgcgtacgtggctgccgagcgcgccgacgacgcgggcctggcggctcagaacatggagctcatggcagccgcgcagggcctcggcgtcctgttcaacggctacctctgccgcgcctccgaggagctccccgctgtgcgcgcgtttctcgagtcggacgagcgccccctgcagatgtgcctgctgctcggtcgtcccgtcgtgtcctatccccgcacggccccgcgcatgccgggcgacttcatagtgaagtagaagcgttcccccgcgcgttttcgacgctttgtcgcgatgtcgcgcgaaatggctcctgctgtcagaaacgagccggtttggcaatttctcgtgacgtcgccggactctctttcgacgaattgagaagaaaagaccagatggcgttttactacggttttttgaaaaacgccgccgattgccaaatcgcgtgtttttcggcagaagatgctattgcggggtcaacgcaagcccgagatcgggctcttggcgaggcgccttcgtccggttcgcgtcgctttgcctgctgcgacggtactatgccgcgccgacgggttcttgccgtgcgggcgcggccgcgctggcggtggcttcgcgctcgaggaggggtgcgcagcgccgcaggtccggcatctcgcgcggtggggcgttgcttgcggtataattcatccccatggaaaccatcatcacgaaatcacaggtcgcggacgctgtttacgcggccatcccgcggctggcgtgcgagctgccggccgacatcgaggcggggatcgctgcggcgcgcgccgtggagggcaacccgcgcggtcgggcggtgctcgaccagctggcggagaacgcgcgcatcgcgcgcgaggaccgcgtgcccctctgccaggacaccggcacggtgtgggcgagcctggagataggccccgacgtgctcgtggccggcgacgtgttcgccgacgtggacgacgcggtcgcccgcgcctacgacgaggcgcgcctgcgcaagtcggtggtgcgcgacgccatcctcgaccgcgcgaacaccggcgacaacacgcccgcgttctgcgacatccacccggtggatgagccgggcgcggcgcggctgcacctcatgctgaagggcggcggctcggacaacgcgagccgcgtggtcatgctcgtgccgggcgccggcaagcagggcatcgtggacgagcttgtgcgctgcgtgcgcgagaagggcgcgaacgcctgcccgccgctggtgatcggcattggcatcggaggcacgttcgacaaggtggcgggccttgcgaagcgggcgctcatgcgcccggtggacgagccggcggccgatccgcgtctgcgcatgctcgaggaggagctgctcgcggccgtgaacgacaccggcgtgggccctggcggcctcggcggcgccacgacggcgctcgccgtgcgcgtggccacggctccgtgccacatcgcggcgctgcccctcgccatcaacatgggatgctccgccatgcgccggtgcacgatcgaccttgcatcggaagggggcgcgcgatgagcgacgaagcgatccgcctgttcctgccgctcgaccgcccgcggctcgccgagctccatgcgggcgacgcgtgcctgctcacgggccccctgtacacgctgcgcgatgccgggcacgtgcgcctcatggccgagctcgaggccgcggacggcacgctgccctacggcctggacggccaggccatcttctacgccggtcccacgcccgcggccgccggccggccgttcggcgcggtcgggcccaccacggccagccgcatggacttcgccgccccggcgctgcaccgcgcgggcgtcgtggcgaccgtgggcaaggggcgccgctccgccgaggtgcgcgacgcttgctgcgccacgggttccgtttatttcgtggcgtgcggcggcgctgcggcctacctggccaagtgcgtggcatcatcggagacggtggcgtacgacgacttgggaaccgaggcgctgcgccgcatcgaggtggtggacttccccgtgttcgtgggcgtggacgtccagggacgcgacgtgtacgacctcgcctgagcgcgccgcttccggcgctgaccgttaggatcgaaaagacaccgtgacgcaggaacttgccgaaaacgatgccccgcgcggcatcttcataacgttcgagggcggcgagggcgccggcaagacgacgcatatccgcttcctgtccgagaagctgcgcgagcgcggccgcgaggtcgtgcgcctgcgcgagcccggcggcaccgccgtgggcgaggagctgcgcgccgtggtgctggacccgaagaacgacaacctctccgacgaggccgagctgctcatctacgaggccgcccgcgcgcagatcgttgcggaggtcatccgcccggcgctcgagcgcggcgccgtggtgctgtgcgaccgcttcgcggactccaccatcgcctaccaggtgcacgggcgcgggttggacgccgccttcgtggagcaggcgaacgcgttcgcctgccaaggcgtgtcgcccgaccgcaccatcctgctgaccacgggcggctcggcgcgcacggggctctcgcgcgccacgcaccgcggcgccgaccggctggagcgggcgggcgaggagttccacacgcgcgtgaacgagggcttcctggacatcgcgcgggcccacgccgaccgcgtgcgcgtggtgcagtcggccgcgcggaagtcgcggacgtcggagctcgtgttccgcgagctggccgacctcttcccgtggatggcggacgtcgtggacgacccgtcgtacttcgcctcgctcgacgtgcgccgcccgcgcccgcagggagcgcgcggcggctcgggcaaccgcggcggcagcaacggcaacaaccgtggcagcggcggcacccgcaacggcgccgacggcggcgcgaaggggaaaagcggcaaccgcggcaacccgggagcgaaagccggccgcaacggcggcggccgtgccaggcaggggaagccctcgcagggctcgaacggcagcgccccgcgcggcaagggccaggggagataggccgtggccgacgccttcgagaacatactcgggcagccgcaggtgcgcgagttccttcgcgcgagcgtggcgagcgagcgcgtgacgcatgcgtacctgttcaccggccctgccgggtcgaacaagacgatggccgcctacgcgctggcccaggcgctgctgtgcccgaagggaccccacggcccgcggggcggcgagtgcggcgcctgcgatatctgccggcgcgtcaagcgcaagaagcaccccgacgtgcgctacttcgcgcccgaaggcgccggcggctacctggtggaccagatccgcgacatcgcggccgacacggtgctcgcgcccatccaggccgaccgcaagatatacatcctcgaccgcgtggacctgctgggcgtccaggcggccaacgccttcctgaagacgctggaggagcccccgtccgacgtggtgctcatacttctgggccgcacgcgcgagagcgtgctgcccaccatcgtgtcgcgctgccaggtggtgccgttccgccacatcccggccagcgaggccgccggcatcctggcgcagaacacgggcgcgtcgcgggagaaggcccgcatcgccatcgaggcgtgcgacggctccatcacgcgcggcatcgagttcctgaagtccaacgagcgcctggcgttccgcgcccgcgtgctcgaggcgctggccctgctgcgcaacgccgacgactgggacctcgtgggccaggcgggcgagctcgtggtgctggcgaaggccccgctcgacgtcgtgcgcgccgcgcaggaggaggagctggccgagaacgcggacttcctggcgaagtcggccatccgccagatagaggcgcgcaacaagcgccagctgacggcgaagagcctcgagtcgctgcgccagctcacggccatcatccgctcgtggctgcgcgacgtgctggccgtgtgcgccgagacgcccgagctcgtgataaacgtggacgcccgcggcgcgatagaggacgccgcacgcgccaccgacgaggcccgcgtggccgccgcgctttcggccgtgcgccgctgcgacgaggccatctcgtataatgtatcccctgagacatgcatcgacgcgctgctcttcgaaacaagggacgcgctctaccgcccccgcccgcccgcgggcgccggggccgtgagatagagaggtatcggcaatggttcgcatagcgcccatcaggctcgcctacaaccccaagacgctctggttcgacccgggcgacctggaactgaagaaggaggatcccgtcgtggtgtccacggcgcgcggcctggagttcggccgcatggccgacgacgtgttcgaggccgacgaggcccaggtgaagaagctgaagaccgcgctcaagccggtgaagcgcctcgcgagcgaagaggacgtcgcccgcgcagaggagatgtgccgccgctcggaggaagcgctgcccgtgttcaagcagatggcggccgaggcgagcgaggacatgcacccggtgtccgtggagttcctgctcgacggcgacaaggccgtgttctacttcgaggccgaggagcgcgtggacttccgcgagctcgtgcgcaggctggccgcgcacttccacgtgcgcatcgacatgcgccagatcggcgtgcgcgacgaggcccgcatggtgggcggcctggggcattgcggccaggagctgtgctgcaagcgcctggggggcgagttctgccccgtgtccatccgcatggccaaggagcaggacctctcgctcaacccgcagaagatatcgggcgtgtgcggccgccttatgtgctgcctgcgctacgagttcgacgcgtacaaggacttcaagagccgtgcgcctaagcagaactcgcaggtggagacgccggcgggcatggcgaaggtcgtggacttggacgtgccgcgcgagatcgtgtcgctcaaggtggagggcgagaagccggtgcgcgtgccgctcgcggacttcgagccgcccgacgagggctcgaaccgcccgaaccgcgtggggcaggacgcctgggacgaggccacgacgcaggccgtgatcggcgtggcgggcgagagctccatcttcgccacctcgcagctgaccggctccgacaagctggccgacccgaaggccgtgcgccgcacgggatcgggcggcaagggcggcccgaagggccgcggcggcgcagggaaggaatccggcacgggatcgggcggcagctcggccggctccggcaacgagtcgcgcaagccgcggcggcgccgttccacgaaggtggcggccgacggcacggcccagcctgcgacgaccgaggaaacgccctccaagcgcaagccgaagcaaggaggcgcggcggcctccggagggggcaggaagcaggggtcgaagaagggcggcaacggcgcccagggcggcggcaacggaggcaagaagggctccggctcccagaacggccaggggcgcaccggcggcgctccggcaggcggcggccgcggcggcgcggacaagaacgccaagaagcagggcgcgaagggcggccagggcgcttccaagcagggaccgcgtcccggccagcgctcctccggcctgcgccagcagggcgccggggcctccgcgtcgggcgctcccggggccgcgccgggcggcgagggcggacaccgccgggcgcgccgccgcagccacaaggccggcggcccgcaggagggccagggcggcgccgcgggcggcaaggccgagtagccgggtgctcggggagacggcccgcacccttggcggtgccgccgggacgctgccggcaccggaacgctgacggaaccgccgcatgcttgaggaggatgcattgaagctcgattacgcgctgctcacggacctgtaccagatcaccatggcgcaggggtactgggaaagcgggaagggcgccacggaggcgtgcttccatatgtacttccgcgattacccgttcaagggcggctacgccgtggcctgcggcatggcccagctcgccgagctggtggagggcttcgcgttctcggaggaggaccgcgcctacctggcgtcgctcgacgcgccgggcggtggaaggctcttcaagcaggagttcctggactacctggccggctaccgcctgtccgtggacatcgacgcggtgcccgagggcacggtggtgttcccgcacgagccgatcgtgcgcgtgtgcggccccatcatggactgccagcttatcgagacggcgcttctgaactgcgtgaacttcgagacgctcatcgccacgaaggcggcgcgcgtgtgccaggcggcccaggcgcccgtggcggagttcggcctgcgccgcgcccagggcgcggcaggcggcctctgggcgagccgcgccgccgtggtgggcggctgcgcgtccacctccaacgtgctggccggcaagctgttcggcatccccgtgtcgggcacgcatgcgcactcgtgggtcatgtcgttccccgacgagatatccgccttccgcgcctacgccgaggcgtttccgaagaactgcatcctgctcgtggacacctacgatgtggcccagggcgtaagaaacgccatcaccgtggggctggagatgcgcgcgcggggcgagcgcctggccggcatccgcatcgactcgggcgacctcgcatggctcgcgaagatggcgcggcgcatgctggacgaggcggggctctccgattgcggcatcgtgctgtcgaacgacctggacgagttcaccatccagtccatccgcgacgagggggcccaggtgatgtcgtggggcgtgggcacgaagctggcctgcgcctacgaccagcccacgctgggcggcgtgtacaagctgtcggccacgcgcgagccgggcgagcgggagtggacggaccgcctgaagatctcggagtccgtgggcaagctcaccacgcccggcgtgctggacgtgcggcgctacttctactgcgacaacgggcggctggccggcgacatggtgttcgacgtgaacgcgccgggcgaccagagccgcgaggtgatcgtggaccccgccgacgatcttaggcagaagaaccttgcggggctgtgctccaagacgctgctcgagccgctggcgcgcgacggcaggacggtgctcgacgccgccgggcgcgacgcgcaggcggcgcgcgcgcgggcgcaggaggggctcgcgctgctcgacgagagccagaagcgcatgctgaacccgcatacctatcccgtgggcctcgaatatggtctttttgagcgccgccgcgaattggttgcccgcatgcgtggcatcgcgtagtttaatgggagaacgataacctcgcgccccgtgcgccctagcccaaggtaacgtgccatgatcaagatactcaccgattcggtcgcctccatccccgccgacgctgcgcgggaggcgggcatcgacgtcataacgctctacgtgaaccgcgacggccgcgagctggccgatgcggacatggacctggacgcgttctacgcggacatctacgatatggtcgacaacatccccacgtcgagccagccctctcaggctgcgttggaagcggtgttcgaggaggccgcgcaggcaggcgacgaggtgctgggcgtgttcatctccacgggcctctcgggcgcctacgagggggcggtgcgcgccgcgcgcgccgtggccgcccgcaacatcggcttctcctacgcgctcgtggactccagctcgtgcggctacgacgaggcgtggccggtgttcgacgccgtggccgcccgcgcggccggcgaggacctggagggctgcacgcgcgccgtgctgaagggcatcgagtccacgcgtttcctgttcacgcccgagacgctcacgttcctgcagaagggcgggcgcataggcaacgcggcggcgcttctgggcaacctcatccagctttcgcccgtgctcacggtgtgcgacggcaaggccacgaccctcgcgaaggtgcgcacgcgcaagaaggcgctggagaagattttggccacgttcaaggacgacgtggagaagtacgggctgaagaacgtggtggtgcactacataggcgacaagacgccggctgtggcgtgggcccatgaggtggtggagccgctcttgggccgctcggtgccggtgctgcccgtgagccctgtcatcggcctgcacgtggggccggcggtgggcatcgcctacgagtgcgcgagcgcactggccggcaagctcacggcgccggtgcaggcgcgcctgtgcacgtcgtgagcgcgccggcccgcccgatggacgaaaccgtattcgacaaggaggccgacgcccctatgccgcattcctgcaacctcattatcgactcgtgctgcgacctgccgttcgaggtggtcgaccgcgacggggtggagctcatcgagttcccctacgtcatgagcgacggggagcatgccgacgacctgtaccgcgcatcgagcgcccacgacttctaccaggccatgcgcgatggcgaggagccaaccacggcccaggtgcccgtgccggtgttccgcgcagccttcgagcgagccgtcgagagcggcgtgcccaccgtgtacttgagcttctcgagcgggctgtccggcagcttcgacgcggccgtgctcgtgcacggccagatcatggccgagcatcccgatgcggagctctacctggtggacacacacctggcctcggtggcggaggggctgctggtgcacgaggcgctgcgccagcgcgacaagggcctgacggcgcgcgagctggcccaatgggccgaggaagcccgctacttcgtggacgccgagttcatggttgaggacctggaagcgctgcggcgcggcgggcgcatcccgggctcggtggcctatgctggttccaagctggacgtgaagcccatgctcaccatcgcgccggacggcaagctgtcgctggcgggcgtggcgcgcggccgcaagaagggcatcaagcagctggccgagtactaccagaagcgcgtggcggagagcgttcccggccagtgcgtggtggtggcgggcgccgactgcccgaaggacgtggggcgcctcaaggaggcgctgggcaaggtagacgactccatcctgttcttggagagcagcatagggcccgtcatcggctcgcatgtgggacccggcatgatagccgtcgtgttctggggcggcgacaagcgcgaggacatgtcggtggccgaccgcatagcgcgcaaggtcaagcagggataggcgccgccgaggcgcgcggcacgcattcgagaaacgacgcccggaaaggggctgctcttatggacaagcggtatgcatttatcgggaacgaagcggtgggcgacgtggtgcgagagcgcctggacgcggcaggctggacgcgcacggacgacgtggcgagcgccggcatggtggtaacgtactgcacgtcccagacggcgcttgaggacgcgtacttcgacgagaacggcatcgtgcaggcggcgtcgccgaatacggtgctcatcgacctgtcggcctcgacgccgagcttcgcgcgagagctgaacgccgtggccatcgtgagcgatttggcggccgtggaggcgccgctcgtggtggccgacccgatgctgtccgacgccctctccgaccgcgacaaccttatgtgcctggtggggggcgaggaggacgacgtggaggcggcgcgccccgtgctggacgcgctcgtgggcaccgtgcaggagacgggcggatcggggtcggcccagctggcgcgcgcagcttacacgctgcagacgtcggcgcagatcatgtcggccatcgaggccgacgcgctctaccgcgccgtgcagcgatcgtccgccgcgttcggcgccacgttcgggcgcgcgggcgccacgacgcccgaggccgagcaggtgctcgcggccgtgaacgccgggcgcttcgacggcgcgtataccgtggagatgctcatgtccgagctgtcggccgcgctcatggccgccgacgacgtggacctcatcctgccgcaggccgaggcgtgcctgcacctgctggagcttttggccgtgatcggcggcgccgacaaggcgccctcggcactggccctcgtgtacggagaggaggcggcctgcgccgaaaacggcttggactggacgcgcgccgagcaggcctacgcctccgaggaggcgggggaggactacgactatgacggcgacggcgacggcgacgacttccccggcggcttcggagcgtattcggcgaattgagctccgccgttctggcgagcgacggaacgggccggcgctgcgggccgccctcgtacccgatctccgctccttctcgcttgcgcctcgtggagaagcgcgtgaggccgcgatacgggttgaccttgggcgcgaggacggccctcgctgactgatttggaccggtggggatatgaagcacaacctttcaacctcctgcgacctctgccctcgccggtgcggggcggatcgtgcggcgggggagcgcggggtttgcggggccgacgatgcgctcgtggtggcacgggcggcgctgcacttctgggaggagcctcccatcagcggcagccgtggcagcggcaccgtgttcttcgcgcactgccccctacactgctgctactgccagaacgccgtgatagccgctggcgaggcggggcgcgccgtaaacgtggaccggctggcggagatgctcttggagctggaggcgcagggcgcgctgaacgtcaacctcgtcacgcccacgcactacgccccgcaagcgcgcgccgccgtggcgcgggcgcgtgggcgggggctggcgcttcccgtggtgtggaacacctcgggctacgagacggtggcggccgtgcaggcgaacgcaggtaccgtggacgtgtacctcgccgacttcaagtacgccgatcccttgctggcggcgcgttactcgaaggcgccggactacccggatgcagcgctggccgcccttggcgagatggtgcgccagaccggcgccccggagttcgacgaggtggacgggaatccgcgcctcgttcgcgggacggtggtgcgccacctcatgctgccgggagccctcgaggactcgaagcgcgtcgtgcgcctcgtgcacgagcgcttcggcgacgacgtgctgctgtcgctgatgaaccagtacacgccggttctagccgatgcggctgccgcgggcgacgagcgcgccgcggcggcgctgcaccgctgcccggagcttgcccggcgcgtcccggacgaggactacgagcgcctgctggactacgccgatgcgctgggtgtggaggactacttctggcaggagggcggcgcagccgaggagagcttcatccccccgttcgacctgacgggggtgtagggggggcggcctcagcaaggcgcgcggggacgtgcgctcagccgacgccatcgcgccggttcgacaaggacgcagcgtgcggatggcgcggccgaaggcgcctgctttcgcacgtcttcggccgcgccttgggaggggccgaagacgtgcggggacagcgaatggaatagcccttatcttacatcctcaccagctcgtattccctggttcccaggccgatcttctcggcgtgctcgaggcaggtgcgccattccgactcgggggtggagttggcgaagtggtcgcccgagggctcgaagccgggcgtggccaggttgtcggagagcttgctgccggggaggggggaggcggccaggcaggcgtcgacgcaggcctggtcgagggcgagcgggtccgtggaagcgaacatccccaggttcggcaggatgggggcgtcgttctcggcgtggcagtcgcaatggggcgacacgtccaccacgagcgaaacgtggaactgcggccggccgtccacgacggcctttgcgtactcggccatgcggcggttgaggtcggcgttggcggcgtcctgcgcgaagtcgatggcgtcgaagttgcaggcgcccaggcagcgcccgcaccctacgcaacgatccttgtccacgcccatcttccgggcggcctcgtcgaacacgaggccgccgttcgcgcattcgggcaggcacttcttgcagccgcggcacttctccccgtcgatgtcgggctggccgttgctgtgctgctcggtcttgccggcgcgcgagccgcagcccatgccgatgttcttgatggcgccgccgaacccggtgagctcgtggcccttgaagtgcgtgaggctcacgaacacgtcggcgtccatgacggcgcggccgatcttcgccgccttcacgtactcgccgcccgccaccggcacctccacgtcgtcggtgcccttcaggccgtcgccgatgaggatggggcagcccgccgtgagcggcgtgaagccgttctcccatgcgcactccaggtgctcgagggcgttcttgcggctgccggggtacatggtgttgcagtcggtgaggaacggcttgccgccgagctccttcaccacgtccacgagggcgcgcgcgtagttcgggcgcaggtagctcacgttgcccagctcgccgaagtgcagcttgatggccacgaacctgccgtcgaggtccaggtcggctatgcccgcgcggcggacgagcttcttcagcttcgtgggcagtccgtccccgaacgcctgcgtgcggaagtctgtgaagtacacctttgccgtttccatgttccctccttatcgaggttgtgtcaaaagctccgccttgtcgccctacggggcggcccctggcgggcttgggcctcggagcttttgaaacgcctcccgtgcggttctctcgtcgggtctcatgatagcggttcgcgggttctggggaaactcgcgaaccgctatcatcagccgcgccagaggcgctcggttcgcggggaggcggcgcgggccagctcggtaccggggagatcctcgtgcatctccaggatgttcttccagaggcgcttgggcatgaactggcggcggagctccgggttgtagcgggcctccacggcgacggtgcggtagaagcgcttccaagctgcctgcatgaggttctcctccgcggcgcggtcgggcacgtccagctcgtcggtgcgcacgaggtaccagtcgcgcccctcgtagacgcctgccaggtggtgcacctcgtcgtagatgatgaagggctgcgtgttgaagcggccggcgaaccagtccatgagcagcggcaccaccgaggccttcgggttgcagcgcgcgagccacacgccgttctccaggtgctcgaagcgcaggaactgcaccatgtggtggcgctcgttgcccacggagcgcacgaggcggtgcaggggctccacggcagggtgggcgaggtcgttcagcacgctgccgcgcgcctttcccgagcagccgagggaatcggtcggccgcgacgaggccatggggccgctgcacgatccgcgccggcggcaccccgtgcagtcgtgcgggcgcttggccgccatggcgtagcgcacgaagcggtagacgacggtgccggcgctcgggtcgtccgagagcgaggcgcgcatgacggcgtcgtaggcggcgtggccgcagacgcgcttgatgccgcgctggacgcgcacggcgcgctccatgtccgtctccacgaagcgcaccgtctgcccgaggcgtggctggagcgcggcttgcgccgtgacgtcctgcgggtcctcgcggcgcacgtacgcctcgaacacggccgacagcaggccttccagcgtcccgtcgtaggcataggccacgttggcgagcggctcttccggcgttaccggcccatggggggcatcgccggctgcggcgggctcccgtcccgctcccgtcgcagccaaagcggccgcacggccgcccgcccccttgtccggggcggccgagcggccggaaccggcctcggccgccgcagctcccgagggccgttcgaagccggttccgtggtcggtgctcatgcgcaggccgcctcgggttgctcgagggcgtgctgccagccaaacgcgccgtcggcattcccgtggcgctgtccgttcgccctgctgccgagctgtccggcgggcgccgttcccaggcgaccgcctgtcgccgcgcccaagtgcccgcggggatcggcccccgcaccctgcgcgatgcgggccttctcgggcgtctccacgctctcgaacaggctcagctggccggggatggctttgtctgcgcgacggccgtggccgccgcccttcggcgttgcggctaaatgcgcccgcaggccctctcgagagaagtccgttccctggccggcgtagctgccgttgcaggtgatgaagaagcgcgcccgcttgtaggcgatgcccagcttgcgcagctcgcgctcgccgagcgtggtggagcgccgggcgcgcatgatggagtgcgcgcccttcacgccgatgccgggtacgcgcagcagtgcctcgagcggcgccttgttcacctccacggggaagaagtccaggttgttgagggcccagttcgccttcgggtcgacctcggggtccaggaacgggtgctcctcgtcgatgatctcggtgacgtcgaagcggtagaagcgcaggagccagtccgcctggtagagccggtgctcgcggttgagctgcagggcgtcggtgccgggcagacgcgcgtcgtcgttcacgggcgtgtaggcgctgaagaacacgcgcttgagcgagagcgtgcggtagagcgcggccgagaggttgagtatctggaagtcgctctcgggcgtggcccccacgatcatctgcgtggactggccggcgggcacgaaggcccgctccttcttcttcggcttgaccgccttcatgtaggtcgtgttcttgcgcacgagcgcgcgggtgtccttgtccacggcgatgttgtcgcggatctggcgcatgggggcgatgatctgctgcttgttcttctcgggggcgagcagggccaggctctgctgcgagggcagctccatgttcacgctcatgcggtcggccagatgccccagctcgtccacgagctcgggggaggtgccgggcacggccttggcgtggatgtagccgcggaagccgtgctcgccccgcaggagcgacagcgtctggatcatgagctcggtggtgtagtcggggctcttgatgacgcccgagcttaagaacagcccctcgatgtaattgcgacggtagaacgctatggtgaggtcggccagctcctgcggcgtgaaggcggcgcgcctcatctcgttggaacagcggttcacgcagtaggcgcagtcgtagacgcacacgttggtcatgagcaccttcaagagcgtgatgcagcgcccgtccgccgcgaagctgtggcagcatcccgccgccatcgtgttgccaagcttccccttctgggcgtcgcggtcgatgcccgaggaagtgcaggccacgtcgtatttcgccgcatcggcaagtatctccagtttgtcgatcagttccatacgcacgcccgttcgccagatcaagtgttcgcgagaatatctgttcgcttagtatgggcgaacggatattcgttgtcaagatgggggatgcttcttcccgaaacggacaggatgtcgtacaatacgcaggcacgacaattcttatgccagtgtggcgcaatggtagcgcaacagttttgtaaactgtgggttgcaggttcgagtcctgtcactggctccaggaaacagcaggccggaggcgcacagcccccggcctttttcgtcgccgtgcggctcgaggggtgcgggtggctgcggtctgcccgggtcggcttgcacggctgcggtcggcccgggcatggctcgcttggcaggcccggctggggcgggcgatgcccgggccggggccgtctcgtcgcggcctgcgatgcgccagcgctgccgttagcgcaggcgcgctcccaccaggcgcttgaaggcggcggcgttgtcgggcgacacgttgatggcgcgcacggggcggcgcgttccggcgagcgtgcggacctccaggggctcggagagctcgatccaacagggcggggcgcccatgacgcccaggtcgaggcgctcgcgcttggggacgtcgggcgcggcggcacccacgccggtcacgaggcgcagcggcacgtcctcgcagacgaaggcggcccagcgcacggtgagcgtctcgtcgtccacgagcagcgggttcagcacgctggcgcgcgcggcggccacgagccacagaagggcgtacaaggaggcggcgaacagcggcggcagcagcgagaacgtgccggccgaccccgccgccgcggagaccgccagcggcgagagcagccccggcgcggccagctgggacgccgcgaggtaccccgcccacaccaccggcagcacggccaggggcgtgaggccgcggcggcgcaccaccagcaggtagaacgcggcgggcacgcacaccatgaggtcgaacggcacggccacgttcacggcgaacgcgtgggccgaggcgggcacggtggccgcgcacgccaggtcgacggcgtagagcgccaggacgacggcgagcgccagcagcaggcggcgcgctccgagcgcgcggacgggagcggcggatgcggtgggttcggggaggttcgaagagcgggccatggcgtctcctgtcgtcggcgggagggcgtgtcgcgtgatacgggtccatgatagcagacgggcgaggagggggccgggccggctgccaccggaggagcgggcgggagggagcaggagggggaagggggctgggggtgcccctccccgtttcagccggtcgcaggggagggcggcagcgcgcgtcggtgggtgcagcgtgacatgccggccttgcgcgtcggtcgtgcccgtctgcctcgcatgcgaggcagacatggctcgggggcgccggcctcgcatgcgggcccggcgcgctacgggcttggcggctctcccaatgaaaaaacctcctcgaccccttctaaaaaatagtcaacggggtagcatgatctccaatccgttgaccgagcggtcaacggccgcagagcggcaggaagggaggcggcggcaatgagtgcaacggacgatagggagcatgcggacttcagcaagttcgagagcctccccgaacagcgacgcgaggctatcgtcaacgccgccgtggaaacgttcggtcgatgcgactacaaaagcgcttcgaccgaggacatcgcacggcgcgctggcatctcgaagggccttctgttcttctacttcaagaacaagaaggagctgtacctctacctcatggagcacctcatggagaaggtgtccgatctggtggtggacgacggattctacgagatcgacgatttcttcgatctgctcgtgtacgcagctgaaaccaagcgcaaggtgctttcgcgtttcccctacctgctggagttctccgtccgggccttctacccggagcacaaagacatcaaggacacgatggacagctggacgcagcggcaaatcgacctgatgttctccacgtacttcagatgcgtgcggtttgaccggttccgcgacgacatcgacccgaagtacgtgctcgacctgctgatttggctggctgacggctacctgcaccagcagcgcgccctgcatcagcgcctcgacatggatgcgatgctggacgagatgtaccgctggtgcgacatgctgaaagcctattcgtacaaggaggaataccgatgagcgcaacaatcggccccgcgattgcgatcgaggggctcaagaaagattacggaagcgggcgcggcgtgttcggcgtgtcgtttgccgtggagcggggcgaggtgttcggctttttgggaccgaacggcgccggcaagacggtgaccatgcgcaacctcatgggcttcatccgccccgatgagggaaccgtgagcatcagcggcctgaactgcttcagccagcgcgcccgcatccaggagcacctgggctacctgcccggcgaaatcgcctgcatggacgagatgaccggcgcggcgttcctggaattcatggcgcgcatgaagaagctgcgcgaccgcacgcgcatggagcagctgatcgagtacttcgagctggatcccgcgcggcgcattcgcaagatgtcgaagggcacgaagcagaaagtggggctggtctgcgcgttcatggcctcgcccgacatcgtcctgctcgacgagcccacgagcggcctcgaccccctcatgcagagccgcttcatcgacctcgtactggaagagaagcgccgcggcaccaccatcttgctatcgtcgcacctgttcgaggaggttgagcgcacgtgcgatcgggtggcgttcatccgcgggggcaagctggccgccgttgagcgcatggacgacgtgcggaagtcgcgcaagcgcctgttcgtcgtcacgttcgccgacgaggccgcgcgcgaccgctacgcggcggcccaccgcgacaccgacggctgcggcgaggcgggcttcagcgtgcagaagcaggggacgaccagcgtggaaacggccgtgtccggcaacctcgacgcgttcgtgaaggacctggccgcgtacgagatcgtcgatctcaccgcgcgcgagcagacgctcgaagagctgttcatgcacctgtacggcaccttcggcgacgcgtcgaaccgcaggtcggggttgaaaggaggctcccatgaataagacgctgttcgcgaaggagctgcgcgccaacctgttcgtcagcggcatcatcgccgcggtgctggctatgtacatcggcacgatcgtggcgatgtacgatcctaagctgggcgagagcctcgacctcatgatgcagagcatgcccgagctgttcgcggcattcggcatgtcgatgcaggccaccacgctgctcgagttcatgctcaactatttgtacgggttcctgctgaccatcttcatcctcgtgttgatcctcgtgatggtgaacaagctgatggtgcgttatctcgaccgcggagcgatggcataccttctggccacgcccaacagccgcacgcgcatcgcgttgacgatggtcggcgtgatggttgccatcctggtcggcctgtgcgcgttgaccacggcgctcgaggtgggtttcgccgaggcgctgttccccggcgacctcgacgtgcgggcgctcgtgcaggtgaacctggggttgttggcgttgtggctggctacggccgggctgtgcttcctgtcggcctgcctgttctccaattcgtcggcggcgctgtgggtgggcggcggcctctgcatcctgttcttcctcatgcagatggtgtcgcaggttggcgacaagttcgagttcctggagaacgtcaaccccttgacgctgttcgactactacggcttggccgcaggcgacgcttcggccatcgggggcgcgattgcgctggccgcgagcgcggtggcgctgttcgctgcggcagttgcggtgttcgaccggcgcgacttgagcatctagcaggttcgagggcgagacagggggggcgtgacagggggacggggataatgtctcattccgcgatgcggcaaggcttcggcagacgtattggaatgagacattatccccgtccccctgtcacgccccccccctgtctcgcccaggcgaagctctccgtgccggcgcccacctcgaagtggtattttgcgatgcccaggtccacggcggtgtaggcaccggagagggtttgggcgcgcaccgtcttgccgtcgagcagcagctcgaagcggaacttctgctggttcagggccgtgggggcgagcagtgccgcccgcacgccgcgttcgaaccactccggcggcttcccggccgcacggctcacgtcctcgggtgccttcgacttgcgcggtctgccctgcgtggcgccgtagccgagcgccagcgcgcagaccagcctctcttccggcccggcgaggcggcggacctgccgcttgctgaacgtgagggctgcccagcacgtgttcagcccgagcgcctgggccgcgagcacgaggcgctcgccgtagtagcccgcgcgctcgtccaggttgtcggccgtcttcccgatgatcgccacgtaattgcgcacgttggcaaacttcccgtagcgcgccagcatgctggagaacgcccgcggctcgtcgagcacgacctgcatgcgcaggccgccctcgcggttgcaggcgtccagctcgtcgcatagtgcggcgagcaccgggccctcgatacgttggccggtgaagctgcgcaccgagtggcggcgctccatcgcctcctcgacggtgcagagggggagggcgccgcctgagggggtcgtgcgatcctcgcacgccgcggcgttctcatgcgctctcccgggcatgtcctcgtcttcgcgggcgccgccgggccctccttcgaccttctccataatgccgcgctccttctgctcgtgcgggttcgttgtcatcgctgcaccttgccttcgctgtcttgcaggtagccttcgaggttggcctgctgtaccagctcgtagacgcggtcgacgagctgcttgagttgcgcccactgcgcgtcgtcggcggcaatgtggtagaagttcatggtgcccgcgcgccgaagggcgatgatgttcgcgtcgcgcaggatcttcaggtggtgcgacacggcggggcgggagaggtgcgtgcgcaccgtgatctcgcccacgcgcaagccgcactcctcggcctccaacagcgccatgatgatctgctggcgcgtctcgtcgcccagagccccgatgatgccccggcacttcttgaacccctctgcgaggtccagcctgctctgcgcccattcgcgttcgtccatcgatgatccttcgtccatcgcgtcttatacggttcgattgttcgaaccattaaaccatgaagaggcggctcgcaaggcggggggaggctggcgttttcccttgggaaagaaattcgagacggaggccgtggccctccggttccgccctggctcttaccgccgagtgccccgtggccgctggtgcgcgccgccgaccccttaccgccggcgcttgcaccggccgtcgcgcatgacgcgcgggcattcgtttcgctacgggtcgatgcgggcgattgcgccggggtgccgggcatggttgcatgggcgcatgggatttcgcaagacatacgtggacgtggtggcgaacatcgacgtggacgggcgcgtgacgccgctgtccatccgatggcgcgacggccggacgttcgagatcgaccgggtgcacgaggccatccggcgcgcgtccacccgggtgggcggcacggggatacgctacctggtgacggttcacggccgcgacaagtacctgttcttcgaggacccgcgctggttcgtggaagaggtcgtacccgaggacgaggggagcgcgtcgcttgcgggcggggcccgcaagcggtagaatgcctgcgggaatgaggttctccctaagctactcgaaggcttgaaccgcgtaaagctgatgacttctgcaaacggactccccatgggggagcgcccgcgcgcgggtcgtcggcttttttcatgccgcgcggctagcgggggggtgtcggaaaggacgggatatggcagcggtgctctgggtgggcgccggcgggtttctgggcgccgtcgggcgctacctgctggggctcgtgcccttcgagggggacttcccccttatgacgttcctcgtgaacttcgccggtgcggtggccatcggcgcgataaccgaggtggcgggtgccacgtcggccctgtcggccgaggcggcgctcttcttgaagacgggcgtgtgcggcggcttcaccacgttctccacgttctcgctggagacgctcgcgctgttcgagggcggcaagtacgcgacggccgcgctctacgccggcggcagccttgttgcctgcgtgttgggcgtagcggcgggcaagcttgccgtgcgcggcgcgctgtcgctcgtgcagctcatcggcgcacagggcgcctgacggagcggaaggcgcgttggacgcgcggccggccggcgcgcttcacgtcgtatcgccggcctcctgggcctccacgatgtcgatgagctcctgctgcgagtgaatgcccatcttctggtagatgtggtaggtgtgcgtcttgacggtgcgctcggccacgtagagctggtcggcgatatggcgcgcgttgcgccccttcaccaggtagaacagtatctctccctcgcgtggggtaaggttgaaggcgcgggtcgcctcggcgcatttgtgcttgtaatgctgctccaccaccgcctcggggtcggtctcgggctcggacatcggggcgggaggcgcctcgacgggctcgggctcctcggccacgatggcgtactggtcgggcctgacggtggcgaccacgatgtaggcgcataccagcatgatgaggaccatggccgccacggtgagccagcccttgccgaagtccgtggccacgaacgcgccggcgaaccagccgagtgcctggccgaggacgatgaagaagcgtcctctcgcgaagcagtagcacggtgagatggacagcagcgtgccgcgcagcgacagcaccgaggcgttcgtgtagtccagcaggtacaggatgacgaagagcggcggcgcggcgacggtgttccaaggcgcctgcaggaacccggagaggatgagcccgcacacgaggaagggcaagagcacgagctgcacccttcccatggcaaggagccggggcgccttccggctcaggagcaggaaaataagcgcgacgcagacgaacgccgcgcccatggtgatgggcggcaggacgcccttgctgattcgcgcgacgacgagccctgctatcacgccgcacattatgccgtcgaccagcatgatgtaggagccgttcgggctgtaccggctcgtctccgccagccagcgctcgtcgcgctcgctcgtgagctcggtcgtgctcggcggtgaggctgcgagaagcgcgaacgagctcgcgcacagcagcaggaacgccgtgatggcggcagggccgggcatggccaagacgccggccacgatgcatcctgccagtccgaacgaccataggttggctgcgcggatgcgctcctcgccaagcgagctgcgcacgtccgcccagacgcacgagaagtaggcgcccgaggcgccgaacacggcccagagcgcgaactggagtaccaggggaagtgcgaacgcgagcaccgtctcgagcaggacgatgccgggcaacagcagctgcagggccaggaagccggttcgcacccggttggaggagacgagctcgttgcgacccttgcagcgcgtgatgacgaagtagaagcctgccatggcggcgaacatcgtgccgtgggtgaggccgtgcatgacgggcgtgttggttgcgaccgtggccagcagcgggctgaaggcggcaagcagcacggacgcggtgaagagcgtgaaccccgcgatccccgccagctcccgctcgctgtagcggttcgcctttcgatttgcatgccccttggtggtttcggccatggtcgcgtatcccccctgattccacgtacccatgcgaaagccggcgcgcggctcggcttgggagggcccgccctccgatgcgctgctccgcaggtttcggatatatcgtattctatcgcgtgcggtatgctatcgagagtacgttttctcgtttcgatgccgccggagccgatttaatcctctgagtagcaagacaaaaaccgtccccgtggcaatcatggccaagcgacgggcggatgccctgcggcgcgcgaggggcgcggtcgcaggcgcggcctccgtcggtccggcggcagggcccgtgccgcgttgtgctcggcgacgcaagcggccctcggcgtaaaggggaaggcgccatgagagagacgtttcgcaggttcttcgcctatttcaggatcgagcacgcgctcgtgctcgtgcccgtgttcgggttcgcggtgtacgacagcgtgttctcggcgttctcgtcgattctcggcgtgctgggcgacgcgtatccggacgtgccgcgcacgatggtgcagatggtgctctcggtgccgcccctggtgagcatccccggaacgctgttctcggggttcctgtcctcgtacgtgcgcaagaagcgcatcgcggagttcgcgctggcggtgctgttcgtcgggggcatgatccccgcagtcttgcccgagcccagcatctacgccctattcgcgtgcagcgcctgcgtgggtctcgggcaggggctcctgcaccccatggcgaacgctttcatctgccagacctgggacgacgacggcgagcgcagtcgcgctctcgggttcaagcaggcgttcaacttcattggggaggcgctggtcgccctgctcgtggggttcttggcgctttcccattggggcaacgcgttcctcgtgtacctgggtgtgatacccgtgttcatcgtagcccatatcgcgcttcccgagggcggcctagacaagcggcttgtcggcgggaagggccgtgcggccggcttgaaggaggtgttcaagccccgcgccgtctacctgttcgccctgttcttcttcgccatgatgttcctgttcggcttccacaccaatatcgccatgctggtgcaggagcgcggcctgggcacgacggccgacgtgtcggtggtggcctcgtcggtgagcgtcgtgtccttccttgtgggcatcgcatatgggaaggtgtcgaagacgttcggcccttccacgctgtgcatcgggttcgggtgcctctccgcgggaatgctcgccgtggcggcgttcggctacagctttccggtgatcatggcgggcggggtgctgttcggcatcggatcaggcatccagcagatcagcaccatctactacatctcgaagacggtggacaagagcgtggtgaccatggccatctcggtgctggtctcgttcgtctcgctcggcgccaccttgtcgccgctcgttatcaacggcctgcaggtgctcgtgtggggtgcggaatcggcagcgggctcgctcgccgtggccggatgcggcttcgcggcgctcgtcgcggtggaggcgatgtcctcccgacgcaagagaggggcgggccggcagggaaaaggtgctgggcgcggctaatacccagagtatcgcaccccgttggaacagtttcaaaccgccagttcagagcatgatttccaggttaatacccagcagcagatgcgtcggcgccgccaagcggggaaactcgtcggcatcgaagccgccgcgggccaaatgggccgagacgcggcggggtcgaaggatgaaggagggcctcggggaggttggcggcccgagggagttgcgaggaaggaaggttcatatggcagatcaggagttgctcgcccggtatgcgccgacgatcgattcgccggagacgaaggaggcttacctgctcgacagcgagctgtacattcgccacgagttccgcgacccggccgagctccaaacgcgcatgacctaccaccgggtgggggaggacaacgtcgtgtcgaacgacaaccttgtcatgctgggcgtgtgggcgcgcgcccagaagcagggcgagcaggtgaagtgatacgagagcgaacgctggaaggagaattgcatgagagagtgcttcgatcctcaaatctacaagaaggattggcagtaccaggaaggggacctcaccgtcacgcgcacgtgccaatggtcggctcccggctgccaccaggggtgcagcatcctgttctacaccgacaaggagggcaagctcgtcaaggtggagggcgacccgaattcgccggtgacggacggccgcctgtgcatgcgctgcctggccatggtggaggccgtgtaccatcccgaccgcatcatccatccgctgaagcgcgcccgcgaagaccgcggcaaggacaagtgggagcgcatcaccatggacgaggcgtacgagctgtgcgtcgagatggtgaaggacaccaccgagaagtacggcgcgaagtccatctgcaccggcgcgggcacgggccgcaacgccacctggcagtccaacgtgctggggcagggcgccttcggcacgccgaatgacaactgcggcctgctcgcgggcaactgctgctacacgccgcgcatgcagggcatgaacgcggtcttgggtgacacgttcatcgccgactgcggacagctcaacgaggcgcgcttcgaccaccccgactaccggcgccccgacctgttcatcatctggggcaacaacccgctgcgcgccaacgccgacggcttctacgggcactggatcatcgactgcatgcgccgcggctcggagctgttcgtggtcgacccgcaggtgacgtggctctcggcgcatgccaagctctacgtgcaggtgcgccccggcaccgacgcggcgctcgcgctggccatcgggcacgtgatggtggaggaggggctctacgacaaggagttcgtggagtgctggtgctacggcttcgacgagtacaaggagcgcgtgagcgactggacgcccgagcgcgccgcggagatctgctggtgcgagcctgagaagatctacgaggcagcgcgcctcatcggcaccgccggcgtgaccacgctgcagtggggcgtggccttcgaccagacgaagtgggcgaacggcacggcgcatgcggccgtggccgtgcaggcgcttaccggcaacatcgacaaccctggcggcttcgttggcatcaacttcggctacgtgcagtccgacatccgcgagaacattgccaagagcctgccgaacgtgcgcgagggccgcttgggcgatgacggcaactggggcctcatgaacgccgtgggcaagggcggccatgccatccccgaggctatcctcgacgcagccgagacaggggtgccgtatccggtgaagatgctgttcatgtgctccacgacggcgttcaccaacatggccggccaggcgcggcgcgtgtacgacgtgtacaaggacatggaccatgtggtggtgtgcgacctgttcatgactcccaccgccatggccatcggcgacctgttcatccctatggccatgggctgcgagcgcaacggcgtgcgcggctggtacacgcccctgcgctccatcgtgaaggtcacgcagaccggcgacgccgtgggcgacgagcagatgatgctcgagctcggcaagaagatgaaccccgacctgttctattgggacgacgtgcccgagatgctggagttctgcacgaacaacatggccacggttcccatccatatcacgttcagcgagctgcgcgagaaggtgatcgtgtaccccgagttcgagtactacaagtacaagacgggcaagctccgcttcgacggcaaccccgggttcaacacgctgtccgggcgcgtggagctgttctgcaacatgtacaacaacgtgggcatggacccgcttccctacttcaaggagccgcccgagagccccgagagcacgcccgagctgttcgccgagtacccgctcgtgctcacgaccgggcgccgctgctgggagtacttccattccgagcatcgtcagctgcgctccatgcgcgagttccacaagtggccgatgtttgccatcaacccggccgacgccgaggcggcgggcatcaaggagggcgactgggccgtcatcgagaacgcgcacggcaaggccatcgaggtggcccatgtcaccgacaccatcatgaagggcgtggtgagcgccgagcacggctggtggttccccgagcgcgacaaggaggagccgtcgctttacggggtgtgggagtccaacatcaactgcctcaccgtgcagggggacttcggcccgagcggctacggctcgtcgtacaagacccagctctgccgtgtctacccggcgccggagggatacggggccgagttcgagaggatgtacgcggaacaccacaacctgtaggcgccgccatactaaggaaaggagatgggacgcatggcacaacatggtcttttgatcgattacgagttctgcacgggctgccacgcctgcgagatggcatgcaaagtggagaagggcctgggcgagggcgagtggggcatcaagctcgcccagatagggccttggaagctggacggcgacgcgtgggaatgggactacgtcccgctgcccacccagcgctgcgacctgtgcgcggagcgcgtggcggcgggcaaggtcccggcgtgcgtgcaccactgccagtcgctggcgatggagttcggcccggtggacgagcttgccaagaaagcggtcaagccgcgcatggcgctgttcacggttcggtaggggattatgcccccgcggtgcaccgggagggcgcgccgcgggggccggcatacggcaaagggggtttcgcatgagcgagaaggtttcacagctaggggaccgggcggtttcggccatccagaacaacgttgggcaggcgctcggcctgatatacggcctcggcatgctcacctggacggcgttcaaccagatgaacagcaactactggtcgtatttccttaccgagatctgcggcttggagcccaccgtcatgggcaccgtgaaggcggtcacgggcgtgggcgagtggttcttcgtcatcatagccgccatcatcatcgagcgcgtgtggctcaagcacggccagtaccgcagctggcttctggtggcgccgccggcgacgttcgtctgcctgctcatgacgttcgtcgatcccgtgttcctggacatgggcgccaagacggcttggatgatcttcttccagatcgtgggcgggttcttctccagcttcttcatgatagccgccacgtccatcgtaccggttatcagccggaccgaggccgaccgcacgctgctctcgcagcgcaaggcgcagggcaacatgctggtgaaggtgctgttcgccgccatatcgctgccggctatcctggccatcaacggcctcgtgtaccgcgtgcccgccggcgagaacgcccagaacgcaggaccggccggattcacggtgctggcgctggtgttcggcatcattatgatcgtcatgttcgtggtcatgtacaagcgtatcgacggcatggaccccacgcagaagatatgcgaggagcgcgctgcggccaagaagcgcggcgagaaggtgccgcccctcgccgccgacgagaaggtgggcctgggcgagatgctcaagtactggctcacgaaccttccggccgtcatcggcctgttcgccgagatcatccgcttcgtggcgcagatgaccatccagagcatggccatgtacgtgttcacctacgcgttcggcgacgtggccatggcggccgtcatgctcacggcgtgcaacgtcacgggcctcgtggccacgttcgtgtccgagcccgtcgcccgcaaggtgggcatccgcgccacgtacctggtgggcatcggggtgtcgttcgcgttctccgtcgtgtgcctcttcgtgggcgcgtcgagcatgatggccttcatcgtgtgcatttgcggcatctacttcggcatgaacttcatgaacggcaccatgatgggcatgcagtccaacgccatcgcctacggcgagtggcgcgacggcaagaccgccaaggcgttcatcatgtccacgttccagtggtgcccgaagatcgccaacgcggtggccggcctgctcacaggcttcggcttggccgccatcggattcgtgtcgggcatggaggcgtcgcccgagctcgcacagggcatggtgaacatcatctgcctcatccctgccgtgtgcttcggcgtggcgttcgcggccttcttcttcggctaccgtctgacaccgaagaagatggagcagatcgccgtcgacctcgctgcccgcgaggctgaaaagggcgcggacggcaagtagccggccgccgattgactacaaccgggcgggccgcaaacagcgcgcttgcggcggggaccgagcgtcccagccggcgacctgcgccgtggcgagtggctgcggacggcccgtccctaacggaaaagaggactcacatgtgcttcagaccagctgccatcagcatggacaagacgtgtcccgcctgcggcgcgaccaacgacttcaataacgagaactgcgaccagtgcggcgcgacgctgccgagtgccccgcccatcgcgggcatgccgggggcgcccggggcgccaggtgcccccggagcgccagctgccccgaaagccccggcggcgccgggagcccctgcggccccgaaggcccctgcggccgagtagcgccgaagacgcagccaaggacgggagcgagccatggacttcaagaaactcgagagggcggacgatgaggcgaccggcgcggtagaggttgccgtcgtgctggacgccgcagaggtgcaccgacagctggcggaattctacggcgcggtgggcgcggcgtgcaagctgccgtccgatgcgcagtgggatgacgtggacgccgccggcgcgcgcacgatgccgccggaggactaccgcgaggtgcggcgcgacttcgtggtcaaccgagcggcgggcgaggcgctcgcggcgctcggcatcgagccggcgctcacgccgagcgtccgcgccacggcgtacccggacgcgggcgaggacttcgccttcgagctgtccgcagtggagaggccggcactttcgctgtcgtcggcggaccccgtggagatcgaggcggaggatgtccgggtgaccggcgagctggtcgatgcccgcatcgcagagctcatggaggcgcgcgcgaagttcctgccggccgacccgcacccggttgtgctcggcgacgtcgtgagcgtcgacgtggccacgttcttggaagggcggccggtgccgcgcctcacgggcaagagcatggtgctcgaactggcggacggctccatgcccgaatccttcgtcgagcggctcgtgggcatggacgtgggccagacgcgcactttcgactacgaggtgccgcggccgcgagccctcggcgacggcgacgtggagtgctacacggccacggtcacggttctcggccagctgcacaaggaagtgccggccctcaccgacgcgtgggtcgccgaaagcatagagggcgcctccacggcggcggagtttcgggctgcggtggcccgcggcctcgaggccgaggcaacgctgttcaaccgcgacgcgcatgcccgcctggcgaacatcgagctggagaagcgcctgcaaggggttattcccgacgcgttctaccaagcctcgcgggacggcctgcgccgctcgctcgaacgcgagctggccggcaagggccagacgatcgacgactactacgagcaggagcgcatgaacgaggaggagctctccgtgcagctgctcatcaagtcgggcgagaacctgcgccagggcttcgcgctggaggccctgttcgacgcacgcggcatggagcttgccgaggatgaccttcggcttgcgtgcgaggaggcgttcggcgccgggtcgtacgacccggaaacgctcgagcgcacggggaggcgccgtgtggtggaggatgccgcgaagcgcatcgccgccctcaactggctcgccgacacggcggtcgtgaagggctgaccggtcatggagcgctgctacgtgtgcaaccactgcgggaaatgcgacgagagggaatggggtatcgccccaccgccgcccgtctgcctcgactgcgggcatgtcgtggagccgggcgagagccccgtccgctgcgccgtgtgcggcagcgggctcatcgaggcggccgaccgggccgcatcgcccgggcccggcggcgcgcagccctccgtcggcccgcgcaaccagggaaaccgcttcgccaacgggcggagcgcaacagagaggagagagcatgagtgagttgacccgcgtgtccgagacgcctcgcgtcacggagctcgaggacgggacgaaggtgtaccgcacggcccagtggtcgcccccgggctgtcacggcgtcggctgcggcctgaaggcgttcgtcaaggacggcaagttggtgaaggtggaaggagaccccgaccagcccatcacgaacgggcgcctctgcgtgcgttgcctgacgctgcccgagtacctctaccacgaggaccgtctcctgcatcccatgaagcgcgatcgcgcgtaccgcggccagcccgacaagtgggagcgcatctcgtgggacgaggcgtacgatatcatcgtggagaagtaccgcgagcttaccgagaagtacggccccgacacggtgtcagtttggacgggcaccggccgcgaggccagcgcgtaccagttccaaacgtgcaaccaggtgttccacagccggacggccatccacgccaacggcggctggtcgtgcgtcattccgcgccagaccgccatggactggcttctgggctgcgcctacgtggagtacgacggcgccttcggcttcaaggaccgctacgacgacccgcgctacgagctgccccgctacatgctcgtgtggggccgcgacacgctgtggtcgaacccggacggcctgttcgggcacagcacggttgacatgatgaagcgcggcatgaaggtcatcgtggtcgacccccgcgccaactggctcgcccgccacgccgcctaccatttccagatccggcccggcaccgacgcggcgctcgccatggcattcaacgcggtcatcatcaaagaggacctctacgaccacgatttcgtggagaaatggacgtacggcttcgacgagtacgcggaacgctgctgcaccatgacgcccgagagggccgccgagatctgcgaggtgccggtcgaggacatctacgccgccgcccgctgccttgcgcagaagccgtgcacggcgtcggtgggtctcaagaccgaccagaaccccaacacgctccagatttgccatgccatctggggtattttcgccatctgcggcaacctggacaacccgggcggcatcaagctgggacagaccatgctcaacggcggctccacgggccgcaagggcgtgggcatgctggtggaggaagaggacacgaaccctatccccatcgccggccacgaccagtatccggctatggacttcatcatcaacaccacgcagcccgactgcacgttggacacgctgcgcacgaacatcccgtacccgatagagttcctgttcatccagagctcgaacttcatctcgtcgtgcatcacccagcagcccatgcagtggatggaggcatgccgccacaaggagttcgtggtggccaccgacatcttcatgaaccccactatccaggcgctcgccgacgtggtgcttccggtgtccacctcgctcgagcacgagggcatcgtcacgtttcacggctgcaaccagcccggccagttccatgcgctcacgaaggtgctcgagccgctcggcgagtgcaagtccgacctggagatcatgctcgacctcgaccaccgcatcaaccccgaccgcaccgaggacgccgagaagtggtcgagcccgcacgcgtacctggacaacaagatccagaacataccctacacggccgaccccgacacgggcgaggacatgacctacgaaacgctgcgcgaatgggtgtacggccgctacgagattccctactaccagtacgaactggggttgttgcgcgccgacggcaagccgggcttcaaatcgcccaccgggcgcgtggagctgtggagcacggtgaagcagcacctgggcgaggatccgctgccctactacgaggagccgcgcttctccaagcgctcgcgccccgaatggatcgacgagtacccgctcgacttcgtcacgggcgcccgccgtcccacgtcgttccacaccgagcaccgcatgatcgattcgctgcgcgagatacgcaccgcagccacggtggagatccaccccgccaccgccgagaagcacggcatcggccagggcgactgggtgaccatcgagaacccctgggggaagtgccagatggttgccgacatcacgcccatcgtgaaggagggcgtcatcgggtgcgaccacggatggtggtacccggaggacaaggacgccgagctgttcagcgtgcgcaagtcgtccatcaactcgctcatgccgtggaaggagatcgggaagctgggcctgggctcccactacggagcgctgccctgcaagatctaccggaccgaaaactagcctggaagggaggtattgatatggccacctatggactgatgatagacaacgagtactgcaccggctgccacacctgcgagatcgcctgccgcaacgagctgggcctgcccttggggcaatggggcatcaagcttttggagatggggccgtggcgcaagaccgacggcacctgggagggtaagtacgtccccgtgcccaccacctcgtgcaacctgtgcgagggccgcgttgccgcgggcggggagccctcgtgcgcgctgcactgtctagctaacgccatcgagtacggcacgctcgaggagctggccgtgaagatggccgaacgcggggcgcagtgctcggtgttcctgccgtaagcacttggagccgggcgcgaggcactcggccggaaacagctgcgcccggctcttctcctgcttgatcggcgccggtgcctggtgcgcacgttttgaacttggctcggcaccggtttccggctttggaagccaggggttgctgcaagaggaggggggagggcatggggagcgcgaagctgtggaacacgaggttcgcgcagctgttctgcatcgaggcaacgctgcagttcgggctgtaccttacgcgacccctcatcgcgggttatgcggtttcgttgggagcgtccctgactttggcgggtttcctcgcggggcttctcgccgcagcggctctcgctgcaaggccggcgagcggcatcgttgctgacaggctggggaaaaaggacctgctctcggtatcctgcgggctcttcgcggtctcggctttggggtgcgccctgttccggtcgatcccgctcatggcgctcttcctgaccctgcaggggttcgccttcgccttcaaatcgaccgtcgtcgtctcgctcgcatcgcttgtggttcccgaggagagggtgggaagcggagtggggtggctgggggtagcctacacgatagcctgcgccctgggtcctgcgttcggctcgctcgtcggcgacatggcaggctatgcgggcgccttcgccacctcgggggctctgctttcagcggggttcgtcatggcggtactgttcaagacgcctcccgctgcagaggttcgcgcatcgtcgggcgggcggcttcgcggaaagccctccgattggctctacggccccgcgctgccgctttccgcgatagccggcctgctgatggtggcgcagggcgtgacgtcgtcgtttgtgctcgtagtgggcgaaatgcgcggcatcgagggtgcgcccctgtattttctgctttactccttggcaacggcgacggcgcgacctttggcagggcgcatcagcgatgcgcgcggcgtccatgcggtggcggttcccatgatgatgctcgccgcattcgggatgctggcggcggcgttcgtggattcgttcgcgggcatcgccgcggcgggagtgtgcatgggggcggggcagggatccgcgtactgcgccctgcaggccgagtcggtgcgcggggtttctaaggatcgagttgggcgcgctgcgaacacgttctatctcggaccggatctctgcatgggcttgggccccgttctgggaggtttcgtactgcaggcggcgggggcggcggccctgttcctgttcaacgcgacggccgtcctgacaggcttggggctgctcgtcgtttgcggaaggcggcgtgccgacagcgcctcttgacggcagccgtgcagccacgctccgtcggctgcgaaggctgccgcgccccctcatgctcccgtcccttaagcgttccttaaccggcgctgaagttgcggctacggttggcgcgcgcggggtggggcgggggccgcagggcggtacgcttcttcctgccccggttgcgcgcaccggggcgcaaccgggcggaagcggagaaggagcggccttatggagcagtcaaaggcttgcgggtgtgcaggcaaggcggcgggcagggcggacggccctgcgagggacggcgaacgcgacggcgggcgccgcggcgcgaccgaccgcgggctgggacgcggcgccgggcacggggcaggtggcgtggcggacggccttccgggtatcgccgcaccgccggccgttccagatggaacggccggcggggttcttgggaagccgggcgctcaccgggtgcctcttcgcggtctatctggcgttcttggcatggatcgtgctgcttaaagggcagttctcgcttgacgtggcaggcacgatgcgcagcgtgaacctggtgccgttggcgggcgcgacggtcatcaacggcgcggccgactaccgcgaggccgtggagaacctggtggcgttcgtgccgttcgggctgtacctgggcatgctcgcagggcgccagccgctttggcggggcatcgcggccgtggcggccgtgagcctgggcttcgaggtattgcagttcgcgttcgccatgggggcgtcggacgtcaccgacctgatcgcgaacacggcgggcggcgcgctggggctgggcctctacgcgctcgcgcgccgcgccttccgctcggacgggcgcgcgctgcgctggtgcaacgccgcggggcttgcctgcacgctgctcgtcctggcgctgacggccctgctcgtggcggcgaacggatagtgaggcgacctgggtctgcccgggatgaacgacagggggagcgcaccatgcgctccccctgtcgttcatcccgatggccgtctttcgcttcgttcggcctgacggccgcacctgcgggagggcggggctacttcgcgccgtactgctcgtagtaggcgtccagcgcagccttcacctcgtcgtcgatgaccacgcggccctggcactcgcggttcagcaggtgctccgtgacttcggccatgtccacgatggacgcgcatgcgaagccgtagcgctcgcgcacctcgtcgagcgcgcagatttcgccgccctttccgacttccatgcggttgagcgacaccatgaggcccaccacctccacgttcgcctgctgcatgaggatggggtgcgtctcctcgatggacttgcccgacgtggtcacgtcctccacgatgaccacgcggtcgccgtcatgaagcgccgagcccagcaggatgcccgtgtcgccgtggtccttgacctccttgcggttcgagcagtagcgcgcctccttgccgtagagctccgagagcgccatcgtggtgatcacggaaagcgggatgcccttgtacgccgggccgaacaccacgtcgaagtccaggccgaacgcgtcgtggatggcgcgggcgtagaactggcccaggcggtggagctgcgagcccgtcacgtaggcgcccgcgttcatgaagaagggggacttccggccgctcttcagcgtgaagtcgccgaacttgagcacgtcgctctccaccatgaactcgatgaactcctgcttgtaggcctccatgggcgctcccttcctcccgcgtgcggcaccatgccgcacgcgcgcgttccgtcgtgcaaccatgatacaagaacgcggcccgctccgcgtctattcgcgaaaaactacaataggagtcattgacaactattagattacgtcatacagtaagggcggtctgaaacacaggaaggcgcgcccggcatcccacccccaagggatgccgggcgcgcctcgttcgtgcgagctggacctgctcttcgccttgccgttccaggtgccgtgctacgcgtgcgcaactcctttccgacgccggtgcgttcgacgacggggatccgtcccggttctgcctcgaggcgaacgactgcgaccccggcatacgcttccggtcctggctggccgggggcggcgccaaacctctcctgcgccgccgccgcgcccgggcgttccggttgtcgattttttctcccgattgccatgcgcgcccgtcaacgcctggttgaaaggccatactgccagtggcgcgctattgccaagggggtgcgcaagcgacgatgaagggcgaggggagccctccgtcgaaccgtgaggcttggcaggctggggggatgggcatgaacccgcttttcgacaaggcgatcgcatacgtttccgagacggtgcggctgttctactccggcaaggacgtggagcgcgtggtcggccgcttcgccgacggcttctcctggatcggcgccggcgaggtcgagttctccaccgattccgagggaatcgtgtcgtacctgttggagcgcgccccgctcgcgccgccatgcgaggtgtcggacgaggacttccgcctggtgaacgtgggggagcgctcctgcacggtcatggggcgctaccgggtgcgcacgagcgcggactcgggcctggtgctggaggagcgccaacgctgcagctacgagctggtggacgagggcggcgagctgaggatcgggcacgtccacgtgtcgaacccctaccaggccatgaaggacgaggagttcttccccttcgaggccggccggcaaagctacgagtacctgcagcagctggtgcgcgagaaaaccgagaccatcgacctcataacggcgaacatcgccggcggcctgaaggtgagcgaggacgccgagccctaccggctggtgtacgtgaacgagggcctggcgcgcatgctgggctacaccaccgaggaattcatggccatgagcgggggcacggcctccggcatcgtgtacccgcccgaccttgaccaggcgctcgcggacgtgcgccgctgcttcgcgcaggggtcgtcgtacgagacggagtaccgcgtgcgcaagaagaacggcgagctggtgtggatcatggactcgggtcgcaagatggaggccgccgacgggtccgtgaagatcagcagcctgctcatggacatcacgtcgcgcaagcgtgccgagcaggcgctgctgctcgagcaggagcgttaccgcatagcgctgcgcagcgtgaccgacgttctgttcgagtacgacgtggagcaggacgcgctcatagagttcgagcgcggcgtcgcgactgcggacggggctccgcccgaggagcgccgctacccgcgctacaccgcgtccgcggagtcggggcgcatccaccccgacgacttccgccgcctgtccgaggcgctgcgcgacgacggctccaccacgatggaggtgcgccaccgcgttgccgggggcggcgacgcgtggcgctgggtgcgcatgcatgccctcatgctgcgaaacgccgagggaaggcccgtgcgcaccatcggaagctggaaggacgttaccgaggagcgccgccgcatcgagcagctggtcgaccaggcgcgccgcgacccgctgacgaagctgctcaaccagggggcggccgccgagttggttgcgcagcagctgcctgcatgcgccgagcgcggaaccggcgccctgctggtggcggacatcgacgacttcaaggccgtcaacgacacatacggccatctggcgggcgacgacctgctggtgggtgcggcgggcgtgctggccgaggggctgcgcggcgaggagggcttcgccgcgcgcataggcggcgacgagttcgtgctgttcctgccgcacgccgacgcggaccgtgcgcgcaaggccggcgagcgcctcggccgggcggcgtcggcgctgcaggtgtcgggccggcaggtcacgctcagcgtgggcgtggcgctggcgggcgcggacggcgacgactacgagcatctcttcgccgccgccgaccgggcgctctacgacgccaagcgcgagggcaaggactgcacccgcttcgccggcggccgccgcccgtaaaagcagggcgcagtgccagcggggacgttcagttcgcgcccgaagtgttgtcggtcgtgcgccaacccagggaggactcggcgcgcacgaacacgttcgtgcgcgggtaataggtgaggatcacgaaaccgccggcgtccacgatctgctggagtacggcgcggtcctgctccttgatggacacgtacacgtgctcgttgccgaccccggtggtgaaatcgattacgaggtcggtggcgttgaaggcggcgccgcgacccgaggggcgctgctctttgaagccgttgagcatgcacgcttcctcgctggggccctcggcggcatccgcgatggcatcggcggcctgcatccttccgattatgccggcgaccaagccgaacgcgagcatgataaggacgatgccgaacggcttgaagtgatcgtacgtgcagcggtgcttccatcggtgccaccggtaccgcaccagcacggcgagggagatcagcatggtgatgcctgcggcgaccggcgcgcggccgagcgcggtgagggcgccgagggcgacgagccccgcgcccacgtagcacacgaggttgagcgcgatgacgcccgcctcgcgtgctgcctcgccccgcagcgtgcgccagccctcttcggtgcgggggcgtgagcgccaggggtcgcgcaggatcaccggcacgaagcaggccacgcccacgcccatggccacgaagccgagggccctgatgccgtagtcgatcacgccctggagtccgatcgaaggggagaattccccgtacatgagcacggcgaacccgccgaacagcagcgcgatcccgacgatgacgagggccttccacccccacgtgaaatcggcgcgcagaaagcccatgcggttcctccccccttccgagaacgaactcccattatagggcgccgcgtgcgcgcggcgattgtttcccctgcctttaacgaatctttaagaaccgggcgcatcctgggttcaggcaagagaaaggaaaggtctatgggaaacctactggaaacgaacgcgctcacgaagacgttcaagggacagacggcggtcgaccatgtgtcgctgcacgtgccggagggctcggtgtacggccttttggggccgaacggcgcggggaagtcgacgctgcttaaaatggtgtgcggcatgctgcgccccacgtcgggcagcatcgccttcgcggggcgcccgtggacgcgtgccgacctcgacggcatcggcgcgctcatcgagacgccgccgctctacgataacctcaccgcgcgcgagaacctgcgcgtgcgcacgacgctcttgggcgtgcccgagagccgcatcgacgaggcgttggccacggtggagctcgcccatacgggctcgaagcgcgcggggcagttctcgctcggcatgaagcagcgcctcggcatcgcgctcgcgctcgtgggcagcccgcgcctgctcatcctcgacgagccgacgaacggcctcgacccggtgggcatccaggagctgcgcgcgctcatccggtcgttcccggagcgcggcatcaccgtggtgctgtcgagccatatcttgaacgaagtggagcacgtggccgacctcgtcggcatcatcgtggagggccggctggcctttgaggcgccgctcggcgcgggcgtcgatttggagaggctgttcatggacgtgtgcatggggaaggcggtggcgtgatgggagctgcagcaggatcgtttccgaccgtgttcaaggcggaggtgctcaagggccgccgtggcgccccgcgcaaggtggcgctcatcgcgccgctgccgttctgcgtgctgggcgtgctgtcctcgggcgtgatcccgggcacgggtgccatcggcggcatcgcgacgtgcttgtggaactactggtacgcgctcatgatgccggtggccatcacgctcatctgcgcgtccatcgcgaacctcgacgcgcggcagaagctgcgcccggtgctcgggcttccgctgccgccggcgcgcacgtggtgggccaaggtggcctacgcgctcgcgctcgtactgggggcgaacctcgtcgtgctcgcctgctcgacggtgctcacggcgctcggcgccgaggggccgagcttcgccgaggggctggccgcggcggtcctgctgaccctcgccagctcgtggatggttcccgccgcgctcgcgctgaccctgcgcttcggcacgctcgccggcatcgcgattccggctttggcgcaggtgggcgtgggcatcgcgctgtggacgtcgggcgcgtggttcgcgtttcccccggccacgacgctgtgcgcggtagcgccgctcttgggcgtggcgccctcgggcgtgccgctcgaggcgggagacgcgctcggcaccttcggcggggacgccgtgctcggcatcgcggtggccctcgccctgttcgcggcgctcgccatcgccggggcggcgtggttctcgaagcgcgaggccgcatgatggcgcgggtgacgttcgcgcacgcgctgcgctcggaggctgcgcggctgcgccgctcgcccctcgtgtggctccatgcggtgctggcgacggtcctcggcgggctggcgggcgcgtacttcgcgttctcggcctgggactcgctcatggggaccgacgcgttcttccagctgctcggcgctggcgcgccgcttttggcgggcatctcgtgcgggctggcggccgacgcggagcagcgggcgggcgaggcggcgaacctcttgggcgtgtcgtcgcgcagaagcgcgctcgcggcgaagatcgtcgcgcttttggggctcggcctcgcggcggctgcctgggcggcagtgctgttctgcgcggccctcgcgctggccgggcgcccgatgccggagcttccggccctcgcgctggccgtgctgggcatcgcgctgggaagcgcgtgctcgtacgcgatcttcctgatcgtggcgctgaagtgggggcgcaacgcgtccatcggcctgggcgcgctcgggttcatcgccgccatggcgctgctcggcgggctggcgaacgggctggtgacgggaacgttttccggggcgctgggcgccgaggcggccgcgctcgtgccgttcgcgtggccgtcccgcctggcgacgctgcccctcgaggcgtccatcgcctcggcgatgggcgcggccggccaggcccgtgcgctcgcgtcggcctggacgacagtggcgctcgcgtgcgtcgtcgcgacggccgtcgtggcagccgcggtgctggcctgcgcaaaccgtttcgaaggccgccgcggtggcgaatgaggcatcgcccctcgcgcctcggttccgtcttccgtgcccgaccggcgccccgccgatccgcatagtcgcccgaaacacacgcaaaacggcctccaagcgtgtgttcggggcgactatgcggatcgggggcggcgggaagcgggcagtgagacgcggggcggcgggacgggtttgccgcctcatgctacactcgacgacgaaggaaaggagcgaagatggcgcggatactggcggtggacgacgagccggcgatcaggagcctgcttgagcgcacgctcggcaaggacggtcacgacgtgcgctgcgcggcatgcgccgaggaggcgctcgccgcgcatcccgagcgctacgacctcgtgctgctcgacgtgatgatgcccggcatggacggcttcgagctgtgccgcatcgtccgcgagcgcacggacgcgcccatcgtgttcctcacggcgaaagccgcggaggaggacgccgtgttcggcctcggcgtgggcgcggacgactacgtgcgcaagcccttcggcgcggccgagctgcgcgcgaaggtagccgcccacctgcggcgcgagaagcgggagcgcgtgtacgccctcgcgttcggcgacgtgcggctcgacctcgcggcgcgggagctgtacgtgggcgaggcgcgcgtggcgctgacgaagaccgagttcgacgtgtgcgagttcttggcgcgccaccccggccaggtgttctcgcgcgaccagatcgtcgaaggcgtgctgggttggggcgccgaaagcgacgcggccacgatctcggtgcacgtgagcaacgcgcgcgcgaagctgaaggcggcgggcgcggaacccgtgcagaccgtatggggggtggggtacaaatggatcgcgtgagcggaagcggaacccggcgcgcccgcgggcgcggtctgccgttgagcctggtcatcctgcgctacttcgcctacgtgctggcggctgccgtcgcgttggcgctagggacgtacctcgtgttcggcatcctcgtcggcacgggcgcggtgtatccggcgaactacggcgacacggcgctcgcggagacgtcggcgcgcctggctgagctgccgagcgacgatgctggggcgatcgacggcgccgtgccgtcgagctttcgctgggccctgttcgcgcaggacggcgcctacgtggccggcgatgcgcccgagcgcgcgcgggacgatctcaaggcggccgccttcgacgggctcgccatcgcctacggagggttgagcaccacgcgctacgagccggtggagctggccgacggctcggtgtgcgtgctgacgtacgactacatgccgcagttcgcttcgaaggggctgcgcgacgcgctgccgaacccgcagaacctgctgctgggagggttcgccgtgctggcggtgctcgtgctcgtgtccatagccgtgcgcgcggcgcgcgtgctgtcgcgcaagatggccccgcttgcggacgctgcgcgccgcatcgaggagcgcgacctcgatttcgaggtgggggcgtcgggcgtgcgcgagatcgacgacgtgctggacgcgatggacgagatgcgcgcctcgctcaagcgctcgctcgaggcgcaatggagaagcgagcaggcgcagcgcgagcagatcgctgcgctcgcgcacgacctcaagacgccgctcaccgtggtgcgcggcaacgtcgacctgctgctggaaggcgagctgtcggacgaggcgcgcccgtgcgcggccgatgcggccgagggcgcccgtcagatgggcacgtacctggccgcgctcatcgatgcgacgctcggcgacgccgcggcgttcgcgccggtcgaacgtccgctgcgtcccttgctcgagcggttgcgcgcgcaggccgaggcgcttgcggcgtgcggcggcgcgcagatggcgtggagcgagggcgcggggctgcccgaggcgctgcggatggacgacgcgctcgtggagcgcgctacgatgaacgtggtggcgaacgccgtggagcatgcgcccgccggctcgacggtggaggtgcgcgtgcgggcggacgaggcggcgggcgcgggcggcatgctcgcgatgagcgtggccgatgcggggcccggcttctctcccgaggcgctggagcgcgcctgcgagcgcttctaccagggcgatcccgctcgcaccgcgcgcgggcaccgcgggctggggctgcatgtggccgctcaggccgccgcccgccacggcggctcggtggagctggcgaaccgcgacgccgcggacggcggcgcttgcgtgacgctgcggtttccgctgggctagggtgcccgctcccatggtgcggagcgggcgccctgggcggccgagcgcccctttgcggcaggggcgttgcgtccggcgctacccggggtagaagccgtccttgtggagcttgaaccaggcatcggggttgtccttcgcgcccagctcgcgcagcacctcgcgcgcgaactcgagcgcggcgctgccgttcgccgtgaccacgccgcggtcggccaccgcctgcgcttccacgaagtgctcggcgccgcggtagtggggtgcgcactgctgcacgtactcgagcgtgttgcccgtgtgggcgcagtcgtcgaggaagccgtgctcggccagaaacgcggccgcgttgcagatgcctcccacgagcgccccttgctcccgcgcacggcggacgaggggctcaacggcgtcgatgccgctcgtcgggtcgagccaggggttgcctccgatgagcagcagggcggcgaattcctcggggacgtcgtccagcgcgtagtcgggcaccacggcgatgccgcccatcgagcgtttcggggcatggtcgggcgcgacggttttcacctcgaaggagtcggtttggttgagctcggcgcacacgtacgagctttcccagtcggcgaagccgtcgaacacgtagacgagcacggttttcttcggatgctgcatggtggatcctttccttagggggcggaacccatagtacgggggcaaccatgacagctgtatgtcatggttttcgaatatgtgcgagatcgcccaggaatccgcagagcctttgcacccaggcggcgtcgtcggtgcggaagcgcgcgacgccggcggcttcgtccgctccgcgttcgaggaagcgcgcgtcgatggtttcgacgagggcgaactcgttggccgcgtcgtagtcgagctccacgaggaaggtgcccggaacgtcctcgtcgggcggcagcagcagcggggcgtgcggggcggaaagggcgagcgccggggtgttgcgcggttcgaacgtttcgcccaacacctcgagagcggcgattcgtttgagcttgaacaggcgaaacgcctcgcgttctcggcagaaggcgtggaggtaccagctcgattgcttgtagacgagccgcgccggctccacggtgcgcgcgctgcgccccgaccgcgcgatgtactcgatccgcgcgcagcgccgctcgcgcacggcgtcgagcagaagggcgagcttctcttgcgcgatgccgtcggcgaaccacgacgagaggtcgagggcgatggggccgctcgcggcgacctgcgcgttcgcgtcggcgccggggacgagccgggcgatgagctgcgtgacggcctggtcgccgtcgatgctgcgcagcccgtcgagcgccgcgtatagcgctgctgcgtcgtgcgtgctcagcaggtcgcggcgcaccttgaagccctcgacgacgcccacgccgccgcctgcgcccgggaacgtgacgaggggcacgcccgcctgccccagcgtgtcgaggtcgcgcgcgatcgtgcgcgtcgacacctcgaaccgctcggccagcgccccgatggtcgtgcgctgcgcatccgccagcacgcacatgatcccgatgagtcgttccatccgcataagccccccccctccctccctttcctgcctgcattcaaggcgccaactcgccaagcgccagcttgccgcggcgtcagcttgcactggcgcaaacctgccggagtgcaaacctgccggaacgcaaacttgtcaagcgccagcttaccatgcctgcgacggagtgcttagcgtgaaacatctgttctctttattatgcgccggctgttctgtttcgggcgcccgcgatgcaagtaaagtcaacttgacatatcttcgcccgcctgccatactaggtaaagtcaactttactactattgaatcgagccgaccgtggacaccatcaggaaccgggtgagggagctgcgcgaggaccgcgggctctcccaaagcgagctggcacggctcacgggcgtcacccgccagaccatcatctcgctggagaaggggagctacgtgccgtcgctgcttttcgcgctcaacctgtgcgaggtgttcgatgccgcggtggaggacgtgttcagcaaggaggagctatcatgaagaaggtggtgttcgagagcgtgggcaacgcgctgctgttcgtgctcatggggctggctttcatgttcccgttctcgcgctacgagggcggtgcgaccgcagacggcttctccctttccgtccacctctcgccgctcatggcggtgttcgtggtgttcctggtgctctatcccatcgcccgtgcggtgttcgtgaggcgcagcgggctgcatgcgagcacgcgggacaacctggagctcgcagccgacgacgagcgcgagctccagataacgggccgcgcgctcagaaccgcgtaccgggtgctcatgacgtgcttgatcgtgggcctgggcgtgctggccgccgcccagttcctctccgcaaccttcctgggcgacgccgtagccgtgtaccgcacggccgtgggaatcatcgccgccaccctcgttgccgcgagtgcttcgtactgcatccggtggtgcctcgagtaccggaagtgaggggcggcccatcgcagcaacttactgcctgcttgaccacgagctcgacgtgacgggaaggccctggagcatgccctcgttgaccgaggttgctccagggcctggcggaggcgaagcggttcgacggggcaaggggagctgcccctgctctgatttagtcgtcttcttctatctggtactcgaactttgtcttgcaccaggggcacttcgtcgtgaagctgccgaactcgcggctcgtcacgatcttacgcagcggctttccgcagttcggacacaccttcggcgccttgtcggcgatctcctcgatgccttcgacgtctttttggtcgggactgtatgccatggtaggtctcctttccggttaagttgttccaaacggtgacgcattcgactttattcggcgcgatgcttggcctcgtagctcatctcagccggcgtgcttgccgtcatgctctcgggcccgcggcttgccggcggcgcgtaggcggtaggatcggatctccctgcctcgtagccgtctaccttgtagattttcgcgagcacgttcttgtacggagcgccgtagccgagcttgcccaccttgtacatgggcacgagcttgttcacgttcgacttccacgtgccgaacaggttaggatactccccgtcttcctcgggataccaccaaccatgggtggcgtggatgacccgctccggcacctcgttcgagatgcgcgcacgctccacgcacttgcccaaggggttctcgatgcacacgtagtcgcccgccttgatgccgtgggcggccgccgtcttcgggttgatggtgacgagcgggtcgggcgtgatgctgcgcagcgtgggcagctggcgatgctccgagtggaacgagacgaagtcccgtccgccggtggtcagcacgagcgggtattcttcgtagaggtcgggggtgctggtagggctcatagccggctccatgaagtaggggagctcgtcttccccgaagtcgtcgtaaatcgacgagcacacctctatcatgcccgtcggcgtgttgaagccgggttcgccgtcggggcgcagcaggcccttctcgtacttgcggtactcgaaattctgctggaacacccccatgtcgcgcaagtcgttgaagtcccagtcatattgggtgcggatctgagcgttgaagaactcctcggcgctctcccagggccacgcctcggggttgaggcgcttgcccacgagcaggtcgatctcaaggtcggaccgtgcctcgcccgggtcgagggctgcgttcatcgccccaaggaagtgggtgttgcggccgaagtggggaagcacgacgccgtcatgctcggcgaagccgctcacgggcaggaccaggtcgcacaggcccatgatggtgggcgtcatgaagcagtcctgggcagcgttgaagtccatcttcatgagcgcgttgtaccagcgctcgggttcggcgtagaccgtcggcgcaatggggttggtggcgtagaagtacgccatatggaaggcgtagggctcctcggtctccatgacggtgagcacctcgtcgggatgggcgaaaggcccgcacgcgtatgccggatggtcttccttcgcatcgatgcgcttcgccatggtctcgggctcgacgaactgcgcggtctcgaagcgccagcgtcccatgaagctcgagggcagcgacagcgtgataccgcccggcacgtccatatagccgcatatagccgccaacgcaagcagggcctgcccggcctgggcgccgttctgctgggtgtcgatggctaggccccacatgatggacgagggcgcgttctcggcgaaggcgcgcgccgccttgcggatggtctcggggctcacccaggtgatgccctcggcccactcgggcgtcgtgtcccgcacgcgttcggagaggtcgtccactccgaacacccatttttcgcagaaatcgtggtcgtaaaggtcctcgcccagaacaacgttgagcatcgcgaggccgatggccgcgtcggtgcccgggcgcagctgcaggtggaactccgcccgcgacgcgagccacgtcaggcgcgggtcgatcacgatgagcttcgagccgcgcttcatgaggtccacgacggcgtgcccgtagaatccgtcggggttcgactgcagcgggctcttgccccacagaatgatgtacttcggcacctcgtagcgcgggtcgtcgtagcggtcggggaagtaggccgcatagtcgagctcggggtatcccgcccccagcaggaaatcgccgatcaccgtgcgcggtccgtagcaggaggcgcccgacatcatgaaggcgttattcggcgtcttgaacacggcttgggccatgggcggcgcgtactcggtcgcctcgcggccggtgcccttcgagaggaagatcgcctccgggccgtagtcctcccaaatcttgcgcacctcgcgctcgagaatgtcgagcgcctcgtcccaggttatgcgctcccaggcgtcctttccccggtcctcgcgggcgcgcttcatggggtacttgatgcggtcgggatgctggaggaactcgcccatcgccaaacagcgcgggcacaggcgtccctggctgatgggatggtcggggtctccctcaaccttcacgaacctgccttccttgtcggtgtagatgaacatgccgcagcctaccgggtggcagccgggaggcgaccatccgcaggtgcgcgtgcggacgagctccccttcgtcgaccttccattccttgtccatggtcattgacgctcctctctcttgtttcgcgttctcgctttcgcttcccagtccttcaccgcagcgtctttggccccctcgggaagaggcttcccgcacttcctgcaagttttgaagacaagcatgttccgatgcccgcagacagggcaggatacgaacttgggcttgcagttatcgcaggtgacgcaacagctgccgaagcacatggccggaccatgccctacggctgggccgggggcttgggcgctccgggggccttgggggcggggatggcggaagggctgcctgcggccggcgccggcaagggggcggcggatggcgccaaagatgccgggtcgatcccctcgaggctcgtcttgcagaacgggcacttcttgggaagcaggccctgggtgacgttgatcttcttgccgcagctcgggcatgcggcccctgcgttggcttctgctggtctaaagcacatgggacgttcctttctcgtgatggcaggacaggttgtcggcgctgccgacctagctttccttcgcggccttgctctcggcggcgggagtcttggcctggtcgggcacgatgagcatcaggatgccgccgatgaccaggtacgccgccgctatggcgaacagcatgccgaagttggagccgccgccggccaacgggatggtgatgttcgtgagcgcgagcgacgcgccggcgagcacgaacgtctgcaccagtccgccggccgtggccgctttgccgcgaccgtagatcagcacgggccacgtgaagatcatggcgatcagcgagccgaggcaccagccggtgacgaagtagacgacgtacatgacgactccgaggggcatctgccagccgaagtagatgccgagggcggtgatgacggcatagacggcgacgatgggacggtatgccttgaggaccttgacgatgagcggcgtcaccaccgagccgacgcccataccgatggtgatggccgtggcgaagcctccggctgcgacaggatcgaggccccgtgcgttgacgagcgaggcgttcgtgaaggccatgagcggtacctgccctgccatgaggaagaacgctccgccgcacagcacccagatccaaggcgtcttgacgatctcgaccaggttcttgagaaccttgcccccctcttcgtccttcgaggcgtcctcggtggcggcgatctcgtcagaccgttccttgccgaacaggaaccagccgacgaagaacacggcggaaacgacggcggttacggtaaaagcgaactcgatcgacggcatgagcgacgtgaggccgacgccgagcgtgttcgccacgggcgtggtcgtggtggcgatgccgacggccagggcgatcgtcgcgggagggaaccagcctccgaggatcttcgcgcggttgacggccaggaacatgcccgtgaagccgcagaacatgttcgacaggtactgcgcctcgaaggagaaggcgaagatgcgcgccaccgttgcgacgagcaccataccggccgcgatgagcacgatgttgcgggtgccaatcttgtcggagaggatgcccgcggcgaaggcgaagaagatgccgatgaactgcgaggccgaatagatcgaggcgtactgctcggaagtgaagccgtagtgctccatgaactggacggacataccggccagctggttctgggcatacgatgcgataaacaccccgagccagaccagcgcgagcacgatgccggcctgcaggttcttgttcttgagcgtgaacatacacaacccccttttgctgtgaaaggcatgcggccgcctacgcgcctcgtccgcacgcttgctccttgatgtggatggtgtctcgaattcgccaggtgtagcgttcgcgccggccggctcggggaggcaggccccagcctaccccctaactaccctagccgcattgtacgggacaggggcatctggtttcattggccgaccctacaaaaagcgcggcattatttggcgggagggctaggcccgggggataggctagatatccccttccagcaagagccggtgatagtcgagcatcatgcggcttctcaaaaggggcgagtcgaacgagatgtcgaaccgcttctcgagccgcccgatatggtagagcacggtgttgcgatggacgtgtaccagcttcgaggtctccgtggcgttgcggccgttgttcaagtagacccagatcatcctcacgagatcggttcctgcggccttgtcctcctcggcaagccttttcagtatgctgtgtccgaacgagaactccaccaagtcggtgtcgtgcccctcggtaaggatatagtacttgaggacgtgttcgaacgggaagcacgggatgtcggcgctcccgttcaaggccgcatgctcgttcttcaggggaccccgcatggcgtatgccgtcgtcgcctgccgataggcctgctcgaggtcctcgatgtcgaagaacacctgcgaggcccctgccaccatgtcgaagggccggtggagatgctcctcgatgtcgcgccgcaccccgtttcccgagagcgcggcatcgtccgaagaggccgtgtactccaagacgagcaggcttccctggtacatgaaggggtacacgagaccttggttgaggtttttggaggcctcgatcaccagggagcgctcgctgaacggcttgcgcgagctgaacgggagatacaggagcctgaattgcctcgatgagggaacggccgttttcgagagctgcgcctcgaggtagtcctcggtcatgggctcgccgtcgatgaggcctatgagcacccggtgccacggcgattcgaggttgaccgtcgtgttccagaattcgttggctatggcgacgacgcgtttcacgaacttgaggaacagatcttgcaggcatgccagcgaaccctcggtgcaggcgagcacgacatggaagagataggcgttgtcgatgaagatggggtaatggagggtggggtacggatgcctttcattgggttcgcagatgacgagccgggttttctctccggcttccgcgagcaccttctcctcgatctccgccacctcgctttggtcgtagcaattgttgtctacaaggtgttgaaatccctctccggggggttcgatgccccggagagggagatcaggttatagccggtgtcggtcacgcagacgaagttcttcatcgtctcttcgcttagggagataaggcggtcgatgcgcccgtggttgtacacgacccggtccatctcgttttcccagacaaggtcgttgacgaagagggattgcagcagcgagtcgtagaagtagaatcgcttgtcctgcttgatcgccacgactcggttgcgaaggctgctggcggcgatccattcaggtggctgactgccatccaccagcacgacgcaaaagcagcccggatggttcgcgagcaggttctccgccacctcgtcgtggcagagaaacagggcgttacggcgaccttcgcccttcgggactccccctgtgttaggtaccgaggcgtaccatgagaatcgcagtgcctgtcttggcggaacgtgcagcaactccacaggtccaagggcatctatgagcatggcgtagctcacatcgccgaaccgcatcgaggctcccgcgccggatccgagggagccgacggcttcgttcgcagcatgagattcgtccgacatggattcgctcctcgagccattcgggtgtttgcgatcaggcccctacgccctctgcatagactggccgtacctggccttcggcaacattatagcacgttttctccaagatgtccctttactttgcccgattagtttcccgcaggaatgcgcgcgtccgcctacgcgccgtcacgccgaggcgcgcaggctgaacgtcatcgggaacctgtcgtcgttgccggggagctcgtagaggcccttctcgggggagagctcgaggccgcccgagtcgaagaagttctcggggaactcgttgaacgcgtcgatgcgcaagccggccccgataagcgcgttcaggatgtccgagacggggtgcatccagaagtacgcctcgacgccctccttcggctccgaggcgtagccgccgatgcagtcgtccacgtcgggctccttgccgaagtaggggtatgccaggtcgtactcgccgcgtcccagcttggtctcgtcgaaggccaggtagaacggatgcgagtcgaacacgtagaggaagccgccgtccgcgagcagccgtcgcacgccgcgcgcccaggaatcgaggtcggggagccagcccagcaccccctcggatgtgaacaccacgtcgtagcggccgtcgaggctggcgggcaggttgcaggcgtcggcctcgacgaaatcgacgttcgcgaacccgaagtcctcggcgagcatccgcgcacagcgcacgttctcgggagccaggtcaacgcccgtcacgtgcgccgcgccctcggccagcgccagcgtgtcgaacccgacgttgcactgcaggtgcgccacgcgcttgccggccaaatcgcccagctcttcccgtatgtgggcgttcaggcggttctccccgtcctcgatgcgcttccggtagtggcggtaatggtcctcggccagcatgccccaggcatgccggttgctctccacctcgatcatgccaggtcctctcctctcgtcgggctaggggcggttgctccccagctttcccatgatagcgcggttgagggcgtcctgcttcgtgccctggtacgttttcgcgcccgtcagcaggtcgtcgcagaacgcggccacgtcctcgccggtgacgtccagcacgtcccgaccggccgcggcgccctgttcgaacaggtccacgaggtcggccagcaccacggtcatgtccatgccgtcgccggccacatggttccacatatagtgctggatcttgtcgtatacgaagcggtagtcctcgggcagcgccttgacgcgctccatggcctcgcggtactctcgcttctcgcgggcgaccttcttgaaataggcgaccgggttcttcatcggctctccttcagctcgttgatcttcgacgcgacgaactcccatttcgcccagaagcgcacgagctcctcgcggccagtatcgttcagcgcgtagaacttgcgcggcgggcccagctcggacggcttcttctggatgtccaccagcccgttcctctccaggcgcacgaggatggcgtacaccgtgccttccgctacgtcggcgaagcccagcgcgttcaggcgccgggttatctcgtagccgtacgtctcctcgcggccgatgatctccagcacgcagccctccagcacgcctttcagcatctcggttaggttctccatcgctccctccttccgggcggttcgggcgaacggtattcagcggtgcttagtaccagtatatagtaacacagaatagcaagggtccaagagggtgtgggcaaggcggtaaggcgcggggggcgggagcacgggcgggcgggatcgcgggaatgggcgctaggcggggcgctgggggcgtgatacggcggctcgccgagcgccgcggcgtgcgagcgtccctacgagttcgcctgccgctcgcgcaggtgcgcctcgagccgcttgaagtcgcagcacaccgcggccagatgcgggtcctttcccgaggtcgccatgtcgtagacgtgctgcgccttcgagacgatctgccgcgccttgcggttgcagtactggtattcctcaagaagcaggcgcttgcgctgatagtcctcttcgtcgaagctcttgacggctcgcaggtcgggcgggatggggaacatgaaggagaaccgcaggcttccgacgggcttgttgttcacgttcttgatgacgaagcttgtcttctgcgatttggtgaacgaggaaacgggtgcgaagtagtcaagaccgtggatgcggaacaggacgccgcacacgaacttgttgtgcttctcgtactgcacgttcggcaccttcggctcgatggcctgtagctcgtcgatataagcctgatcgacggtgtagaagttcagcgcccccatgatctcccccttgtaaaaaagatgagcggctcgactgctcgaaccgctcatgcttaccagtcgcgcttatcggtggcgaaacaccttgcataaaccagtcgcgcttatcggtggcgaaacaccttgcataaaccagtcgcgcttatcggtggcgaaacaccttgaataaccttagtatggcacgcgcccgcgcggagcgcaagcgaacaaacgatggggaaactaatgctttacgtctacacagctatgcgtccaccgcatctgttagtgcgtatccaaaaaagggacagtccccattaggggcgttccgaggcgtgccggctaggcgggatgctccgcggcttcctccgcaggctcggcctgcgccttcatgtggggaagctgcgagatggcgatgccggcgaggatggcgacgatgccgacggcctggagcgcctccaccggctcgccgatgacgagcgcggacagggcgatgccgcagggaagctcggaggacgccatgatggccgagagtcccggcgtcaggtgcggcgtggcgatgccgaacagcaccacggggacgaacagggcgcacagccccaggaccaggccgaacttccagatgccgtcctgcagcgcgccgctggcgaagtagtcggggcacagcgcgaagccgagcgcgcacgcgcccaggcacacgacgagcccgcgctggatgggcggcaggccgcgtccgacgcggcttgagaagaacatgaagaaggtgcagctcgcggccgagagcagcccgcacgccacgccgacgggatcgagcgcccccacgtcgctcgagaacgccctgctggccaacaacgtccctcccaggatgacggcgacggcgacgacctcggccgcgcgcgggcggcggcgcacgacgaccagctggaggacgatgctcatccacgtgaactggaacagcagcgtgatggccaccgacaccggcagcagggtgagcgcgtagttgtagagcatggtgccgatgcacgtgttcagcccgagggccagaagggcgagcatctgtttcggcgagagcggaacgaggcgcctgccgcgcgagcgttgcacgagcagcgccgccgcgaacagcagcgcggcgaacagcgcctggcttgccaccgtctgggtccaggtgaagccggcggcgtaggtgatcttgaccgtggtggcctgggcgccgtagctggcgccggcgaggaagacgatcccggagtatttcaaggtgtccttctgcatggggcctattctagggcatgccgcgggcgcccggaggcgggcggggcggcgggccgtgccgtcggcagaaggcgtgcgccgtgggcagcgctgcgccgccttgcccggtcgcgcggtgcgttactttcgcgttcgagaatcaaccgatgatcgcttgcgtcaaccaatgcgactccctcatactggaagcgcggaaagcgccccggaaccgggcgcgggcaaatcccaggaagcggccgggacccgaaagagaggaaggccactatgaacgatgtgggaatcggcgccaccatcgcgcgcgagcgacgcgcggcgggcgtcacgcaggcccagctggcggagcgcctgggcgtgacgaaggctgccgtgtcgaagtgggagctgagccagagcctgcctgacgtggcgctgctgccgcgcatagccgcctacttcggcatctcgctggacgacctgttcgcgtttcggccgcagctggccgaggacgaggtgcgcgacgtctacctggagctgtgccgcctgttcgccgaagacgccgacgccgcctacgcgcgcatggacgagctcgtgcgcgactacgcctcgtgctggaacctgctcatgcagatggcctcgctgtattcgcagcgctcgctcgtggagccggagcgcgccgaggagctgctggacaggatgtgcagcctggccgagcgggtggaggctaatgccgacgacgtggagctggtgcgctcggcgcgcgtcgtgcgcgcgctcgtcatcagccagcgcggcggcatggacgaggccatcgccctgttggagggcgtgaagcccgcacgtccgctgggcatcgaggggatgcttgcgggcctgcacagtatgcggggcgagcgcgaggcgtgcctgaagctctgccaggagatgctgttctggggcgagatgaacgtgatgcagagcatcggcatgcagcttgcgctttacaccgaggacccggcgcacctcgccgcgctgctgcgggcggccgagggggtgatggagggcttcgacgttgaggaggtgaaccccatggaggccgccacgttctgcggctcggcggccacggcgtgcctgcgggccggcgacgaggagggcgcgctgtcctatctggagcggttcgtggggctgctcaagcgtttcgacttggacggcttgctgttccctcggcgctccgcgctgttcgacctcgtgcccgagctggcggagaccgacgtggagcgcgagcaggcgaccgccgacacgctgttcggcggtctcgatatgaaggagcagtgcaagctggccgtcaccggcgatgccgcgtgggagcgcgtggccgacgatccgcgcttccgcccgctgctcgaccggctggccgcggcgtagggagtgcgaggcgattccagccggcgggactgtgccaacagtttcgcaatcggcatttcgcggcggaaccatcctgtagggcaagggcagagcctttaccctacggcgaacctggtgtgacttttgatggaaaccttgcgatcggtccaggaagacgaaagagggcgaatggacgcattggacggagaaccgcgcgctgcggcacccgcgctgcgggtggaggggctggcgtaccgctacgtgcgccacgacgtgtggagcgacgtgtcgttctctctggaggccgggagcatcgcgtttctgaccgggccgaacggcgcgggcaagtccacgctgctgcgctgcctggccggatgggacgcgccggccgaaggcacggtggagcttgccggccggccgtttcggcccgagcggctggatcagcgccgctccgtgtcgttcgttcccgacgtgcccgccttctacgacgacctgaccgccggcgagcaccttgacttcgtgctgagggcgaaccggctgcccgcggacgacgcccgcgcggccgggctcgtggaggcgctcgggctggcggggcatcgcgaccagtgcccctcggcgtactcgcgcggcatgcgccagaagctcgcgctcgtgctggcgctggccgtgcgcccgcgcctgctgctgcttgacgagccgtacgggccgctggacccggacgcctccgccgtgctgagcggccttctggacgcggcgcgcgccgagggcgcggcggccctcgtgagctgccaccacgacgtgccgggcctggagcccgacctgctgctgcacgtggagggcgggcgcctggcggcggccgtccccgggcggggctgacgccatgctgtgcgacatccgcctgctgctatggctgcgcgcccggcatgcgcgcacggctctcgtgcggctcgtccacgctggcggcaccgacctcgtggaggaccgcagtccaggggagcgcgcctaccagctgtacctggcggccatcgcggtggtgtgggcggcgctcatgtgggcggccctgctggacgccacggcggcggcattcgccgcggtcgggccggcatcgtcggccatggcgctggcattgggcctgctggcgcctgttgccgtgctcgcgtgggcggcggtgcgggcgctgcgcacgtcgccggtgaagctggcgcgcgccgacatgcccttcgtcgcggcgggacccttgggcatgcgcgccatcgcgggtatgggctgcgcctcctccatgctcgcgggcgccgcggccggggcgctggcggggtacgtgctgggcgtggggcttgaaagcgggctgggggcgttcgcgccgccggcggcctgcgcgctggccgccgcgctgctggtcgcggcggcggtgggcggcgcgtggctcctgggcgcggcgcggctcgcctgcccgcgcgccgtccggcgccggggaaccgtcgccctggcgctcgcggccgtagcggcggtcctcggcgccgccgcgctcgcgctgggcgtcccgccggccgccttcgcccctggcggccccggcacggccgtcgcctgcgcggcgggcatcgccgcctgcgcggccgagggcggcctgctggcactgctggccccgcgcatcgaccggacggccgtcatcgtggagaacgcgctctacgccgacttgcagccgttcggccccttctcgccgctcgacccgcaggctgtcgccgactaccggcgccgccgcaagctggccgcccggctcgcgcgcggggtgcgcttccgcctgcctctcgccttcggcgccggcgccctcgtgtcgcgcgcggcgctctcgcacctgcgccagtacggcggcctgcccagcctgctggcgttcggcgcgagcgcggcgccgctcggcgtgctcgcgcttgcgggcgccggcggcccggtgacgttcctgttctggctggcggcgctcgtcgtgttcccgcagggggcgcgcgaggccacgcgcgcgttccgcgacgacctgcgcgtgcgcctcgtgcgcgaccggctgcccttcgggacgctctcgctgctcgcgctggactcgctcccgggcctcgccgtgtcgagcgcggtatcgtgcgcggtcgtggcgctcgtgctgccggcgggcttcccgctggcagcggggctggcgctggccgtgctcgtgaacgccgccgccgtgctctgctgcggcctggacgccgtgcgcctgttcccgggcggcccgcagccgttctacgaggcgggcgccctcgtgctcgtggcggcgacgggcgcgctgtcgcttgcgggctcgccgtcgctcaccgtggccggcgccgccgccgtgtgcgcagccgtggcggccgtggtgcgcggcggcgcggagcgcgcccgctgacgcgcgggcgggggagcgccgcccgcgtgcgccgccttggggcgccgcccaacacgccgtccacgcgggccgatagatgatcgaaacagttatttgacctgcgaaatcatggtgcgagccgttacgtgaaatccacggtctgttcgcttgtgcgccgtccgatagtatgcgaacatgcgttcttctagagaaattcggagcgggaggccgacggcgggcgcggcctctgcaggcgtgcggaaagcgggcgaggtcatggcggatgcggtgcggcgggaggccgggggcgactcgcaaaagcgggcgcaggtgcaggagcaggcgcggctacgaccgcaggagcgggcgcgcccgcagccgcagcagcggtcgtgcaaccgggggcccgtgcaggagcgcaaccggcggcgcgtgatcttccactcggacatgaacgcgttctacgcgagcgccgagcaggccgagcgtccggagctgcgcggggtgccgctcgtggtgggcggccacgaggagcgccgccacggtatcgtgctggcgaagagcgcgcaggcgaaggcggcgggcatcgtgacgggcgaggcgctgtggtcggcgcgcgagaagtgcccggggctcgtggtggtgccgccgcgctacgacgtgtaccagaagtactcgcgcctggcgcgccggatatactaccagtacaccgacctcgtggagccgttcggcctcgacgaggcgtggctcgacctcacgggcgcgctcgcgctgtccagccgcagcgcgctcgacgtggcgcgcgagatcagccagcgggtgaaggacgagctgggctgcacggtgtccatcggcgtgtcgtggaacaagatattcgcgaagttcggcagcgactacgagaagccggacgccatcacggccgtcacgccggagaactaccgcggcctcgtgtggccggcccccgccgacgagcttctgtacgtgggcggcgccacgcgcgccaagctgcactcttcgggcatcgacaccgtcggcgacttggcctgcgcctcgcccgagctgctgcgtcggcggctggggaaggtgggcggcatcctgcgcacgttcgcgcgcggcgaggacgcgaccccggtgaagccctacgacgcggcaaggaacgaggtggaccgcaccgtgaagagcttcggcaacgggctcaccgcgccgcacgacatcgcgtgcgaggccgacgcgcgggcgctcatatggctgctggcggaatcggtggcgcagcggctgcgcgaggcgcggttccgcgcgcgcacggtgtccatcggcgtgcgcgacgcggccgacctgtccagctacgggcggcaggtcacgctgccgcgcgcgacgaacgtgacggggcacatcgcgcgggcggcctggaacctgctggtggcaaacgagccgctggacgagacgcggcccctgcgcggcctgcacgtgcgcgcctcgggcctggtgcccgtggacgcgcccgagcagctggagctgcccttcgacgcacgccggcgcgtgctggaggacctggacgaggccgtggacgagctgcgccgccgcttcggcaacacgtgcatccagcgcgggaccgagctgctggacgagagcctgctggagctggacgtcaagcgcgacaacgtggtgcacccggtggggtacttctaggttccgccgttctccgaacggcggaacgagccgacgctgcggccggccgtggcacccggccttcgcgcgatcccgggggctcgcgtaccgaagtacgcttcgcccccgcgatcccgcgaattccgggcaccacggccgccctcgctgacttactgcgccaacctgggcggcttggcaaccggaccggcggggtaaagttcgcgcttcgcgcgaatcggcgggggccgaacaagggggcgagcaaggaagaaggaggcgcgagggcgcatggtgcggggcattgcgggcaggcggaagcggtacgtggaggtggaggccgagttcctggcggacggcaccgtcgtgccgcgcgccgtggcgtggcacgacgggcggcgcttccccgtgcgcgccgtgctggggcggcgtcggtgtgcctcgctcaaggtgggcggcgagggcgtgcgctacgacgtggtggtggggaacgcccatacgttcctgttccacgaggacccgcgctggttcgtggaggagatcgtgcccgagccgccgcccgaggatgccggggcgtccgcacggtgcggcgacggagccttcggggcatgatgcgcgcccgtgtcggccgccccttcgtccaaggacggccggcggatgtcggcgccggcatgggtgccgacggggcgtgccgatgggacgggggctccgatgggcaacggcatcggtttccgctagaatggtgcgaatcgaccgggcggaagcatgcgaaaggagcagccatggacatcgaggagatcgagccgcaggggcgcgcgcccgagctggtgggccggctggtgcaggtgtgggagcgctccgtgcgcgccacgcacgggttcctctccgaggacgatatcgcgggcctgcgcccggaggtggccgcgggcctcgctgccgtcgggcgccttgcggtagcctggcaggatggcgccgccgtgggcttcgccggcgcccaggacagccatctggagatgctgttcgtggacgatgccgcgcgcggcgccggtgtgggcggcgcgctgctcgcccatgccgtcaagcgttggggcgtgcgcacgctcgacgtgaacgagcagaacccgctggctgcgggcttctacgagcgtgcgggcttcgtcgtggccgaccgctcgcccgtcgacggcgcgggccgccccttcccgctgctgcatatgcgcctcgggctggcgggggaggcgggcgttcccgggacggccgggggctcgacccggtcgcccgcgagcccgcctgcccagggtgccggtttgccgggatcgtccgtaccgtcccgcaaggccgcggcccgcgccgcatccgcatccgccggcggtgcctggttcgacagcgccgacccggcgctcatgcgcgaccatatccgcgcctgcgaggtcatggcgcgcttcaacgcgcagcagggcatgctggacgccgaccgcatgaagatgctgcacggcttcctgggcgctgtgggcgagggctcctcgctttcgacgggcgcgcaggtggactacggctacaacctgtttttgggaaggaactgcttcttcaacttcaactgcacgttcctggacggcgcgcccatcacgttcggcgacgacgtgggggtggggccgggctgctcgttcgtcacgccgctgcacccgctgctcgcccgcgagcgcgcccgttgcgaggacgccggcggcaccgggcacgtgtgggagcggagcctgcccatcacggtggagagcggcgtgtggatcgcggcgaacgtgaccgtgaacgcgggcgtgaccatcggcgagggcgccgtcatcggctccggcagcgtggtgacgagggacatcccgccccgcacgctggcctacggcaatccctgccgccccgtgcgcgcgatcaccgaagccgacagcgtcgccgatgtcctcgccgaagccggcctggtctgaagcattgccggcagggcggtgcggtgcggtggcggggacgaatgcagaaccgcccctttctgcacgtttttcaccagattattgcgttttggggcggctgcgccctctcggcgagccgtcggcccgccatcctcgtgctcttggccggcgtttcccctgttcgcgagtttcggacttgcgcagaagccgaccgcgggaggatctgcgtgcaacattccggtaaatagtgtgcaaaaaaccgctgccggcgatgctccttaatcgccgaacattgtttattgacgattgctcaataatgaagccgagttccgggccatcccgggccgtggttcgacgaggtttcgtggcgcaaggcgggctctcgcggttgcatggtccgagccgtgaaggcggcttgaccgcatgggcgagcgagggccgagtcccgggttcgcccgcgccgggagcgcgcgggctgccgtggcctgcacggcaaagggtgcgcgaattgtggagaaaatgtacgacacaggtaacttctcttgcccgcgaattcatgttagcttaatctaacttacatcgaaagcgcaacggaacggcgcaggcgaactcggagcggctcggccgctggcagcctgcgggaacggctttcgaccatcgtccgccgacccggcggcggaggctcctctcgtctggccatccgccgcacctcctagcggagggaagatcccccctcttccctccgcttctcctgttttgaagcgaaatagccagcggcggctcggcagcaggtctgccgtctgggcggcgcatccctgttgcgaaagcgcgggcggccggcagaaggcgggaggagcctgcgccctcgcatgcgttcgtctcgcctcgacggcccggcggttttcgttgataatggagacggatccagcacagggcatgtgcgcaaagcgcgtgcggaagggtgcgccgagggcgcgcgggaagggggatgggccggcgtggacgcgagcagcattctcatcgtggaggacgaccccgacatcaacgccctgctcgccaagatcatggcgcgcgccgggcacgagccgacgcgggcgtactcgggcaccgaggcgctgctccacctcgagcgcggatcgttcgacctcgtgctgctggacctcatgctgcccggcgccagcgggggagagctcatcgcgcacctgcgcggcgaacgggggctcgacctgccggtcatcgtggtgtcggcgaaggcgggcctggcggacaaggtggacgcgctcgccctgggggccgacgactacatcgtgaagccgttcgagcccgacgaggtggcggcgcgcgtgcaggccgtgctgcgccggtaccgcggcggcgcgccctcgccgcccggcggcgtcggccccgtgttagagcatcggggcctgcggctggacgcgtccgcccggcgcgtgacgctcgccggcgccgagataacgctcacggcgcacgagttcgacctcctgcagacgctcatgcaagctcccgacaaggtgttctcgcgcgagcgcctgtacgagctggtgtggaaatgcggctactatggcgaggagaacgccatcaacgtgcacgtgagcaacatccgcaagaagctggctgccgtcgacccggacggggagtacatcaagaccgtctggggcatcggcttcaagctggcgtgagcggccggacgcgtggggatgcgcccgggccgtgcgggagcgtccgattcgggctcggtgccggtttgccgcaccggccgcccgccaggcccgccgcatcggccgcctcgccggtcgagcgccgcgcccctgcccgccatgccgccgcgcggcccctgcgcctttacgctttccttaacctttcttgaggacttattaagcgcccgtagcgtaaggttctccccacggtcggcgaatgcgagaaagaggagaagcgacccgatggaaaatgtgatagagaccaaccggttggcgaagcgctacggcccggtgatcgccttggacgacgtgaatgtgtcggtgcgccggggggacatctacggcctggtgggcgataacggcgctggcaagaccacccttttcaaaattctgtgcggcctggcgtttcccaccggcggcgagatgcgcctgctgggcgcgcaccttccgcgcgagctggagcggcaacgggcgcgggtgggcgccatcatcgagcagcccggcttctacccgggtttgagcgtggaggagaacctggaatgctgccgcatccagaaaggcgtgccggggagaaaggcgaccgggcggctgctcgaggaggtggacctggcatacgcgaaggatcgcgcctgcaagggcctgtctatgggtatgaggcaacgtctcggcctggcgatggccctcatcggcgagccggagctgctcgttctggacgagccggcaagcggcctcgacccaagcggcatcgtggagatgcgcgcgttgcttctgcgcctcaaccgtgagaagggcatcaccgtggtgctgtcgagccatcacctggcagaactcgagcagatggccacggtgtacggcttcctgaaccgggggcggctcttggagcaggtgagcgccgagcagctgcgcgcgcgatgtgcggacttcatcgacatctccgtgtccgatccggctggctacacggtgctcatcgagagggagctgcccggcgagcgctaccaggtcctgcccgaccaagcggtgcgcatcctcgacccgcaggcaggcgccgaggcctacagcggcctcgccggagcggcgggcatggacgtctaccggctcgagcgacgcacggtgtcgctcgaacagtactatctggacttgaaggagaagggggcggcatgatgctgaactacatgaagggcgaggcgttccgcatcgtgcgcggcaaggaggtgtacctgctcgcgggaatattgtcgctgatcgcgatagcggtgaacgcgatcgagttcgcgatgaccttcgtcgaccctggcttcccctacgccacggtgcgcttcaacctggggatcgtgacctcgtcgctcggctcgctgttcttggtggccgggatgctggtgtggttcctttactccgaggacaagaagaacggcacgatgaagaacgcgctctcgcacggctgctcgcgcacctcggtcttcgcggcacagtgcgtcgtctcgtcgcttgccgggcttgcttgcatggtcgtggtgctggcggcgtacgtgggcagtgccgtccttctgttggagggaccggtgctgccgccggtcgtggatctgctctcgggcattgcggccgccctgccgtccgtgcttgccgcggtcgtcctcatggcagcggtgttcgcgcattgcaagagcacttcctcggcgctggtcacgtgggtggtcgtccttttcgtcataccctacacgctgcggatggtcggccttctctgcgagcccgtcgccgtcgtggccggttggcttccgccgaacttcttcgccaccgaggcgctggtgagcatgtccggttcgtccttgctgtggaacaacccggccggtctggcgaaatgcttaatcgcaggttttgtcggtttggcggcgttcacggctgcgggcgtgtggcgcgtcagcaagatcgagctgtagggaggggccagggtggcgcacgtgttgcttgccgttgcgttggttgcggcgctagcggcagcggccttcctcgccgcgcggtacgcgctgctcaagcggtcgcttcggcaggcggatcgggagctgggcgagatcgtggggcatctggaggacaaccgcatcgtgaggctgccggctcccgacgccgatttggaggcgctgctcggcacggtgaaccgtgcgcttgcgggcatacgcgcgcaggccgccgcctgcgcgcggcacgaggcggagctcaaggcgcaggtcgagcacgtgagccacgacctgcgcacgccgctcacgtccatccgggggtacctggcgctcgtggacgacgcggccctcgatgccgaggcgcgcgaggcgctcggcacggtcaggcgcaaggcggcgtcgctcgagcggctggtggcgcagttctacgagctgtcccgcctgcagggcgatgatgtcccgccggagctggggccggtggacgtgggccgcatgttgcgggagtccgtggccgagcagtaccgcctgctggccgaccggggcctggacgtgcgcctggacgtgccggagcatgccgttttggcgcgcgcgaacggcgaggcggtggagcgcgtgctggcgaacctgctgcacaacgccggcaagtacgcgaagacggcgctggaggtgtcgatggccggggagggcgcgggcgccgcgggggccggcggccgcgtggcggtcgagttcgccaacgacgcggaaggcctgtccgaaagcgccctctcgcgcctgttccaaccgttcttcatggcggacgcgtcgcgtgcgcaggagggctcgggcctcggcctggccatcgcccgccatctgctggagcgcatgggcggcagcatcgaggcgagctcggaacagcgcgagggagcgtgctggctggtgctccgcatcgagctccccgcagcttgagcggttctcacaaatcgttcaccttggaaaactttttcgtgccaatggcgccgattcgcggtactatgatccctgaaaagtaaacgcaggctaacgaagccgggcgagggggatcgccgcggccgcaaggagacgagacgttgggcaccctgaacgaccttcccatcggcaagaccgccaccgtggtggcggtgggcggcgagggatcgctgcgccagcacttcctggacatgggcatcatcccgcaggccgacgtggccatggttaagcacgctcccatgggcgacccggtggaggtgcgcatccacggctacgagctcacactgcgccgcgacgacgcgcgcaagatcgaggtggccgacgagcgcgaggccgacgccgaacgcctcggcggcgcgcggccgcgccgcagcttcgccgagcgcgtggagcacccgggcctcggcgagggcggcaagttccacgacagggatgccgagcgcccgctgcccgagggcgagcccctcacgttcgcgctcgtgggcaaccagaactgcggcaagaccacgctgttcaaccagctcaccggcgcgaaccagcacgtggggaacttcccgggcgtcacggtggaccgcaaggacggccgcgtgcgcgggcatgcggaggccaccgtcaccgacctgccgggcatctactcgctgtcgccgtactccagcgaggaggtggtcacgcggcagttcttgctggacgagcgaccgcgcggcatcatcaacatcgttgacgccacgaacgtggagcgcaacctgtacttgaccatgcagctgctcgagctgggcgtacccatggtggtggccctgaacatgatggacgaggtggagggcaacggcggcaccatccgcgtgaacgagatggagaagctgctgggcgtgcccgtggtgcccatctccgcctccaagaacgagggtatcagcgagctcgtggaccatgcgctgcatgtggcgcgctaccaggagccgcccgtctgccaggacttctgcgcagccgacgcgcacggcggcgccgtgcaccgctgcctgcacggcatcatggcgctcgtgggcgaccatgccgagcgtgcgggcatccccgtgcggttcgccgccagcaagctggccgagggcgacgcgctcgtgttggagaagcttgccctcgacgagaacgagaagcacctgctggggcacatcgtgcgccagctggaggacgagcgcggcctggaccgcgcggcggccatcgccgacatgcggttcgccttcatcgagcgcgtgtgcgacgagtgcgtggtacgcccccgggtaagccgcgagcatgcgcgcagcatggcgctcgacaagctgctcaccggcacgttcacggccatccccgcgttcgtggccatcatggcgctcgtgttctggctcacgttcaacgtggtgggcgcgtggctgtcggagatgctggaggccggcatcggctggctcaccgacgtcgtggcgaacgcgctcgcggcggcgcaggtgaacgaggtgctgcagtcgctcgtcatcgacggcgtgttcaacggcgtgggcagcgtggtgggatttttgcccactatcgtcacgctgttcttcttcctgtcgcttctggaggactcgggctacatggcgcgcgttgcgttcgtcatggacaagctgctgcgcaagatcgggctgtcggggcgctccatcgtgcccatgctcgtgggcttcggctgcacggtgcccgcggtcatggcggcgcgcacgctgccgtcggagcgcgaccgcaagatgaccatcatgctcacgccgttcatgagctgctcggcgaagctgcccatctacgcgttcttcacggcggcgttcttcccggcctccggggccgcggtcatggtggggctgtacttcggcggcatggcggtgggcgtgctggcggcgctgctcatgcgcaagagcctgttctccggcgaggcggtgccgttcgtcatggagctgccgaactaccgcatgcccagcgcccgcaacgtgggccagcttctgtgggagaaggcgaaggacttcctggagcgcgcgttcaccatcatcttcatagccaccatcgtcatctggttcctgcagacgttcgacttcgggctgaacgtggtggcggactcggccgacagcatgctggccgtggtggccgggtggatcgcgccggtgttcgcgccgctcggattcgacgactggcgcatctccacggcgctcgtcacgggcgtcatggcgaaggagagcgtggtgtccacgctgtccgtgctattcgggtcgacggccagcctcgtggcggccctcacgccgctcgcggcgctgggccttctgatgttctgcctgctgtacacgccgtgcgtggcggccatcgcctcggtgaggcgcgagctgggcgggcgctgggcgctggccatggtgttcggccagttcgccgtggcctggctggccgcgctcgcggtgcgcggggcgggtctcgcgatggagctgccggcgggggaggcgtggagcgtcgccgtgggagccgtggtcgccgtggccgtggcgctggtgctgcgccgcatggcgcgccgccgccgcgcgggggccggcggctgcggcggtggttgcagcgcggcgtcctgcgcgggatgcgcgagcgcggggacgtgcgggcgcgacgaggcggccgaagcgcaggcggacgaggcctctgcggacgcgacgcgcccgtagcgtgcggaagacctcctgtgcgatcctcgttcctcccttcttcgacatttcgacccctccgagtcaccgttttggtcgctttgaagctcgctcggctccgatgagggtgatcacggttacatcgaactggtcaaacgcgatctggcgccttggagtgccatgaagagtaagttctcggcccggtcaaaacacttcagagcgatcgaaacggtgactcaggggacgtttttccatgaggttgatcgacgcgttgcgtcggaaactcgctagctgatgcgagtgagacggcgagtcgtggctcgcgttctttctgtgcacgccccgagggatggtccagtgcctcggggtgtacctgcaacggaaaaaagagaaccgcaaacgacgcctcgccgccgccgtggagattcttggaagatgcccataaatgttgcaaattgagtagcaaatatgggaaagtaaaccaaggaaaacaagtaaggcgagccgccacgtgtgcgaacggccgcgtgccgcccgccgaacgaagcgaaggagcgataccatgtccatgatcaaccgcgagatcgacgatttctccgtccaggcgttccaggacgacggcttcgccaccgtcacgaaggacgacgtgctgggccactggagcgtgttcttcttctacccggccgacttcacgttcgtgtgccccacggagcttgaggacctggccgccctgtacgaccagttcaaagccgccgactgcgagatctactccgtgtcgtgcgacacgcattttgcgcacaaggcctggcacgacgcgtccgagaacatcaagagcctgccgtacccgatgctggccgaccccacgcacaggctggccgacatcttcgacgtgtacatcgaggaggagggcgtggccgagcgcggcagcttcatcgtgaaccccgagggccgcatcgtgtgctacgaggtgaacgccgggaacatcggccgcaacgccgccgagcttttgcgccgcgtgcaggcgagccagttcgtggccgagcacggcgattcggtgtgccccgcgcgctgggtgccgggctccgaggtgctgcacccgggcatcgacctggtgggcaagctgtagcggacgcagcaggccgggcggtgcgcacgacgggcctccgggacggttccgggggcccgtggtatgatgggcagagccgataccccctcgaaaaggagcacccccatggatgtgaccttgaggcccttcgaagacgacgaccttccccgcctgcgacgatggctcgctgccgaccacgtgcgcccctggttcgagcagcccgaggactggatggccgaggtggagggccgtcacggcgagtacgcctggatcagccacttcgtcatcgaggccgacggcgatcccgccggcttttgccagctctacccgttctccgcaagcggcgaggattggaacggcgcgcttcccgtggagggcacgtacagcctggactacctgctgggcgagccgacgctgctgcgccgcggcattgcccgtgcggcgctctcgcagctgatcgggctcattgccgccgaacccgatgccgagcgcatcatcgtgcagcccgatcgggagaacgttgcctcccgcggccttctgcgcgcgctcgggttctcctacgacgaggccgacgacctgttcgcgatggacgtctgacgcatgggtgcggcgtcgggccccgcgttttcggggagggatcttccgtggagttgaacaagctgggtgagcggacgttctggctgccgcaccagccggagaacgaccggccgatgctcgtgctcctcaagggcgatcgccttgcgctcgcggtggacgcgggcgcgtcggctgtgcatgtcgaggagttctacgcgcagctcgacgacgcgggcctgccccggcccgacctcacggcgatcacgcactggcattgggaccacacgttcggcatgcaccgcgcgcacggcctcaccgtcgcgtgccggcgcaccggtgagctgctcgcgcaggcgcgcgcttcgctggccgatcccgccgccgtcctggcgctcaagcggagcgaggagtatatcgcccgcgagtacgccgaggccggaatcgtggtcgccctgcccgacgtggtgttcgacggcgagctcctcctcgatctcgggggcctgaccgcacgcgtgttcgcagcagcctcgccgcattccgacgacacggtgctcgtgcacgttcccgaggagggcctgctgttcctgggtgacgcgacgtgcggcgatcctttcgacgggtggcgcgtcgacgaggagaggctgcgggccctggtacgcacgatcgagggcatcgactgcgagacgtgccttctaggccatgccgacccgctgggcaagggcgagctgctgggctacctggcaacgctcgcgggttgaggacgcgctgccatcgggcaggtaacggcggccggctttcccctgctcgtccggccgcaggagtaacctttatgcggaagcggccggccggcgccttgcgcccccacgggcgcggtgctgggcatgcgacgagaaaggacgatgccatggccccgatggatacggcggtgcccggaaccctcgtgtgggggcatgcggcgctcgcagtgtgcgcggcgttgtacctggcgtggtggtggacgttcttcaatcccgcgctgccgaaggcgacgggggctctgtacgcgatgggcgtggggttcatcttgggcgcggtagcgttcggcatcgcggccgtcgtgttgctggcgatgggcttgggagcgctcgcgggcgcgccccaggttggcggcgcggcaccagggtgggtgttcgccgtgggcggcgtggcggcgtatgcggcgctcgccttcgtcaccgtgcgcttcttcgggcggcccgtgaccacggagctgctgctgttcgtgctgtgggcggcgctggagcttgccgtgctgaacgcgctcatgggcgcagggatgcttttcggcggcgcgttctggctgctcgcgggcgtggtcgcgcttgtgacggcggcgaatctcgtgtgctacgtgctgtacttccggctgccgcccgtgccctcgtttgtcgacggagccgcgccgctggcggttgtcggcgtgctctcggcggtgctagcggtagtcatcgcacggctgtgagcgcgtcgaccggcttgtggccgcgtggggtacaatgagggcggccgtgctgcgccgacttgcgaaggaacatgaggaagtacctgctcaaacgcatgctgttcatacctttagggatcgtcgcccttgcggcgacggcgttcgcgcaggcgaatcccgaggcagccgaatggtacgcgcaaacggtgtaccccgcggcgtcctcggccgtgggattcctgccgtcgctcgtcggcttctcggtggccgagtgggtggcggcgctgttcctgctgttctgcctggggtacgtcgggtactgggttcgcaaggtcgccgtgagcaagggcgagcgcggtatgatggcataccgcgggatcatgggcgcggcagccgtcgcttgcgtcgcgcttttcgccttcacgttcctctgcgggctgaactaccaccgctacaccttcacgcagcacgccggctacgatctggcggaggagggggccgatccggccgagcgccaggaggagctcgtgcgcctggcctcgtcgctcgccgagggcctcgggcgcgagcgcgcagagctcggcaacgatgtcgacctgttcgccgccgagccgggggagttcgagcgctactcgcaagaatcggtggccgccatgcgcaagctcgcggagcgctaccctgcgctcgagcggccgctgtactcgccgcccaagccggtgctcgcgtccaagctgatgtcgtatgcgaacatcggcggcatgttcttcccgttcaccatggagtcgaacatcaacgtggacaacccgttcttcacggtgccgtggacgatggcccacgagctggcgcaccagtgcggcttcatgcgcgaggacgaggcgaacttcatcgcgtacctggcatgcaaggaatccggcgacgcgctcatgcgctacagcggcctgctgctggcctgcgacaacgccatgggcgcgctgcggaaggccgatccggaggctgccacgcagatcgccgccggccttgcgccttcggtgcaacgcgacctggccgagcgcgcggagcactgggcccagtacgagggtccggtgcaggaggcctccaacgccgccaacgatgcgtacctcaaggccaacaaccaatccgacggcatgcggagctacggccgcatggtcgacctgctgctcgccgagcagagggcgggggagggcgatccgccgagctagcgccccgcttcatcccgctgcgtcatcctgcgtcatccggcactgcgccatgcagcagctcggccggcagaactgcgggattgatgctgcgagggggatcggctcgacgccgtttcactccgggaacgccagctccacggtgagcacgtcgccgtccaggcgggcggtggcctcgatgcgcagggcgcgcgacagctgggcgacgatggcaaggccgaggccgctgcccccgccgccgcgcgcggcgtctccctggtagaagcgctcgaacaggcgatcggcgtccatgccgtccgggtcggccacgcggttcgcgaacgcgaccgtgcgtccctcctgcacgatgcgcgggggctcgcacccgtagcgcagcgcgttcacggcgaggttgcggaagatgcgggcgagggcgtcggcgttcgagtcggccacgagcggctcgtcggcaagccggatgccgggctcccacccgcgctccttgaactggccgtacaacgaggccagcgactcggcgagcacctggcccacgtccacgggctcgcgctcgatgcgatggtcggggtcctgcacctgggcgtaggcgtacagctggtccagcagtccgcccacgtcttccaggcggcgcgacaccacgtccaggtaccgggcgcgcagggcctcgtcctcctcggccgccagcagctgcgcgtagccctgagcccccgcgagcggcgtgcggatgtcgtgcgagaggtaggtgaggccgcggcgcagctcgcgcttggcctcctcggcggcgacgcgctcgccttggtggcggtcgatctgccggttcaccgcctgcgccagctgcacgaaaccgcgcgtgcgcacggacagcgcgacgcgggcgttgctcgccgactcccggttcacgaggaaccgcgcaatggcccgcagctgcgcctccgagcgggcaagctggacggcgagcgcaacgacggcgacggcgagcagaacgaccgcggcttccatggcctagacgtccttcctcttgaggaccagggcgcagagcgctccggcgacggcgatgaacgccgcgcccacgagcgcgatgtgccccgcgccgagggggccgccgagcccgagggagagcgagcccatgcaggacgacagcgtgtagtcggcgaggaacgagatgctcggaatcagcatgcccagcccctggatccccagcgtcaccaggcccgaggccagcaggatgccgatgccgatgcccgccgccatcttgcgggtgacccaaacagcaagcgccgtcagcatgccgaagcccgcggccacgaccgcgacgagcacgccccacagcgcgaagtcgggcaggggggaggatgcgagctcgaggcccgtcacggcggccgtggcgagcgtcgctgcgacgatcatcacggtgaacagcgccgcgagcacgagtatctccacgatgcgcgcgccgaggaacgcgaggcggctcggctgcacggtgaacacgttcttgctgaagccgctctcgaactccgcggcaaggaagatggcgaggaacacgacgaacaggcaggagagcccgcctccgccgaggaacacgttgcccacgagcgcctccggcgtcatgccctgggcaagttgcgtcaccagggcgttcgtctcggcgaggtcgtccgcgctcgggccgctcccgttcgagaagccgatgtgcacgcccgtcggcgcgccgcttgcgctggctgcctgcatcgactgcacgaacgcgggatcggtgatgtaggccatggtggctgcgctgataacggccagcaccgtgatgacggcaaggaatatccacagcgacttgccgtgcacgagccggtaaaggtccatcctcagaatattagccacggtactcagcccccatcatctcaacgaagaactcctccaggtcgcgccggtgcgcgtacaagccgcggacggcgatgccctgctcgttcaggaccgcgcccaccgctcccgcgtccgccccgccgaagacgcggatggcgccgtcgggcatggactggaagcgcaggcccgcgaagcgctcctgcagcacggccagcgcgagcgtcgggttcgcggcctccagctgcaggaaatcgctgcattcctggtcgacctcggcggcggacatctcgcgcaccatgcggccctcgcggatgacgccgtagcgcgtggccatcttccccagctgctccaacacgtgcgagctcaccaccacggtgatgccgcgctcgtcgttgaggcgcatgatgagccggcggatctcgcgggcgccctcggggtccaggccgttgagcggctcgtcgagcagcagcaggtcggggctgcccaagagcgcgagcgcgagccccagtcgctgcttcatgcccatggagaagttcttcgtcgccttggagcccacgctgcccaggccggtgaggtccagcaggccgtgcaccttgtccttggggtcggccaggcccagcgcgagcgccttcatcatgaggttgtcggttgcgctcatggagccgtacagccccggcgactcgatgagcgcgccgatgcgccggctcgcgctcgcctcgcgcggctgcatgccgaacacgcgcacctcgccgcccgtgggtgcggcgagccccgcgagcatcctcatcaccgtcgatttgcccgccccgttgcggccgacgaacccgtagatatcgccttggcccacatgcatgtcgaactggtggacggccatcttgctgccgaaggccttcgagagcccgttggtttcgatcacgttcacgttcccgctcctttccgatcgtcggatcgttctctgactgccaaccacgatacggaaaaggcgttcagcaattcgcttcgaaaccattaagaaagtgctaagtttgccgtgcgaggggcgtgacaggggggcgtgacagggggacggggataacgtcacgttccgcgatgcgctgcaactgagcgaaacgaaggggaacgtgacgttatccccgtccccctgtcacggtccctgtctcgcctcattcggccagtttgaagccgatgccccaaaccgtctcgatgtagccgtcggtgccggagggcttgagcttgccgcggatgttgctcacatgcacgttcacggccttctcctccacgaacgcctcctcgttccaggccgcctggaacagctcccgcttggtgaacaccttcttgggccggcgcacgagggcctccacgatgccgaactccaggcgcgtgagcctcacgggatcgccggcggctgtgagcgtgcgggcttcggcatcgagcacccagtccttgaaccgtagcgtgcccgagctgcgccccgccccgcgggaagcgtggcgcagctgcacggacacgcgcgcgagcagctcgtcgaggtcgaagggcttggccaggtagtcgtcggcccccagcttcagaagctccaccttgtcgcccgtatcggcgcgcgccgataccacgatgacgggcacgtcgctgcgcgcgcgtatctcgcgcacgagctcctcgcctgaggagcccggcagcatgaggtcggtgatgacgaggtcgtacggcgcctcgcccgcggcggcccccgctttcagcaggagccgcgcctcgcttcccgagaacgcctgcgcgcaggcgtagcccgcccgcgcgagcgcggcggccaccacgttgttgatgtcctcgtcgtcctcgacgacgaggatgcgggctgcgtgttccatacgcgtattgtagcccaaccgggcctggcagggcgccactctttccccgccctgttcccgttcccgccccgatcccgtaccggctcgcccgcgcattcgcacaagccccgcatccgcgttcgcacacgcccgcgtacccgcgctcgctcccgcccacgtcccaaccccccccccgcaccctccccgccttcgcccatatcgcccaaggagggcaggctccctgtccgcgcatcgcatgccgcattggctcgcaagggagcgcgccccctgcgcgcaggcgggcttatccgcacccgctcccgcctcgccccgacccccgctccgactcccgtccacgctagcggccaaaggcgggggcgggaagcgccagggtttcgggggtgttggttcttacgggccggcccgccggcaccataatcaccggttttcgacggaatgccttcccctcgggccgcgccttccgaaatgccgttctgcgacgaggggaaacgtcggaccacctcgcttgcgccccgcttgccgccagcctctgcttcccaatctgtaaaaatgcggtgattactgtgccgatgcgcggcctgctggtagaatagcggcaccacggagccagtgcaggcgctcttcgcctcggcgagcagcccattgcaggaacggcgtgccccccgttcccctaccacgcttgcaagatcctcttagcaaagggcttgcaaggaggttccatgcccgtctcctcccatcctgaccgtgagcgcgcgcctatcatcttcggacacaagaccgccttggccatcctgcgctcggcggccccccggacgcttccgccggttgcggggaaagcacgggtgcttcccagccgcgctccggcgaggggcgaggtcgaggccgccatcgagcatctcgaggcctcatacccggatctgcgcctcgaaaggcctgcgcacgtgctcgttggaagcgctgcgctggggcggccttcgaaggctgtcaagtcacattcgctgaccgtccctctttcgggcacatcgttttaccggttgggcgacggcgtcttcgcctgcgtgccggccctcgcctttgtccaggaagccgcccgggggaagagcctggtcgccatactcgagcttgggtacgagttgtgtggaacgtaccggacccggcgcacaggggccgcagctgcctatggggtagagcccctggcatccgtcaggtcgttgggcggctatgcggcgcggaacgcctcggtcgacggtgcgcgcaaggtcggccgtgcccttcgctaccttgccgacggctcggcctcggcgcgggagacgaaacaggccctcgtcttggggctgccccatcgccacgggggctacggcctgggaatccccccatatgaactacgaggtcggggcgagcagggcggccgaatccctcaccggtaagaagtcgttccgcatggatttgtgctggccggagcggaagctcgatgtggagtaccagagcagggagtggcacgagggggaggcaagccgcgtctccgactcgaggagggcgaacgccctcatgtccatgggctggacggtggtgggggtgacgaacgacgagctcgacagcttcgcggcgaccgaggcgatagcgcaaacgctccgccggcacctgggcaagcgcgcgcagatacgtacgtccaactaccatgggcgcaagctggagctgcgcaggcagctgggcctcccgataggatacgagtaactgaaggcggcgtggcagcgactccgcccgacgcgccgcccgcccccccctgcacccggttgccgtggcaccgcccggcgcccctctgcacccgctgtccgtggcgccccccccctccctgcatggcccggtgcgggggaggggcgggcgggcgatgcatcgctcttcgagcgccatgacgccccgttggcacagtaatcaccggttttcgacatgcgcgcggcctgggacagcgcgatggggcccgaaggccgcctctttcgggtgtttcccctggttgttcgtaacgccgaaggcgagacccgctctgctgacgcggcccgctgtagaaaaccggtgattactgtgccgcacgatgcgcttcgcactgcgctgcgcagcgcgaagcggtggcggatgcgacggacgcgcgcgcctgcgcgcgccgcgccgtcacgcggagaacagcttgcgcacctcggccacgagctgcttgcgggtgaacacgagcagggccagcagcagcacgctggccgtgagcgcgctcacgttggccggcacgtcccatgtggccaggcccaaggccacgagtgcgagcgggatcagccccagcaccacgtcgaacagcaggtacttcgcgtagcccgacacgaacgtgccgcggaacacggccacgagcacggcgtcgaacacgagcgccaccaggcagatgccgggtatgacgaacgtcgtgaccacggggtttcgcgtgatgaggtaccacagcgccgcgatggccagcaggatgaggaagtagcgcaccaccacgcgcaggaagtcgggcgtatgcacgaggatgttgcgcacgaacaggtagttcaccacgaggcccaggcacacggtgagcacgatgtcgcccggcaagcccagcagccgccccaggaacagcatggccagcaggcacgcgccgctcacgaacgccagcacgctcaacgccgcggcgcccgacttgcgcacctcgtttctggggaacgccgacggctcggccttgcccgagagctctgcctggcagagcgggcaccggtccaggtcgcccgtgaacgacacgccgcacttgccgcaccgcttcatcgcccggcctccttacgcttcgccttctggtcgctgtccgagccagcctttcgcgcagccctcgttttccgcgccgccttctccccgtgctccggctctgccagcgcggcccccgtctcgcgccctacttccgccccgtcggcccgcgccccgcgcgcggccttcgccttgcgcttcgacgtttcgcgctcgggtgtcccgccgcgggcgggcgcctggccgcgggcgcgcttcaccgaggcctccagccttgcctccaggcggtcctcggcaacctcctcgctcgtcttgttgatgttgatgagcccctcgatgccgcagcccgagaagtaccggacgaagttcttcaccacgtcggggttcgaatacgccgtggatatgccgatgctcaggtcgtcgccgaacgagcacaaaaggaagttcagcccggtggtggacgtcaggaggttgaggtcgcgcacatacggggccacccgcgcgtccacggagatgcgccccaggttcgagagcgtcgtggtggtctcgcgcgccgtgaagcggctggccagctcaagcagggcgtccttcacgaacaggggggccaggcgcagaagcgggttcttctccagcgctatcatgcggttcatgcggggcttgaggctctcggggtcggtggccacgcgcagctgctcctgcaccttcgcggccacctgctccacgggctcgtcctcatcgccgggcacgtaggacacgaacgccagcccgaagaagttcttggtagtggtggacttgaaatgctgccgcaggtccacgggcacgtccaggcggatggcgcggtggcgctcgcgccggggcatctcggcgcggatggcgcacatgatggccgcgatgacgagcgacgtcaggctcacgccgtgcccgcgcgcaaggtcgagcaccgggcggacgggaaggtggtactccaggtacgtggggtccgccgcatcgcgccagccggtgagccggtagaccttgggcgcgcgcgtgggggccgccttgtcgcgctcgaagtacttgtcgaagctgtcctcggccttctggtggtccgagccgtcgtactcctgcggcagtccctccacgccgtagcgctcctccacgtaggcgtagagcagggccttgaagaagctcagcgacccgcgcccgtcggacaccatgtgcgacacttccaggttgatgcgagcgcggtagtagctcacgcggatgagcacgctcttcgcgtccacgtgcaggccgtagcagatgggcaggttctcctcgtgcacggcgggcggctggggagcctgctccaggtagtgccagaacatgccgctgcgcaggcacacgttgaagccggggaacatctccgccgtgcggtcgagcgcgcgctgcagcgccgccgggtccacgtcgtcggccatcgtcgccgcgtagcggaacaccgtctgggcggagctgcccgcctgcgacgagtagaacttccctacgttgtctagtcggtaccaagcagtccgagccacgtcggttcgccttcctgcacgagcgggtcgccatcgaggaattgcttgatgatgcggtacgtgtccttcacgatgttgaacacggtggggtacagcaggtagccgtgcacggcgtccagcatgcggtagcactgcacgtcgccgccgtcgtcggccaggcgctgggcgtacacctcgccctcgtcgcgcagggggcagtactcggccgtgaccacgagggtgcgcggctggcgggagaggtcgccctccagcagcggcgcgaagtagggacggtgcaggtcggcgggcgacgaggcgtacagttccatgtagccgcgtatgtcgcgcgacgagagcaggtagtcctcgccgttgtccctcacggagtcgaagaacgaggtggcgggatcatggtcgttgtacgtcacggggtagagcagcatctgcgtgcgggggaggaactccccgcggtcgcgggccatgagcgacaccacggcagccaggttccctccggcgctgtcgccgaagagcacgatatggtcggggtccacgtcggccaaaagctcgcccgcgtgcagctggcgggccacctcgtagcagtcctcgggagcctggggaaagcgatgctcgggcgcgcggcggtagtccaccgacaccacgcgccgctccaggcgcagcgccatcgtgctgcaggcgtcggtgtagaagtccacgtcgccgttcacccagccgccgccgtggaagaacagcacggtgccgcggaagtcctccgtgaccttgaagccctcggccaacgagaagtcgatgtcgagcggggtgaacacgcgcagggggagcgcgcagccgtcgggcatgggggccgtgatgtcgtcgatgcggcagcgcgggttggggatggcgagcctggcgctcaggtcctcggccacgcgctgcgccttgtagaactccttgatgtccggccgaagccgcgttgccgccttgaaggcggcgagcaccgccttgttgatgggcatgtatgccgtcctttcccggggtggcggcgccgctgccgggtcgtcctgcgcggcagcggcgccgcgattccctcgcgtgccatcgtagcacaagcgcgccgcagcgtggggcgtgctgcgcgggccccacggccccggcatgcggcgagccccgcgccggtggctgcgaactgcctttcggcggcgtggcaggcgccttgaggttgcatgtccgcaacggttcggccgccccccggcggccgcgcttagactggtcggcgatagccccgcgcgccgcgcggggttcggcggcggagcctgtcggtcgcgcgtgccgcgggcgcatctcgcgcgcgtgcgcccgcggtgctttgcgggcggcggcatgggcaggacgaggaaaggcggtgcggtgcggacgacggtgaaggcgggtggcaaggaggcgcgtgcgcagctcccgctgctgctcgcgtgctcgtttgccgcctcgttcgcgcagagcatgatgaacatcgccctgccgcaggtagcggacgagttcggcgtgacgctctccacggcgaactggctcgtgaccggctacatggtagtggccgccacgtccatcgcgctcgcggcgttcctgctgcggcgcctggggctgcgcacggtgttcctcataggctgcggcgcgcttgccttgggaagcgggctggccctgctcgcccccgacttctgggtgcttttggcggggcggctcgtgcaggccgtgtgcaccggcctgttctaccctgccgtgaccagcttcatcatggcgaactccgatccggccaggcgcggcacgcacctggccatgaacagcggcaccgtggcggcgggccttgccgtgagccccgtagcgtccggcctggtgctcacggggctcggccggcacgcgctgttcgccttgcccctcgccttggcggtgctgctgcttgccgtggggttcttccgcctgcgcgaggtggggccgcgcggcgcgggcgcggtcgaccccttgagcgtggtgctgggcctggtgggcctgggggcgctcgtctacgggctgggcgaggtgttccgcgacccgctgccgtcgctcgcagtgctggcggccggcgtggcggtgctgggcctgttcgcctggcgccagctggccctgaaggacccgcttctcaacttgaggccgctcgggaaccccgggttcgccgtgggcgagctgctggtcatgctgggcatgatggcatcgttctcgctcagcatcctgctgccgttgtactacgagggggcgctggggttctccgcgttcctcgccggcacgctgctggccgggccggtgctggcgaacgcgctgtccgacgtcgtgggcggacggctgcttgataggaggggcatctggccccttgtgcccttcggcttcgccttgacggcgctcggactggcgggcgtcgcgctcgcggcgggacggccgctgctcgcgctggtcgtgctggcctccgccgtggcctacgtggggctcggcctggtggtggcgccctcgaagaccacggcgctcgtccagcttccgtcgagcctgtacgcgcatgcctcgtccatcaactcggcgttcatccagatagcctcggccatcggctcgtcgctgttcgtgggcgtgctgtccgccgacgtgctcgccggcacgtcgcgcggcttggctaaggcggctgcctacgatgaggggttcgcgcacaccatggagatcgccatcggcatcgccgtggcgagcctgctcgtgtcgctggtctacgcgtaccgcctgcgtcgccggaagggctgatgtcgcggccggcgggcgccgggccggtcatggcgctcagcggcgcgcccgcgggggggggcggagcgccgctgcgagtgcgcgagggtgcggaacgcaggcgccggtgcgggctgggtgccggctgcagccggcggcgcctatccctcgatggcgtcgatggcgtttaccacggcgccgcggaaggcgtccttctcgagcgaggcgacgcccttgatggtggtgccgcccggcgagcacacggcgtccttcatggcgccggggtgcgtgcccgtctccagatgcagcttcgcggtgcccatcatcatctgggcggccaggcggtacgcggcagcgcgcggcagcccgtgcttcacgccggcgtcgcccagcgcctccaggaacatggccgcgaaggcggggccgcagccggcgatggcgctggcggtggacagcagcttgccgtccacccattcgatgagagccacctggccgaacagctcctcgaaagccgcaagctcggcatcgtcgagggaatggcgctgctcgcaggccaccacgcccgcacccacggcgatgggcgtgttggggatggtgctcaggtggtgcgtgccgggcgcgaggacctcctcgtagagctcgaagccgcagccggcggccaccgagatcacggccttgccgggcgcggccagcatgtcgcgcacgggctcgagcacctgcgccacgaggtgcggcttcacggctaccaccacgaagtcgctcgcctgaaccacgtcctgcgccgtctcgcaggcgtgcgcgcccagcgcggccgtgctcgcctgcagcttgtcgaaatgcgcggcggtcgcgtagatgcgcccgcccggcagcgcgcccgcctccacgagcccccttgccatggcctgcgccatgttcccgaatccgatgaagcccaacgagggggcgttgacctggtctgccatagggtcctctttccgtcgcgtctgaaagcgtttccccgattgtacggcacgcgggcccgtaggtggtccgagatggcgaaccggcggcctgctcgtcagcaaaactgcacgcttgggcgggcagcctgttcggattcgggcggacggggcgttcggccctgctcgcgccggctcggtcgggggggggcgcccggcacgcctgccgcgttcctcgcgcgagcccctgcaggcgctctgcatgcgggggcacggctgcacgcgggcggccgccggcgttccgggcgctgcagggagggcgcgggtgcgccctggcgtgctacacttgccggcgacggcattccccgagagaaaggatcgcgatgatcgaccatatgagcgtgaaggtgaaggacgtcgagggagccaaggccttctacgcggcggccctggagccgctcggctacgtgcggggcatcgagtatcccggcggtctgcagctgcacgtggagggcgagccgggcgatatgtgggtggccccgctgcccgagggcgccgagcccgtccccgcgcatgtcgccttcctcgcagaggacgccgcccaggtgagggccttctacgaggcggcgctcgccgccggcggcaccgacaacggagcccccggccctcgcgactaccatcccggctactacgcagcgttcgtctacgaccccgagggcaacaacatcgaggccgtgatccatgactacgccgagtagcggcgcgggcctaggtcgctaacggagcttagaggcccggggctcgaaaatcccgggcctctcatggtggaagctctgcgctctggcagcagtattcgttgctagacaatgatagcaacgaatactgctgctaatgatcgatggcaacggagcgaaccgtcatctccgcgcttgcgccctgcgagcagtacggcgcaagcgccttcgtgccggcggccaagggcatcgcgcgcttcaagatgctcgatgccaaggagtttgccgagtgctactttgtcggtacctttgcgagcgccgcgttggccatcctcgtatcgtcgtctatccgggaggagctcgtattgagccagcgggttctcgccgccaaggccgcgagccggcagccagattcgtggtccgacgtggatgaagtcgagagacgcgaaacgttgcattgcgaaatgcggcgacgtggctgaagctgacgccatctggaacggtcgccttgccccgatgaagagcgccggacttccgtgctatgatgcggcaaacgacgcggcgaaggcgaaggagcatgcatgtacggactgaagaccgaggccagcttcgattcggcccattttctcaccgactactacggcaagtgcgagaatctgcacggccaccgttggcgcgcggtggtgcatctggcggtggacgacctgcaaaccgagggcacgatgaagggcatggtgctcgacttcggcgtgttcaagcgcgcggtgcgcgagctggccgacgcgctggaccacaccttcctcgtggaggagggctcgctcgccccggcgacgctggcggcgctcgaggccgaggggttcagcctgttcatcgtgcccttccgcaccacggcggagaacctggcgcgctacttctgcgactgcctggcggagcaggggcttcccgtgtcccaggtggagatgtacgagacgccgaacaactgcgtcgtctaccgcccgctgcagcgctgacgggaaggggtcgccgtgggcaagaaagccgcgctctttttacagtcggcgaagcaggtcggagggctcatggcgatggccgttcgctacaacggcaaggagcccgacaagcgcaagggggcctcgcaggaggagtacgccctgccgttcgagggtgcttggacggtggtcaacggcggcgtggacaaggagacgtcgcattcatggggcgtgctcacccagcgctacgcctacgacttcgtggtgctcgacgacgaggggcgcaactgcccgcccgacgccgatccggccgatcctgcctcgtactactgctacggcttgccggtgcttgcgcccgccgacggcgtcgtggcggaagtggggacgtcgtgcccgaatgcgcagatcatgcttgatgagacggtgcacttcggcggcggtgacattcgcggcaactacgttctcatcgaccacgggaacgacgagttctcgtgcctgtgccatctgaggccgggcggcgtgctggtggaggcgggccggcacgtgcaacgcgggcagcgtgtcggattctgcggaagctcgggctgcagctcgcatccgcacctgcactttcatatccagaaggggcagagcttctacacttcgccgggcgtgcccgtgcggttcgcgggcgtcgcggccgcgcctgcgccgaactatgctgcggccgatccgcggccggttccgccggcggcctacgacgacttccctccgttcctcacgcgcggcctgagggtggagccctcgggaggggaataggcccggcagcccccttgactcactcccagaagccgcgggcggcgtcgaggatgtcggcggcgggcaggaaggtggcctccgcgatgtcggcccccgtctcgtcgaggaagcgccttaccaggtggtatccgcaggcgtagccggcgcagtaggggacgccgcgcgtggggtagcccatgagcgcggccgtctcgtcgccgtagaggtaggcggacagctcggcgaggccctgtgcttccaggcctgcgcgcacgagcggcttcacctgcgcgagcgcctccggcgtggtgcgcgtgacccacggccccgccagctcctcgccgaacagctccacggcgaagttctcggccaggccctcgctcaccagcatctccccgagcgcgatgtcgtctctccacttcacgaactggaagcgcacgttgtggttcgcctcgtgcgcgagcgcggcgggcaggcggcgcatcgtcgactcgttcgggtcgagccaggcgaggatggatccggggatgccgccgtcgccgcagtagccctcgctcgcgcgcacgacgggatggccggggttcgccagcagcacggtgaagcggtagtcctgccgcggaagctcgatgccgcgtgcggagaagcgcgagagcgagcgctcgacggagcgccggcacgcgtcccagaaggcgtcgtcgccgaggaggcgcacggcttcggcgcggttttcgtccacctgggcgggcggcaggatgccgagcatctcgctggccatgaccacgtcgtagccgccgggttccgccgccttgagcggcacgcggtagcagtcccatttctccttgaagggggccatgagctcgtagcggtacaggtcgccgcgcttgccggcgggcgcggccatcatggcgcggtaggctgcgtcggagcgaacgggttgcacgttcatgaggtgtcctttctgtcgggtgcgcgccccatgctacggcctcacgccgcgtgagggtcaagggggagtctggttccgccgccggatgccggatcgttggggggggcgggcgatccgggttttttcaccggcgcccgcacggatcgcgggtaggattcgttatacagggcagaggaggtgaagcggggcttgaagaatcggttgcgggacggcgaggcgttcgatcgcttggtcgaggagcactacgacgacgtgctggcgtactgccgacggcatgcgccgtcctacgacgacgcgccggacgtggcgcaggagacattcctgcgcttcgtgcgcagcgggtgctcgccgtcggacggcaagccgctcgcgtacctgttcaccatcgcgcgcaacctctgcatcgacgcggcgcgcgcgaagcggccgcccgccgccccgctcgacgtggacgtgcccgaccgctcgcccgacgccgacccggcggccgcgtgcgcgggcagcgaggtgggtgcgctggtggaggcgctcgatcccgacctgcgggaggtggtggagctgcgcttcgaccagggattcaaggtgggtgagattgccagcgtgctgggcgtgtcgcggttcgcggtgaaccgccggctcaacagggcgctggccgagctgaagcgggggctggaaggaagggaaggctcatgagcggcgaaatgggaaaacgcgaggtcgagcagctgctgcgggcgcactaccgcgccgagcgcggcgggccggacgcggatgccaaggccgcgaccctcgcggccgtgcgcgccgaggcggccctgccggcgcgcggggcggtgcagccgatgtcgttcgccggattcgtggccgcgcaggcgcgcttcatccgcccgcaggtgtgggcggcccagctcgcgctcgtggccgccatggtggcgctctgcctgctcggcgacagcgccccgcgcgacctctcgctcgcctcgggcgtgctggcggcggcgacggtgctcgtgggcctgccggatctgctgtccagcgccgccaaccgcgtggccgagctcgagtacgcctgccgcttcgacagccgggcggtcgcgctcgcgcggctcatcgtgctgggatgctcggacgtggcggtgctcacggccatcgtgctctcggccccgcttctgctgggggccgatcccttcgcctcgctcgtgcatgcctgtgccccgtacttcctctcgtgcgcgggggcgctcgtgctcgtgcgccgctgcccgccgtcgcaggcgctgccgctcggcttcgcgtggacgctcttggtgatggcggcggcctatgcggcgttctccctggtgccggacgcgtacgcccaggcctcggcgtgggcgtgggcgctcgtggcggcggcctcggccgcgtgggccgcccgcgaggcgcgcgcgtggctcggctgcatcgcgggcgggctcgacaagctcgcgtcctcctcgaccctacgatagcgaaagaaaggagcaacctccatggaactgacgattgaccggctgagcaagcagttcgggtcgaagatcgccgtcgaccgcgtgtcggcgaccctcgggcccggcgtgtacggccttctgggcgcgaacggcgcgggcaagaccaccctcatgcgcatggtgtgcgacgtgctgcgacccacgtccggcgagatccgcttcgacggccgcgacgtgcgcgcactcggcgacgggtaccgtgcctgcctgggctacctgccgcaggatttcggctactaccccgatttcacggcgctcgacttcatgttgtacctggccgcgctcaagggcatcgaccgccacgcggcgcgccgtcgctcgctcgagctgctggagacggtggggctcgccgacgtggcccgcgtcaaggtgcgcacgttctccggcggcatgaagcagcgcctcggcatcgcgcaggccgtgctgaacgacccagccgtcctcgtgctcgacgagcccacggccgggctcgatccgaaggagcgtgtgcgcttccgcaacctcattgccagcttcgcgcaggacaagatcgtcgtcctgtccacgcacatcgtgtcggatgtggagtacgtcgccgacgagatcctggtcatgcgcgcgggctctttcatcatgcgcggcgcgccggccgaggtggtggccaccgttgcggggaaggtgtgggagtgccacgttgacgtgcggcaggccgaagcgctggccgcgacgagctgcgtgggcaacgtccactacgccgccgacggccatgcggtggcgcgcgtcgtggcagacgagccccccgtgccgtgcgcgcgcccgctcgagccgacgctggaggacgtgtacctccatgtgttccgagacgaggcgatggagcccgtcgagcccgttgcatccgtttcccaaggaggccgacatgcttgacctggtgaagttcgagttcaagaagctgctcgcgcggcgcacgtcgcagatggtgagcgcgggcatcatggcgctgctctgcgtgatcatggcgctcaacgtggtgcagacgaagacgtcgtcgagcacgggagagattctgggcggcaccgccgccattgcccagcagaaggcgcgcgccgaggcgcacgagggcgtgctcaccgtcgagcgcgtgcaggaggaggtggccgcgtatcgggcgctcgcgttctcgaaggtcgatccggcccaggtggagggcctgagcgccgaggccgcgtacgccgtcatgaaggaggcttacgacgaggacgagttccgcgccatctacgacacgtactactcgtacctgctctcgccgtggatcgcgggctcgatggagcagtaccaagtggcggcgcagttgggcgacgaggacgtcgccggcttctacggggccgtcgcggattcgctgcagcgtgcgctcgacgacggcatgggcggcacctgggcgtactcggacgccgagcgcgcctattggacggagaagcaggccgcggtgggcgagccgctctcgtacggctacgccggcggatggggcgacgtgctggcgtgcctcggcttcctctcgttcgcgatggtggcggtgtgcgtggtgctgacgcccgtgttcgccggcgagtaccaggaccgcaccgacgccgtgctgctggctgcgcgctacgggcgctccaagctggtggcggcgaagatcgtcgcgtcgcttctgttcgccaccgcgtactatgcgctggcgacggccgtcatcgtgggcgtgacgctcgcgttcttcggcgcggagggcggcgatctgcccgtgcaggtgctggccctcggcatcccctacgacctcacgatggccgaggccgcgtggacggcgatcgggctcggctacctcatgacgctcggcctcgcggccctcacgctgctgctatcgtcgaagctgcgctcccagctggccatcttcgccgtgtgcgccgcgcttgtcttccttcccggcatgatcccctcgggcggcagcggcgcgatcctgcacgcgctctacctgttcccgatcaacgcgttgaacgaccaggtgctctacaactcgcttgtgtcgtatcccctagggccgcttgtgatcgacctggtgggactgctcgcgatcctgtacgcggtcgtgctggccgtttgcgcgcccctcgccgcccgcgccttccggcgacaccaggtgatgtaggggcgctgccgtcggtataatggaggttgacgtaagcgggtgcggcgaaaggcgggtgcggcgatgctggagcggggattcgtggtcgtgccgacaggcgttgcgctcgtggcggttctggtcgtgtgttttgtgcgccgaacaggggcgagacggacgtgcctttacctggcgcttaccgcctatgtgggcgcggtggcggcggtgacgctgttcccgctgccggttgagggcgggatgggctatgcgcctacttgggggatctcgtacaatctcgtgcctttcgccggcatcgcgcgcacggtggctgatgcggcgcaaaccggctggtggtggtcgatcgcgaccatcatcgtgggcggcaacgtgcttatgttcgtgccgctgggactcatgcttccgctgctgtccgaccgcctgcgccggctgcctgcggcggcgctcgtcctcgcagcctgctcggttgccatcgagctcgcgcagttggtcgtggggctcgccgtggcaggttacctgtaccgcgtcgtggacgtggacgacgtcatcctcaacgtcgccggcggcctgatcggcttcggcctgtggaaggcgtgggagcgccttgccgcacctaagcgggacgaactcgtttaaggcttggcggatgacagtctgcggctccggctctgcgggctttgctacggaattcgggcgcctgtgtcaaaaaacgagcagtttggcaaacctcctccaaggccgctacgcttccagaaaacgtgagctagggaaacgcggtctggcttctcgcgtcgcgtcgttcaagctgcttttcgattgccaaaccggccgttttctggcagaaggccccagttttggcgtcaccgcgcctcgcgtcctgctgccgtttccttctccaacagcttctccagcgtcctccaggccagctcggcgcacttgacgcgggcgggcatgcgggagatggtcgccagctcggcggcctcgtcgaggtcttcgcgttcctcgtcggtgagcgggcggcccttgatcatgtcgaggtagaggccgctcaggcggcgcgcttcgtcgaccgtctcgccggtgacgaggtcggccatcatgtcggcggccgcctggctcacggcgcagccgtggccggtgaaagcggcttcctcgatcacgtcgccgttgaggcgcagcgccagcgtcagctcgtcgccgcagctggggttcacgccgtcgtgcgtgcacgtgggctcgtccatctcgtacttgtagtcgggatgcgcgttgtgctccatgagcgccgcggtgtagatgctagccattgaaggtcctccaaacggtgtccaagccggcgatgagcgcgtcgatatcgccctcgtcgttgtagaacgcgagcgacgcgcggcagcacgattccacgcccagccaggcgagcagcggctgggcgcagtggtgccccgcgcggatggccacgtcgtgctcgtcgaggatgctggccacgtcgtgcgggtggatgccgcgcacgttgaagctgatggcgccgtggtgctgcgccgggtcggggtggccgatgatctcgaggtacggcagcgccgccatgcgctccatggccgtgcgcacgagcgcctgctcgcgcgcctgcagcgcgttccagccgatgccctcgaggtagccgagcgcggcggcggtgcccacgatgccggcggcgtcctgcgtgccggcctcgaacttctcgggcactggggcccatacggccccgtcctgcgtgaccgacgagatcatctcgccgcccgtgaggaagggcggcatggcctccagcaggtcgagcttgccccacagcacgcccacgccgaagggcccgagcgccttgtgcgccgagaatgcgaagaaatcgcagccgagctcctgcacgttcacgggcatatgcggcaccgattgcgcgccgtccaccaccatgaagcccccgtgcgcgtgcacgcgccgggccatggccggaacagggttctcgatgccgaggacgttcgacacctgcgcggcggcgacgatcttcgtgcgcgggccgatcttcgcgtcgagctccgcctccgagatcacgccgtcctcgtcggggaagaggtacacgaggcgcgcgcccgcggcgcggcaagcctgttgccaagggatgaggttcgagtggtgctccatgatggtgatgcacacctcgtcgcccggctcgagcacggtgggcgcgaaggcgagcgccacgaggttgagcgcctcgctcgcgttgcggcagaacacgatctcgcgcgcgtcggcggccccgatgaaccgcgcgacgtgggcgcgggcctcctcgatggcctcggtggcctccaccgacaggcggtagaggccgcgcagcgcgttcgcgttcatggtctcgtagaagtcgcgctgcgcgtcgagggcgacggcggggcgctgggccgtggccgcgctgtcgaggaaggcgaggtcggggttggccgccagcagggggaagtcctgcttgtaggggttcgcggcgatatcgatcgggttgatcatgcgacggcctcctctatgtcgatcccgcgcgcggcggcgaggcgggcgacggcggttcgggtgcgttcgtcgggcgcgtcgatggccgctccttgatacgtggcggtgatgaacaggcgctcggcgtcgtcgggcgagattccgcgactggccaggtagagcagctgctcggggcgtatgtggccgatggtggctccatggttgccggccacgtcgtcctcgtcgcagaggatgacgggcacggtgcggttcaccacgcgctcgtcggccaaaagcaccgtctcctgctcggagccgacggagcccttgcaaccgtgcacgagctcgatggtgccgcgcagcgtcttgctcgagcggccagccagcacgccgttcgcgtcgaggttgcagacggtgcggcgcccgcgctggtggacgacgtagttgaagtcgcgctgctggtcgccgcgggccaggtagcgcgtgtcgatgtcgaggcgcgcgtcgtcgccgcgcaggtcggcgtcgagcccggtgtaggagcggcccgcgcccagcacggtgtggcgcacctgcacgcgggcgcgctcgtcggccacgatgcccgcgtcgtcgagggcgatccacgagtcgtcgagcgtctgcgtgctcatgatgtccacgcgcgcgtcggcacccgcgaacacacgcagccgcgtgcccacgacgcccgcgcccggtgcgggcgaatcgagcgcgatggcgagcgacagcgacgagcccggagcggcaacgacgtcgatggcggccgcgttggccgcgccgtccacgccctcgacgcgcaccgtggcgcaggtgcgctcgccagggcgcgtggcgaacacgatgggctcgcccgccacgaactcgaggtactcccgcgcctcgtcccccatgcccgtggcgaacacgtcggaaggagcgaggtaaaggttctcaagcgcctgctgctggtagagggagagagccccgtcctctatggctgcagacggattcgcctggtcgttaacctgcgaaagagctccgctttccatggctgcagggaggacttcttgatcatcaacctggtgcgcagccgacgtcgggacgcttgcgggttcaactgcggagtcaccgcgatcggccgcgcgcttgttggtctcatccccgagctcgcctgcggccatggaggggggagggttacccgcggacgtgatgggcgaggtagccacgggaagggggtcggccgtgcgcatgttgatcgcaccctcaaaggcacctgcgtccatggcctccaaagcggcgtcgaacgcatcagcttcccctcgcagcccttcctcgcatgacacttccgccttttgggcggcgctcagctcggcgggcagctctatgtccgcatcgttcatcttcagccggtgccacgtgggggcgggcatcgcgttcgcgtgttctatcgtgagggttcccattatccgatggccccttccatttcaagcttgatcaggttgttcatttccacggcgtactcaagtggcagctccttcgacacggggtcggcgaagccgttcacgatcatcgtgcgcgcctcctcctcggacacgccgcggctcatcaggtagaacaccttgtcgtcgccgatgcgcccgatggttgcctcgtggccgatgtccacgtgcttgcaacggatgtccatggccgggatggtgtccgagcggctgaggtcgtccagcatgagcgactggcacgacacgctggcggcggagttccgcgcgttctcggtggccacgatggacgagcggaacgtggacgtgccgccgcccttcgagatggacttcgtctccacggtggccgacgtgtcgggcgcggccagcaccaccttgcagccggtgtcgaggttctggcccgcgccggcgaacgtgatgccggtgaagctcgacgtggacttgcgtccggcgaggatggacatggggtagaggtagcccacgtggctgccgaacgacccgctgatccactcgacggcgccgccttcctccaccacggcgcgcttcgtgttgaggttgtacatgttcttcgaccagttctcgatcgtggaatagcgcagggaggcgcgcttgcccacgaacagctccaccgcgccggcgtgcaggttcgccacgttgtacttcggggccgagcagccctcgatgaagtgcaggctggcgtcgtcctccacgatgatgagcgtgtgctcgaactgccccgcgcccttcgcgttcaggcggaagtagctttgcagcgggaagtccagctgcacgcccttcggcacgtagacgaacgatccgccgctccacactgcgccgtggagcgcagcgaacttgtggtcggcaggcgggatgagcgtcatgaacttctcgcggatgagcgcctcccacttcggctcgcgcagcgcctcctcgatacccgagtagacgatccctaagtctgcggccgttttctgcatgttgtggtacaccagctcggagtcgtactgcgcgccgacgccggccaggtaggcgcgctcggcctgcggtatgcccaggcggtcgaacgtgttcttcacgtcgtcgggaaggctgtcccaatcgctcgcctgctcggcgttcggcttcacgtacgtcacgatgtggtccatgtcgaggccctcgaggccgggcccccagtcgggcgcctccatgcgctggtaggtgtcgagcgccttcaggcggaagtcgagcatccaggcgggctcgtccttcttggccgagatctcgcggacgatgtcgggcgtgaggcccgcatcgaggtagcgggaggcgtcggtcgcgtcatgcacgtcgtacagcgtgcggtcgacgtcttcgacgtaggtgcggaattcttttggcatgcgggcctcctagcgctcgatctgctcgaattgctcgaagccctgctcgtcgatggcgtcgatgagcgacgcgtcgccctcggccaccatgcggccgcgcaccatgacatggacgcggtcgacgtcgaggtgctcgaggatgcgcgtgttgtgggtgatcaccacgagcgcgccgccggtcgagcggcggtacgcgtcgatgccgcgggacaccacgccgagcgcgtccacgtcgaggcccgagtccgtctcgtcgaggatggccagcttgggcgcgagcagcagcaattgcagcatctcgagcttcttcttctcgccgcccgagaagcccacgcccagctcgcggtcgaggtaggccgggtccatgtccagctcgtcggccagcgcgcgcacgtgcttcttgaactgcttgcccttgagctcgccgtcgcgtccggccatcgtggcgcgcaggaagctggacagcggcacgccggggatctcgacgggtgcctggaagctgaggaacagccccgcgcgcgagcgcttgtcgggggagaggtcggtgatgtcctggccgtcgaactcgaccgtgccgccgtccaccgtgtaggcggtgtcgcccatgacgacgtggccgagcgtggacttgcccgcgccgttcgggcccatgatgacgtgggtctcgcccgcgcccacgtcgaggtcgatgccgtgcaggatgggggtttcgtcggccgaggcggaaagcccgcggacggagaggagcgtatcgcgcgtcgtggtcgtcatgtgctgtgcctttcgttaatcatataagtttgctagggttaagataagggcaagcgggaaattgtcaagacttaatcctacttgtttgctagaatttacaaaagcgattggatggccaggggcgcaggatgcgcttggggtaggctggacgtggttgcgggatgggaaaggacgaaagatgctcgtgtcgacgaagggacgctatgcgctgcggctcatggtgtgcgtggcgcaggcgggggtggagggcaaggtggccctgcgcgaggtgtcggagcgcgaggacatctcgctcaagtacctcgagcagctggcgaggccgctcgtgcaggcgggcctgctgcgcagcgtccgaggaaaaggcggcggctacgcgctggcccgggaggcggcgtccgtgcgtgcgggcgacgtgctgcgcgccgtcgaggggaccacggcgcccgtggcgtgcctcgacttggaggagggcatggcctgcccgcgcgcgggggagtgcaccaccgtgcgcttctgggccggactcgacgacgttatcgagcgctatgtcgacggggtcacgctcgccgacctggccggcgcgtgaccccgcgcggaggcaacgccgcccgggccgtagtccggaaaatgccgatgtccgcggacgctcttcagcgcggcgcaggttcggtggcgcctgcaaggctgtcggcacgctatgcggtcggcgcgccccggccgctagaacggcaacgacccgggtacgcaccgcctccacccgcgctccgtcggctgcgcggtgcggggcggctgctatactgcatggcatgaagaacctcgcatggcagacatcccagggctcccgcatcgtgcgcgtcggcgtggtgagaagcgcatgctatgcggtggagacgggcgacggccggcgcttcctggtggacacggccgtgcccggcgagcgcgcggcgatcgaggcgcagctcgaaaggctcggcttcgacgcgttcgacgccatcctcctcacgcatgcccacggcgaccatgccggcaacgcggctgcctggagccggcggttcggctgccccgtcttcgccccggagggcgaggcggaccaggtgcgggccggccgctgcgtcctgcccgccggtgccacgccgctcggcgcggccgtgatggcggtgcagcgccgcctgcatgtctgcgaggcgttcgagccggtttccgacgtgcgccccctgccgctcgacgagggcgccttcggaccttgccttaaggtggtagcaacgcccggccacactgagtgctctgcgagcttcgtggtcgatggagaggtggccctcgtgggcgacgcgctcatccaccgcgggaggtccgtcttcccgccgttcgccgaccggccggagcgcgtgggggacgcatggcgcaccctgctcggcaccggcgcggaaacgttcctgtgtgcccacggcggccccgttggccgcgcgctgctcgagcggagcctcgaggcgctcgagcgttcgggccgcagcgggcgcgcctgaccctcgaggcgcgcgcccgccgtcgcgggccatttgcctgtaccgcgtcgctccgccgcagtgccccgcgctcggcgtatcgggtgcggcgggcgctcttcgcggttgacgcgcggcggggcgcccggtatgatggcgagccgggccgcacggcccgcaaacccgatcgacgaggtctcttccatgactgttcctcccaaccggtaaaccacgcgatacatccgtcccatccgctgccgcgcaacgtgcggccgtcttgcgatgggcgacatccgtccgtccgcccggccgacaagcggcatgcggtcggttccttgcgagctatgatcgcccgtccggtgcaccgcctcctgcggcgcttccggcggacggtgcctgcttccctgggccggcgcgcaagcacacggccgcatcgcggacgggcccaccggctgaaccggacgatcagagaggctttccctatgaaaaagctgaataacggcgtggtgccgcctgtgcctgccttccgaatcgagcatattcgaattgcgaaggaaggcggcaaccatcatgaacacgattgtatggcgcgtggaggcgaccggcgcgccggtcgcgctgcgcccttgtggaacctgcggtgctgacgcgaagttcacgtccacgggcatgttccgtgtgaatgcccagaagaagcggttagacgtgtggctcgtctaccgatgcgccacgtgcgggaacgtgtggaacagcgccgtgataagccgcatgcgcccgggaggcatcgaccgggaggagctcgggcggttcacgggcaacgatcctgcgacggcgctgcggtgcgcgctcgacgtcggcctgctcaggcgcaacggcgcgcgccggggcaaggtcgccttcgccgtcgagggcgacctgcccgacggccgcgaggactgccgggtcgagatcgacggcggaggccttgcgggcctgcgcctggccgaggtgctgcgggccaagctgggcgtttcgcgcagcggtctcgcgcgcctcgtggaggcgggcgacgtgagcgccgacgacggagccgacgtcctcgccgcgaagctccgcccgcaccaagcaatcatcctgcgcccacggcggagctgacgggccgccgcagggctacggcgggagggggaggggaagcacttgcccccccccctcccattttttctccctcccacgacagccgcctgcctctatcggaagcctcggcggcgggggcgccgtgcgccgaggcgcctcgcgtcatcgcgtacctttatcctctgccctccatgccgcgccccgtcccgcattgcatcctgcgtagcggcgttccgcctctgcgaaggttatgcgccggcaacgattcccccttcgaaaatccgctcgcggccgaaatcgaaccggccgaagggcggcgcgcccggggttccttgaccttgtaatcgttgcaacccccatgatgggcccacggcggccggcaccctgcgatccccgagcaccggccgtcctctgcagaacccgtccagaccgatcgacgacgagacccccaacgaagatagaggaacaagacatgagctgaccgcgaaggaggcacgccatgaacgcgaagaagaaagcaaccgatacgacgaagcccgcaacgagtaccgtctccaaccgtccccgcgccgctttgagcgccctgttggtccagaccgcgcacgccgaggcgcgccgtccggccccgtccggctcccgcaggctcgacccgctggcccgcatcttcgacgcgaacgccagccgcgccgccaagatcgcggccgtgtcccggctcgccgacccggtgccgctcgttacccttgccgccagcgatgcgcccgcctacctgcggagaaacgcgctgctgcgcctcgacgagctcatggacggccgcccgctcgcccgcaccgacctcgagcgcctcgtgccgtgcctgcgcgacaaggagctcatcgccttcgccgtcgtgctcatggacatcgccgacttcgactggtgcgcccgctgcgacgagggcacggtggacgcgctctgcctcgccctgcacgagtgccagggcctgcacgagaccgtgctgctcgaggacacgttcgcgcatcttgtccacacccgcccggacctgggccggaacctgcgcgcctgcagtcccggccccctgcacctgaaggccatgtaccagcccgtcgtcgcccacaacgtggtgtacgtcgacctcgcccgcgaggacaacgtcgcctaggccgcgcccgcgacgattccgcgctttccgccccccaagacgagtagaagggaccctatcatggagcataacacccgcgccgccttcatcaggcagatgctcaaagacgagagcacgatcgagccgtcccccgagttcagctacaaggccctcgtgaagagccgccaggactacgacgagctgtaccgccgctcgatcgacgagcccgaggcgttctggggccagatggcccgtgagacgctggactggtaccgtccatgggacgcggtggaggagtacgacttcgagtcggcccgccccttcgtccgctacttccgcggcgccgagctcaacgcgtccgccaactgcctcgaccggcacctggagggcccgcgccgcaacaaggcggccctcatctggcagggcgagccctccgaagaggtcgaggtgtacacctaccagcgcctgcaccgcgaggtgtgcaaggccgccaacgtcctcaaggacctgggcgtgaagaagggcgaccgcgtggtgctctaccttcccatgatcccccagctggccatcgccatgctggcgtgcgcccgcatcggcgccgtgcactgcgtcgtgttcagcggcctgtccgccgatgcgctgcgcgaccgcatcctcgactcgggcgcccgcgtggtggtcacggccaactacggctaccggtcgggcaagatcctgcacctcaaggacctctgcgacaaggcgctcgaccagtgtccccaggtgaagagctgcatcgtcgtgcgccgcatcgagaagcgcaccgagatggccgccgagcgcgacctgtggtgggacgacctcctggccggcgccgccccctcctgcgagcctgcgcgcatggaggcgaacgagccgctgttcgtgctctacaccagcggcagcacggccaagccgaagggcatcgtccacggcaccggcggctacctgctgtacgcctcgctcaccatgaagtacgtgttcgacctgaaggagacggacatctactggtgcacggccgacgcggggtggatcacggggcactcgtacctcgtgtacgggccgctcgccaacggcgccacgtcgctcatgttcgagggcgtgcccagctacccgaagcccgaccgcttctgggaggtcgtggagaagttcggcgtgaacatcctctacacggcccccacggccatccgctccatgatgaaggatggcgagcggtgggtgaacggccatgacatcagcagcctgcgccttctggggtcggtgggcgagcccatcacgtcgaaggcgtggctgtggtactactccgccgtcgggcggggccgctgccccatcgccgacacgtggtggcagacggagacgggcggcgtcatgatcacgtcgctgccgggtgcggtggacatgaagccggggtcggcggccctgccgttcttcggcgtggccccgcgcgtcgtgcgccccgacgggagcgaggccgcgccgaacgagcccggaagcctcgtgctcacgcgaccctggccgggcatgatgctgggcgtgttccagaacgaggccgcgttcaaggacgtgtacttcccccagccgggccgctacctcaccggcgacggcgcctaccgcgacgaggacggctacctctggatcaccggccgcatcgacgacgtcatcaacgtgtcgggccaccgcatcggcacggccgaggtggagagcgcgctcgtgtcgtacctgcaggtggccgaggcggcggtcgtgggctgcccgcaccccgtgaagggcgagggcatctacgcctacgtcacggtgaaggagggtacggtcatcaacgatgatttgcgctcccagctggtgcgccacgtgcgcgagagcatcgggcccatcgccacgcccgaccacatccacttcacggccgcgctgccgaagacccgcagcggcaagatcatgcgccgcatcctgcgcaagatagccgcgcaggagaccgaggacctgtgcgacatctccacgctttccgagccctcggtggtgtacgacctgatagaggagacgaagcgcctgagcgcctaacggtttccacgaaggagaggggcccgcgcgcgggcccctcctcatgccagccgggcgtgctcctcttcccggccggcctgtcgcgtacgtacgcggacgactgcggcatccccggaacccggcgccccctacgccccaccgcccctttcggcggcgtcctccacgtccacgagcaccgagatgtgcagaaggtagtcgtcggccgagtccgacatcaggtacgagttcatgtccagctcgtacagcggcccccgcatcaggaagccctcgcgctccacgtaggccagcagcttctcgtacgagcgctccaccgtgctcgtgccgccctggtgcagcacgaccgcgtagttgcccttcggcttgcattctacgcggtccccgaggcatgcggcgtcgcggggcggcgatatccaggtgacgagcttggtgtagtagaactcggaggggtcgtccagatcggggatgtcgatgacgcgccccaaggggaacgtggccacgcccgccctgttgcggcagaagtccgaatgctcgctcacggcctgtgcgtaggcctgctgcgagcgctcgcggcgcacctcggtcgtgaggaaccacgtctcgtcccagtacgacagccgcggctgctctttggggaacgtcacggcccgctgggtgaggtagtgcatcttctccatcatgccgatgcgggcgtccaggatgtcgcgctgctgccccatgcggtcgatgctcgtctggatgctgtccaggaacagttgggtcgtgcggttgtccaggtactccttgatctccttggtggacatgcccgcgtccatgaagaagcgcacgacgtcgaacaggtacagctgcttgagcgagtagtagcggtagccgttgccccgcacctccttgggcttgagcaggccgatcttgtcgtagtgcaccagaagctcccggctgacgttgcacatctgggcgaactcgccggtggagaggagcaggggatgctgcatggcgacctccttatgccgccggtcgtcggagatcgcttcgcagcggctccggccgggcggctcgtccgggcggctcggggggcgcgcccgggcttgccatttcggggattctaccatgcggcggcggcgtcgcgcctgatggtcaggggagcgtagccgatcctcccgccagtgcccggcaaggcatgcgccgttgctgcatggttacccgcggtccttgcccaagtgctcgatgcagcgtagcccccaggcctcgaactgcgccagcaccgggcggaactcctcgccaagcgggctcagcgcgtactccaccttgggcggcacctgcgggtactccgtgcgcgtgatcacgccgtactcctccagcgagcgcagctgcttcgccagcgtggcgtgcgtcatctcgggaaggcgccgctgcagctcgttgaagcgcaccggcccgtcctccagatggtgcaggatgacgatggaccacttgcctcgcagcacgcgttgcgcggtgacgtagggacatatgccgaacaggtcctgggacatggctcctccttgcgcttcctctccgtcgtccccgcgacgaggtgcttcctttcgggataccgggtatccgaaaagatcgtacttgtgggctagtatacacgatactaaagtaacctatgtcataaaaacgaactgtaaagttcatccggggaaaggaaaagatcatggagaagaacgacttcgaggccatcgagctcggcaaaggtgccgtgcgcgtgtacgacttgggcgcggcgcggctccatgcctaccagacgaacgatccgctggccgacgaggtgttcgtcgtggagaggggcggccgcggtttcgtcatcgagctgccttgcttccgcgacaatatcgccgagctggaagcgtacgtgcgcgggcaggacattgccgtcgagggtatcgttgccgcctaccatatggccggcggcagcttcatgcccggcacgcccgtctactccacgggggaggccgaagcctacggtcacgagggcggtggcaaggcgctggtcgacgggttcgctgcagcgttcggcgaggccttcgacgcctcggtcgctcaggtgacgaacctggtggaggaggccgagcttgagctggcgggcgtgcgcatgcgcctcgtgcgcaacgccgatgccttcgacctggagctgcccgagctgggcgcggcgtacctgcacatgctgggacacgactgccactccatcgtagccggccctgcgcatgccgacgcgcagatcgcgcagctgcaaggtcttgtcgaggcgggcatcgacctcatcctgaccagccattacacgccggaagacctgaaagacgcccgcacgaagatcgcgtacctggaagagctcaagcgccttgcggccgccagcaccaccgccgagggtttcaaggccgcggtaggtgcgcgctttccctcctacggtggtgcgaactacctcgacatgacggccgggttcttcttcgtgtgacgacgagcctcgcggcgcgtctggcggccccggccgttgcggggcggtgcggaaaagcgcatactcgggatggacgaaaggagcttccatggtgcaggtgagcgaagcgggcgcggcgggcggcgcgcgcgggcgggacgaggacgtggcgtacctggtgcggaacctccgggaagagcggggcctcgtgcaggcacctgccgagggccggcccttcgacgaggcgttcgccgagtttcgggcgctcgtcaacacgcgcgagccgcgcccggcggacgagcggttcctggcggtgcaggaccggctgctgcgcggcctcattgcgcaggcgggcatcgcgcgcgtcgccgagctgccgccgacgccggtcgacgcgcggctttccgtgtggcgcggcgacataaccacgctcgaggcggacgctatcgtgaacgcggcgaacagcgcgctcctgggctgctggctgccgggacaccactgcatcgacaacgccatccacacgttcgccggcgtgcagctgcgcatggcgtgcgccgcgctcatggagcggcaagggcatgcggagcccaccggccgcgtgcaggtcacggacgcgtacaacctgcccgcccgctgggtgctgcacacggtgggccctatcgcaaacggcgcgcccaccgaacggcaccggcgcgagctggcctcgtgctacgagagctgcctcgaggccgccgcggcgtgcgggtgccgttcggtcgccttctgctgcgtgtccaccggcacgttcggctttccgcaaagggaggctgccgagatagccgtgggcgcggtgcgctcttggctcgaccggcatgccggggagggcgcggatgccgtcggcggcactcgcggcgccgacggcggggcggctcggggcgctgcaagcggctcgggagcggcaggttcggcgaacgcttccggcccaggcagctccccggaggcgcccggtgcgcccagcggcctcaaggtggtgttcaacgtgttcggcgacgaggacgaggcgatctaccatgacctgctcggctagcggcggggacgcggcgcgcgccgccgagctgctccaaggcgcgcgccgcgtgctcatcggcgccggcgccggcctgtctgcggcggcggggctctcctacggcggcgagcgcttcgtgcggaacttcgcccccttcatcgagaagtacggcatgaccgacatgtacgcggcgggcttctacccgttcccgtccgaggaggcgcgctggggctactgggcgcgccacgtgtgggtcaaccgccacgagccgggggcgctgccgctgtaccgcgcgctgcgcgcgttcgcccgggagcgcgacagcttcgtcatcaccacgaacgtggacgcccagttcgagaaggcgggcttcccgcccgagcgcctgttcgccacgcaaggcgactacggcctcttgcagtgcgcccgcggctgccacgatgcgctctacccgaaccgcgagctcgtggcccagatgctcgcgcgcaccgaggactgcctcgtgccgtccgacctcgtgccggcctgccccgtgtgcggcggcccgatggccgtgcacctgcgcgtggacggccatttcgtggaagacacggcttggcgcgccgcgcaggagcgctaccgccgcttcgtcgagggcatggtgcgcgagcccgccgtgctgctggagctgggcgtgggatggaacacgccgggcatcgtccgcttcccgttcgaggcgctggcccgcgcgacgggagccccgctcgtgcgcttgaactacgatgacgcgcacctgcccgagggcgtgccgggcgtgggcctgcagggcgacatcgccgagctgtggccgcggatcgcgagcgcggcggagagggggaagctatgacggtcgacgcagatttctgccttcggtacctacgcgaggtgcgcgacgtggccttcgccaccgtcgacgaggacggcctgcccgccgtgcgcgtcatcgacgtcatgatggtggagggcggccggctttatttcgtggccgcgcgcggcaaggcgttctacggacaggtcatgcgcacgcgctatgcggcgatcgtaggacagtcgcccggctaccgcacgtgccggcttcgcggtccggtggagcatcccgacgatccggccgagcagcgccggctcgtcgaccgcgtgttcgagctcaacccctccatggaagagctctaccccggcgattcgcgctacgtgctggaggcgttctacctggagcggggccagggagagttcttcgacctgggccgccgcccccttttccgcgcaccgttcgcactgggcggcggccccgtcgcgcgcgagggtttcgcggtctcggacgcctgcaccggctgcggcgcctgcttcgcggcttgtccacagggctgcatcgcgccgcggcccgacggccgcgccctcatcgagcagcaggcgtgcctccactgcggccgctgccgcgaggtgtgcccgtcggacgccatcgcgtcgcggtagcggggcgtcctcctgcgctcccggttcgctcttcttttcaggtagaatgatggggacagaaagaggctgccccatgaagaactccccgataccccatcccgccaacccggccgtgcccggcgagctggcggcggtggacgcgctcgccgcatggatcgagcgcgagatggacggcgacccgctcgtcgcgcacgtgctcgtcgcaggcgacgcagccgtgcgcgccgacttctcgctgctcgagctgtccgaatcgcgcgtcgagggctgccggtacgcggcctgcgacttctcccgcgcctcgttcgccgacgtggcgttctccggctgcgatttctccaacagcgatttctccgaggcgaacttcacgcgctgcacgttctcctcgtgcaagttcacgggagcgaacttcaccgaggccgtgctcgcccgcaccgagctgcgcgactccacgctgtcctacgcgtcgctcgcgaaggccaggctgaccgacgtgctcgcgcgtgctgacgatttctcgcacgccgacctgtccgaggcgcgacttgcgcgcaccgccttcgacgacgtgcgcttcacgggaacgagcttcttccgcacctcgctcgccggcatcgacttcacaacctgccagctggccgatatcgtgctctccgacgccatgggcgagctcaagggctgccgcatggacctctaccaggccgccggcatcgcccagcgcctcggcgtggtcatcgccgactgacggcgcagtccggaggctgtcggtcggcgatgccggtcgatatcacccgaaaagcggcacctcgcccgaaaggaaccgctcaagcgggcattccgccgatcccacgacgagggttcgggcttcggggaagcggttgacgaacgccgcgagtcccttaagcgacttaacgcggccgctcttcacctcgacggcgacgctctcgcctgcttgggagatgacgaaatcgacttcgctcgtgccttctcgccaccagtgcacgtcgaagcggcgttcgttggcctgcgcgagcaggtaggcacccacagcgctctcgaccaggtgtcctttgcgttcggggtcggtgaggaggaagtcgcgatagggcccgtatgtggcggtcatgagggacgtgtcgtacaccatgagtcgcggcgagctcgccttttctctgatgagtttcggatcgtacttttgcaggccacgcaaaagccctgcgcttcccagcaagtcgaggtaatgggcgatggtcgtggtgttgcccgcatcgtccatctgcccgagtatcttgcggtacgagagctcttgccccgaatagggcgcgccgatttggaacagcttgcgcatgagcgccggcttgcgtaccgcgtcgagggcgatgacgtctttcgcgatgctcgggtcgatgaccgagtcgttcatgtaggcaagccatcgctgctggtcctgcctgagcggggcgcttccgggataacctccgaagtgcaggaactcgtcgagcgtatatccgaacgcctcccggcactcggcgaagctccagtgagtgctgcgaatgacttcgaaacgcccggtcaaaccttccgtcaaccctttttgcatcagcggggaagacgatccggacagcatgacgcgcaggtcgatgccgctccaagcgtcctcgtcccacagctctttgactgcggcagaccattggtcgaccagctgcacctcgtcgataacgagcaaggcgctgggcgagtcgggtgttaccaggttgcgagcctgcacccactgggcacgcagccagtcacggctcgatgagtcgatgctggcaagcgcaatgtggcgtgggagatccacctgctccagcgcctgcctgatggcggtggactttccggtttggcgcgggcctagagcatttggatgtagcgtcgggtctcgttcatgcgcgagacgagtgtggacaccacaggtctacggaactctgccatgatttcctcctattgagcaaatttgctcaatagacaaaaaggcatgccgaacgtcatcggcaggctgccggcatcgcccagcgtgtcggcgcggccgtcgtctactggcggcgcacgggtcggggcacatcgggctgtgctcgcggccgcaatcgcaaaggccgtgtgaaccctgcccctgcttgccgcgcgcctcgatctcgtcatgggcctcgatgatggccttcttgaccgccttcttcaccaccaggtatccgatggctgcgaacagtgcgattatcagtgggtagacgaccaagatcagcagctccggcacccccatgcccagtattctcatgtcatccgcctttccctcggtggcgacgatcataccatctttccgttctgccttatgccctcgtacgcgatcgcccggccccgcgaccgtcctgcccggtgaccgtccccaaagaacaacctcgctcgcggtcgcctgcaccggctcccattgcccggtgattggtaaaagctcgctcgcaccgctttcgataacgctgccgcgttgccggtgtgttgaccggcggtgtgaaagctgttggttgcctgcgtctgcgaccgcgcgggacaatggggacgtcgatcccgatgcagccgcggcagcctgctgcgcgccgcaggaagcgaggtccccatgatcccgaaccagtggtacgccgtcctgtcgtcctccgaggtgaggcgcggccgccccgtgggcgccgtgcgcttcgggcggcgcctagtgttctggcgcgacggtgagggcaacgtggcctgcctcgacggcacgtgctgccaccgcggtgcggatctcgcggaggggcgcgtggaaggcgggcacgtgcactgcccgttccacggcctgcgctatgccgccgacgggcgcgtggtggccataccggcgaacggcctcgaggtcgaagtgcccgagaacttccgcgtgcgcccgtggctcgcggtggatgcgttcggcttcatctgggtgttctacggcaagcccgaggacgcaccggacgacctgccgatgttcgacgagttccgcggcggcttcccctacgccgagcgctccgaggtgtgggacgtgcattactcgagggccatcgagaaccaactcgacgtgatccacctgcctttcgtccatccgaacaccatcgggcgcggccataagacgctcgtgaacggccccgtcacgatgtgggacgacgagacgctcacgttctacgtgaagaacgagcccgaccacggccaagagccgcaggcggcggacgagatcgaggattggcaggagctgaacagcctgcagtaccgcgtgccgaacctctggcagaaccgaatctcggacgacttgcgcatcatggccgcgttcgcgcccgttgatgacgagcacacgaagatctacctgcgtctctaccagcgcatggtgaaggcgccggtgctgcgcggcctcgtgtgcgcggccggcaacgtggcgaacggcgtgatcctgcaccaagatcgccgcgtggtgctcacccagcgcccgaagaagaccgagcttcagatgggcgagaacctcctgcgcggcgacaagcccgtcctcgagttccgctcccgccgcgacgagctcaagaaggccgcggaggtagggaagaggtaacccctcaggagggatgtctgtgcggatcgccgactagcagcccgatgactcgtggccccgggcgtcacccctgcttgccgcgcgcctcgatctcgtcgtgggcctcgatgatggccttcttgaccgccttcttcaccaccaggtacccgacggtggcgagcaatgcgatgaccagcacgtacatcaaaactatcatcagctccggaacccccccccatgcccgctatcctcatggcaaccgcctttccctcggcgcgcagatcatactgtctttctcccggcggcgctgcgcgtcctgcgggaaggcgcttcggggccggtccgtgcccccgcgctttgccgagggctggcgtgctgcgcccatctgcgataacatacgggtaacgaaacgaggcgcttcgctgcggaagcccggaccggcttccgggaggccccgaatgccacctggcgggaaccgcgccgtccgtccggcgccgtccggcttgcgcgcgccgcagtaagagaaaggctggctgccatgagcaccaccgctcccgcgcgctccgccctgctgctgcgccgtgcgctttgcgccgccgcgctcgccctcgcgctcgctgcggcggcctgcttgcttgcctgcgcttcgcaggagtcctccgacggcaacggccttgtgaggtcctacgacgaccaggagacggtcacgctgtcgttcttcgcgctgtccgccgtgcccggcatgtggccggacgatatcgtgtccttagatgggtcgaccatccacgtggtggaggaccatgccgactactacgccaaggggacgacgcaggagtcgtaccggggcttcctcgcctcccgcctcgccgagaacagcgtggacgcctacatcgtgcccgccgaggacgtcatcgacttcgaccgtcacggctacctgatggacctctccggcctcgacgcggcctccacgctgtcggttgatgcgcttgcccagagcacctacgacggcaaggtcttctccatcccgctctcctacaccggcttcggcttcatctggaacaaggacatgctcgacgcgcacggcctgtccgtcccggaggacctcgggcagttcctgcacgtctgcgagactctgaaggccgccggcatcacgccgtacgtggccaacaacgatttcgcgctcacggcgccggccatggcggtgggctttgccgacctgtacgccagcgacgacgccgagcagctgttggccgacctgtccagcggcgcgacgccggtgagcacgtacatggagaagggtttcgcgttcgtggagatgcttgccgacaagggctacctcgacgtcgaccggacgctctccacggcgccgaacaacgatgtggagccgttcctcgcgcaagagggcgccttcgtgtgcggccttgtgggccgccccggccttgcggacgccgagttcgccacggcgggcaccgccatgcccgtgctcgacgagggctccgtggccgtggtgggggccgaccggcgcatggccatcaacccgagcagcgagaagcgcgaatacgccgtggaggccatcgaggcgctgtgcgcgcctgacaacctgaagcgcatcgccggcatcaagggccagctcacgcccctcgccgacgacgaatcgaacgcggcgggggaggcctacgcgtccttggtggaaaccgtgcgcagcggcaaccagattcccaaccaggacttccgcctgcacttcaacacgtgggcgagcatcagggacctgtgccgcgagctcctggcgggatcctcggcccacgacgtggcgctgcgctacgacgacatgcagcgggccgaggtggcgcagtacgacgcccaggccccgtcggcggcggaatagcctgcgatggccgactccgggaacaccggcctgccgggcaagctgcgcagacgcgccgctgcgaggaacgtcctcgccgccgccgtgttcctggcggccctcatggcagcgtccttcgggtcgggcctcctcatcgaccgcatcacgtcgtccgtccgcgacatcggctacgaccacctggtcagctccacgaaggcggtcgcccagaacgtcgacgaccgcctgacggccgaccgcgccgcgctgtcgcggttcgccgatgcggcggcgggcctgtccgccgggcagatcgcggccgagctgcccatgttcgccgccacccaggacttccccgcggtgtacgtcctcttcgcggacggcaccggcttcgacgccgccgggaaccccgtgctcgccaccgacctgcccgcgcccgtgaccgcgctggaaggggagccgggcgtgtcgggagactacttcgactcctcgggcttcatgcgctcgctcatccaggcccccatcgagcgggacggccaggtgacgggggccgtctgcgccgagctcatcccccagcgctactacgccgaggacatgttcgcgttctggaagggaagcggccgcgcattcgtcgtctccgccgacgacggcagctgggtggtgaacgggccgctgtccgacatgctccccggaggcttgtccacggtctacgaggccctcggcagaaccgacggcgggcaggagctggccgacgggctgcgcgcgagcatggcgtccagcggcagcgacatcttccgcgtctcgtacgacgggcgcacgtcctacctctgcctggcgaagagcgccgcgaacccctcctggcgcgtcatgacgttgcttcccgccgacgagctcaaccgggagagcgattcggtcgccgcgctgctgcgcgtcacgcaggtcgtgctcgtggtggggctggccgtggctttcgcggccctggcgttctacggccggcagaagcagcgccgccgcatcgagcgcgtgaaaagcgagcaagagcgcacgatccgcgaccaggaccgtcggctgtccgagatcgcccgtcgtgagtatgactgccaggtggtcatcgaccttgatgatcagacctgccgcgtggagccgtatggcgagggcatgtggaagtcgttcccgctcgctggcaagttcgtgccctaccgcgatctgtacgaagaaacgcgcacctacctcgatgatgccgacgtgccccggttcgaggagcaccacgaaccggggcggctgttcgcgcgtttccaatcctcgacgagcgccgttccgcagttccgtttccatgtgagcgggggcgagggggacgtgtgggtcgagtgctccgtctacttttccgaggccgatggcgcccggcgcgcctgcatcatgtgcaaggacgtgacggccgcggtgctggcccagcaggagatcgagcgggcggggcaggagcgcgagcagcgcctgaccgagctgcagatgatgcgcgacacgctgcaggaggccctgcgcagcgccgagcaggcgaactccgcgaagagccgcttcctctcgagcgtgtcccacgacatccgcacgcccatgaacgccatcgtctgcatgaccgacctcgccgcccagcaggccgacgatcccgcgaaggtgcgcgagtgcctgtcggaggtgtcgcattcgtcgcaccacctgctcgacctcatcaacgacatcctggacttctcgaagatcgagagcggaaagctctcgctcgtgccggaggacttcgacctgcgcgccctcgccgaccagacggtggccatcgtcaggccgttgtgcgccgagcgcggccagacgctcgacgtcagcgtggacgtgcggcacccccgcctcgttggcgatcccgtgcggctgcgccaggtgctcatcaacctgctgaacaacgcgtgcaagtacacgcccgagggcggccgcatcgccttctccgtcgacgaggtgaggggtgcgggcgcgcaggagggcgcggcgtacgcctccttcaggttcgtcgtggccgacaacggcatcggcatcgccgccgagaacctggacggcatcttcggggcgttcgagcgcgaggtcgactcgacggtgaacgccatcgagggcacgggcctggggcttgccatcacgaagagcatcgtgcaggccatgggcggcacgatcggcgtcaagagcgagaggggccgtggcgccgagttcacggtcatcgcgtcgttcaagcgctgcgagcccgacgaaggggcgaaagggccggctggcgcttccggcgaggagccctgcgccgacgccccggctgccgtgctcggctgctccgggatgcggttcctcgtggccgacgaccatcccgtgaaccggaagatcgtcgggaagatgctcgcggccgccggcgccgcgtccgacttcgccgagaacggcaggcaggcggtggagctgttcgagggctccgagccgggcacgtacgatgccgtcctcatggacgtgcggatgcccgtgatggacggctacgcggcgacgcgcgccatacgcgccgggggccaccccgacgcgcgcaccgtccgcatcgtggccatgacggcgaacgcgttcgccgaggaccgacaggcatccctcgatgccggcatggacgcccacgtcgacaagccgctcgaggcgaagagcctcgccgctgcgctgaactcgcccttgaggaggcactgatgaaacgcaccgttctcgttgtcgacgacaacgccgtcaaccgccggctcttggcccgcatcctcgccgacgactacctcgtcgccgaggcggccgacgggcgggaggcgctcgagcggctgcgggacgacccggccggcgtgtcggccgtgctcttggacatcgtcatgcccgtcatggacggttacgccgtcctcgaggccatgcaggccgacccggacctcgcgcgcatccccgtcatcgtcaccacccagcaagagggcgacgaatccgaggtccaggccctctcgcgcggtgcgagcgacttcctctccaagccctacaagcccctcatcatcaagcatcgcctgacgaacatcatcaaggaccgggaatccgccgccttcatcaacctggtcgagcgcgaccggctcactggcgccttcagcaaggagttcttctaccatgcctgcgaggagctgctggcgtccgaacaggaaattgcgtacgacgtcgtctgcgcggacatcgagcgtttcaagctggtcaacgacctgcacggggtgtccgtcggggatgcgctgctgcggcacgtggcggccgagctggccgagaccgagggcgtggaggcgtgcgggcggctcggctcggacaagttcggcgtgctcgtgcgccgcagggacgggctggaagggcttctggaggggctctcgacgcgcatcggggcgttcgacccgcgcatgagcatcgtcatgcgctacggcgtgtaccaggtggccgaccgcagcatcccgcccagcgccatgtgcgacctggcgggcatcgccatcgagtccgtcaaggggcgcttcgacgcgcgcgtggcgtactacgacgactcgctgcgcgacaagatgatcttcgagcagcggatgacggccagcctcggggacgccatcgccgacgggcagttcgagatgtacctgcagccgaaatgcgagatcggcaccggcaaggtggtgggggccgaggcgctcgtgcggtggaatcaccccaccgaggggttcctgtccccggccgtgttcatccctcttttcgagcgcaacggcttcatcgccgagctcgaccacttcgtcttcgaccaggcttgcaagaagctcgagcaatggcaggcggaggggaaggagccgtgcagcatatcggtgaacgtctcgcgcgccgacctgtacgcgtccgacctgcccagcaggctgctcggcatcgcgagggagcacggcgtggaccccgggctgctgcacctcgagataaccgagacggcctacaccgaggacccggagcagatcagcagcagcatcggccgcttgaaggacaacgggttcaccgtggagatggacgacttcggcacgggctactcgtcgctcaacatgctcaccgagcttcccatcgacgtgctgaagctggacatgcgcttcatgcaggacgacgccctgcaccgcaagcgcgccgtggtgaggttcgtcgtcggcctcgcccgcgagctcgacctcaccgtcgtggccgagggcgtcgagaccgaggagcaggcgcagcttctcgccagctgctcatgcgactacgcccaaggctacctctacgctcggccgatgcccgcggccgagttcgaccggttccgcgagcgggtgggcacgagcgagctggctgcgggactcggcgccgacgaggcgggggaggggaggcgcccatgaccgcgtccatcggggagctgcgtgcgtgcggggccgatgtcgacggggcgttggagcgcttcatggacgacgaggagctctacttggaatgcctggccctgttccgcgacgatccggctcgcgccgggcttgcgaccgccgtggcggcgggcgatgcacgggccgcgttcgaggcgggccacacgctgaagggcgtcgccgcgaacctcggcctcgtccccgtgtccgccgtgctgtcggagtgggtggagcttttgcgcgccggttcgctcgaaggcgctgcggcgcgcctccaagcgctcgaccgcgccttcgaggatcttcccctgtagccgaaggcccccgctcgcgcgagcgggggccttcgcagcgaaccggcgcggcgcgccttacagcgtctcgaagttccagctgctcatgtacttgatctgctcctcggtgagctcgtcgatctcgatgccgagcgtctccagcttcacgcgggccacgccgtcgtcgatggcggccggcacgtcgtacaccttgttctccagctcgccggcgtggaggtagaggtactcggcggcgagcgcctggttcgcgaagctcatgtccatcacggatgcaggatggccctcggcgcacgacaggttcacgaggcgcccctgcgccagcacgatgaccgtgcggccgtcggccagcgtgtactcctccacgagcggcttgatctcctccttcttcaccgcgtgctcctcgagccacaccaggttgatctcggagtcgaagtgcccggagttgcagacgatggcgccgtccttcatgttctcgaaggcgggcgcgtccaccaccttgcagttgcccgtcacggtcacccacacgtcggcgaagcgcgccgcctcggccgcgggcatcacctcgtagccctccatgtgcgcctcgagcgccttcagcgggtccacctcgcacacgatcacgcgcatgcccatgcccttcgcgcgcagcgccaggccgcttccgcagtagccgtagcccgagatgacgatggtgcgtccgcacatgaggcggttcgtggcgcggatgatgccgtcgagcgtggactggccggtgccgtagtggttgtcgaagcagtgcttggtgttggcgtcgttgatgttgaacacggggtaggcgagcgtcccctcggcggccatggacatgaggcgcacgacgcctgtcgtggtctcctcggtgccgcccaccacgtgcaccagcttgtcagtgaagcgtgtgtgcagcgccgtgtcgaggtcggcgccgtcgtccatgatgatctgcgggtcggtggcgatgacggcctcgatatggcggttgtaggtgtcggcgtcctcgccggcgacggcgaacacgcttatgccgaagtcgcgcacgagcgcggcggccgtgtcgtcctgggtggacagcgggttgctggcgcagagcgtcacctgcgcgccggacgcgacgagcgcccgcatgaggttcgccgtctcggtggtcacgtgcatgcacgcgccgatgcgcacgccctccagggggcgctcccgctcgaagcgctcgcggatgcgggcgagcacgggcatgtcgcggtcggcccacatgatgcgggcaaggccctcgtcggccagcgcgatgtctttgatgtcgtggttctcgggcatggaaaagcctccctgggtacggaaaacggcacagttcgccctctattgtacgccagcgcacacgcgatcacgagcgggagatccggggcgtttgtggagttcgtatgcacaacgtttgtgaatcctcggcttttcccgcgcaaaaaacggaagaatcggtaacgaacggactccccgttgggacgggcggctgcgaagtggctataatcgtccgagcttgcgaactcgcacgacggcacacgcaccacaaccacaccaggcagcagcagggggcgccgaagcccttgggcctgcgtgcgagcgagcagaggacggccgtcagcaaggcagtgacggcccgtaaaaggagcaaacggagtgctagaccaattcttctcgcagatttcgttcgtcgacatcttcaacttctgcgtgtttctcaccttcagcatctgctatacgtaccagctctactacgtgttcgtggtgctcacgcgcaagcccaagaagctcgttgcgaagaagaaccaccggttcgccgccgtcatctcggcccgcaacgagagtgccgtcatcggcgacctcctccactccatcaaggtgcagaactatccgcaggagctcatcgacgtgttcgtcatcgccgacaactgcactgacgacacggccgacgtggcccgcgaggccggcgccatcgtctttccccggcacaacgacaaggaggtggggaagggctacgcgctcgactacggcttccaggtcatccgcgagcagtacgccgaccgcggctacgaggcctacttcgtgttcgatgccgacaacgtgctcgacgtgaactacttccgcgagatgaacgccacgttcgaccacggcgccaaggcctccaccagctaccgcaactccaagaactacgactccaactggatctccgccggctacgccgtatggttcctgcgcgaggcgaagttcctgtcgcaggcgcgcctcacgctcaacacgagctgcgtcgtgtcgggcacgggcttcttcgtggctgccgacatcatcgagcgcgccggcggttggaagtggcatctgctcaccgaggacatcgagttctccacgaacagcatcctggagggcgtgcgcatcagctacacgcccacggccatcctctacgacgagcagcccacgaccttccgcgactcgtggaaccagcgcttccgctgggcgaaggggttctaccaggtgttctggcattacggtgcccgccttgcgaagggcgtcgtggccaaccccaagggcgcgcgcttcgcctgctacgacatgctcatgaccatcgcgcccggcatgctgctcactatcgtgtcggtgctgttcaacggcatcatcatcgcgctggcggccacgggcatgatgtccacgggcatcatgatcgcctcgtccatctcgtccatcttcttctgcctgttcaactacctggttttcatgttcatgttcggcgtgctcaccacgttcgtggagtgggattccatccacgccgccacgggcaagaaggtgctctacatgttcaccttcccgttcttcatgctcacctacatccccatcgcgctggtggcgctggtgaagaagtgcaagtggaagcccatccagcacagcatctcggtggatgtggccgagttctccgacgctgccagctccaagcgcgagcgcaccatgtagcaggcggctaaactgatagtaacattggaacggcggatcggaaggtccgccgttttcgcgttcaggggcggcttaccacacccgggcgaacgtgaggcaccagacgtgggcggcgccggcgcggcgcagggcatcggtggcgtcgaacagggtggcgccggtggtgcagacgtcgtccacgagcagcaggcgccccggcacggtggcgccgggcagggcctcgaagcggccggccgtgttctcgaggcgcgcccggcgcgagagcgcgcgctggtcgcgggtgcgcgggcgggcgaggggggccgccacgggcaggtccagccgctgtgccaggccgcgcgccagcagctccgcgtggtcgaagccgcgccgccggcgcgcggcggacgtggccggcacgaacgccaccgcctccggccgccaggagggagggcgggcgcgcgccatgaggcaggccaggggctcggccaggcggcgctctccctggtccttgtacgtgcgcacgatccgcgcgggcgcctcgccgaacgtgacggcgctcgcgcacccgtcgtagggcaccgtgtcgcgcccggcgcgcccgagcaccacggggttgcactcgctgcactgcacccgcccgaacggcgccccgcacaccgggcaggcacgccaccaatccagatagggcagggcgcttcggcaggcgtcgcacagcacctcgccgggcgcgtcgcacacggcgcagcgcgtgggccacaacgtctccgccagggcctcggcggcaccgcggacgtagaggcgcgttctgtcgactgcgaggggcatgttgcgagcatagcgccgcaaccttgcccgccgaccgtattcccgccgtcgccgagccgcccggaccttgcccgaacctggcgcaggcaccgtccccgccttgcgcctccgccgtccccgccttgccgacccgccgtgcggaccttgcccgtcgttcgtgcggatctcgcgcaggcgggcacgtccggcgccgatcctgctcacagggtccccctgcgcgaccccaacaccggcctgcccgttttcgcgaaccttccgcggcaggggcgggccctttcggatgcttccggtgattcttgtcgtgcgattctgcgcgctgcgcttccgggcgttttccctatctgctaaactgaacggtgcttctttcgagtctgtagttgcgggacgtctatccctagtccatggcagatgcggtcgaaaggatccacgtaagtcgaaccgacctggtcggggaggcgatcatggcgcatcctagaggtaagtcgcaccgcccgtttacttatgacgcggcatacggccgcgacgggcgagagggtaaccggtgggagctgggccccggtgcgcgagtgtgggggcaaagactaggtcagtcgaaaggggcgctttgagagagaaacagcggatggaggcacaccggaaatgaagcgtatgaaggcgctcgtatgctgcgcggcagccgcctgcctggcgatggtgctggcaggatgctcgtcgcagcagagctacacccctcccgagaagagcgcgacggtgtcgtcgcctgccatcggcaagagcggcacgttgcgggttggcgtgaacgcggggtcgccgccgttggccggctcgccttcgtcctcgtcgaagatcgtcggcatcgacgtcgacgtggccgcggcgctggccgaccagctgggcttgaagctggagatagtggacgtggggaccgatcccgaggccgcgctcaaggagggcaaggtcgacgtggccatgggcatcggctccgagatcgaggtgccgttctggaggtcgccggcgtacctgccgaagggcgtggcgctgttctccacctcggcgaatgcgacggtgcccaccaaggcgtcgtcccccaagatcgcggcccaggtgtcctccaccagctcgtggcaggtcaccaacgagttcggccaggacgcgcttgtgtccgagaacgacttgaagagcgcgttcgccgcccttgccgacggctccgcccagtacgtggcggccgatgccgtcatcggcatgtacgcggcccacagcggcggctacgacgcgcagatcgtggcgctcatgcagcagcccggcggttactgtgtcggcatgctcgaggcgaacaccgagctgcaggcggccgtcaaggatgcgctcgctgcgctcaccgacggcggcatcgtgtcggtcatcgagaagaagtggctgggcacggacatcgacgcctcgtcgctcccgctcacgacgggcgcctcctcggcgaagacggacgagtccaagacaagcggtgacgaatcggacggcggcgagaatgcgcctgctgccgaagatgacgaggagggcaacgtcgagagcaacgccggcaggaacgccgtgcggcccacggcgtaagccttgtcgaggaacccgtttcccaaaccgaatgaaaaagcccgcttatgcgggctttttcattcggtagactatccaatcgttcgggaaagcgcttcgcgcgccgtgtgcgcgacggggaggctagttcaggaagtcctccaggatctcctgctcggcctcctcctcggtgagcccgagcgtcatgagcttgatgatctggtcgccggcgatcttgccgatggcggcctcgtgcaccagcagcgcgtcctcgcttgcggcctcgatgccggggatggccgtgaccttcgccttgcccatgatgatggcgtcgcactgcacgtggccgcggcaggccgcctcgccgatcacgagcgggttgaacacctgcttggagttgtcctgcgccaccgagcgcgagatcacctgcacgctggagtcgtcgcccttgagctccaccttcatgttcgaggtggcaacctggtcgtcgtgcgtgagcagcttctcggtgagcacgagcttcgcgcccgcgcccagctcggcgttcgtgtcgcgcacggtggacgacacgccgcgcagctgcgtgagctccatctcgcagctcgcgttctcctccatgatgacgttggtcatggggttcaggatgcgctcgccggtgcccgcgccctcgccgtagtgcttctccacgtacttcacatggctgttcttgccgcagtagaaggtgtggatgccgtcgtgctcggaggcctggtggctctcgttgtggatgccgcagccggcgatgatggtcacgtcgcagtcgtcctcgatgtagaacgtgttgtacacgacgtccttcaagcccgcctgcgtcacgatgacggggatgtacaccgtctcgcccttcgtgccggccttgatgcggatgtcgatgccggggttgtccgtcttcgtggcgatctcgatgttcgccgacgaatggcgctcgacgagctgcccgtccttgcggatgttgaacgcgcctttcggcatgccgtgaatgttggcgatctcggcgagcaggctctcgtcgatgggggacaaatcaacagccatgatggcctccttcttcctgacggcttcccgtggcggccgcctagccgttcagcccctcctcgccttcgcacacggccctaaggccgcttagcttcaggctcctcggtgcttcgcggctctgacgactcgccacggaaaccctgtctcttctttagcaggtggtggggatctcggtcaggtgcagctcgggcggctcggtgaacgagcagccggggatgccctttgccacgaagcccagcttcggcatgagttcggcgggcgttcccgtctcggccacctggccgtttttcagcagcacgatctcgtcggccagctggatgatgcgctcctggtgcgagatgatcacgatggagcgcccgtcgcgcgcctcgtggatgtcgcggaacgtctcggtcaggcggtcgaagctccagaggtcgatgccggcctcgggctcgtcgtagatggccagcttcgggtcgcgcgcgaggatggtggcgatctcgatgcgcttcacctcgccgccggagaggttcttgtccacctcgcgggtgaggtagttcgccgagcacaggcccacgcgcgccaggtactcgttgcacgagagcatgggcagcttcttgccggcggcgatgtccaggagcttcttcaccttcatgcccttgaagcgggcgggctgctggaagccgtagccgatgcccttcttcgcgcgctcggagatggacaggtgcgtgatgtcctcgccgtcgaacaggatctggccgcccgtgggctgctccacgcccatgatgagcttggcgagcgtggacttgccgccgccgttcgggccggtgatgaccgtgaagcggtcgtcggggatagtgagcgtgaggtcgtcgatgatgcgcttcgtctccttcgcgccctccgacagcggtacttcaaacgtgaggttcttcagttccaacatggcagatgctctccgtctcttcctccactaattgatactacattactaccatttatggtgcatgacgtcaaggcgcggtgcccgaaaccccctcggacggcgcgccgcgcccccttgggcggaagcgcgaagaacccgttcatgcgccgattcgttccaatcgttaattctagcttttaaagcctggaacggaagtatgaatgtcttatttattcgctcgaaaggcgcaaggtcgcatcaagcacgtacaaatgtttcacgtgaaacatcgcgtgtgcccgcacactggaaattcgaacatcggaatagctgcaggttcaccgaacgaccgcgtggaaaaagcgggcgcgcgaaaccgggcgatcgaaaaaacgatgcacgaaaaaacgagcgattgaaaaaaatgcgctccagcgcgttagggcgctggagcgcatctcgggtgcggtttcgtcgcagcgacgccgcggccgtgctgcggaagagcgcttgcagcgcccgcctcagccgcgttgcaagcgcatcgttactcgttcagcaggtcgaccacctcgaagggggtgcgggaggcctcgatgatgtccttgctgccgaacgtgcacacggcgtcgtgcgccaccgcgtcggccaggggggcgcccagcgtgcgtacggcctgcgggtcggccgccaccatctcctcgcgggtctggaggcgcgcctcgggcgtccggccgccgaagtagtcgccgtcttggcggcgcgccagggcgcgggccttgagcggcgcgtcgaagcccgccacggtgctcaccacgtagccctccatggcctcgggcttcgggtcgaacgcctcgagccaggctgccgaggcggcgaagcgcgccagcgtctcgtccagatgcgggtcgcgataggagtagaagcgcaggttgcccgtgcgcgccgccccgaagccggccccgtaggcgccgcccttcacgcgcacctcgttccacaggaagtcgtaggacagcgcgcgcgccgccacctgccaagcgcccgtgtaaggcgcgccgtcggcgcggcggtcgaagccctgcgccgcgtagcacacgtcggtgggcacgatgaacgcctcgttgcgcacggcgggcgcgggcacggccagcggacgctcggaggatcccgtgcgcccggtgacggccccggccctccagaaccgctcgaagtcatcgtcggcgccggtgaagctcaccgtgcagccgtcgtccacgaacaggcgtcccgccagctcggccagacggccggccagatcgtccgcacgctcgtcgtagtgcgcgagcaggtccttcaggaagcggtagaagtccacgccccccacctgctcgcgcacgatgccggcgggaaggtagtacgatgccacgcgcgccatggcggccgcatggccggctgcggcgaagccctgctccatgccgatgcgccgctgctgcagcacgtccttgatcttcccggcgtcggcgaagtcggtctccagcgtgatctccagcggcagctcgcaggcggcctccacgttctcggagagcgcgctcgcgcccaccaccagcttcggcgccaaggcgcctgcgccgtcctcttcctcgtagatctcggtgaagaacgacaggttccccagccgcccgttcaccagcgtgtcgatctcggcggccgtgtggcgcgccgtgcccagcttgcccagcacgagcgcgagcacggcgacgtagggcaggtcctcgaagcgcgcgcgccccaggtcgaagtagcggtaggcgtacgcgatgccgcgcgtggggatgtcgtggcgcaggcagggcacgggcgtgccttccgccaggccgtaggagggctcgagcggcgccggcccgatgtcggccacggacaggcgcggcagcgtggcgagcgccgcgggcgcgtcgggctcggtctgcaggcgccgcagctcggcctcttcgtcggccacgcgcgcgaagtcctcggggcccatggcggcctcggcggcgcgcagtcgctcggcctcgtaagcgtcctcgtcgccttcgagcggccgcacctcggccaacgcccagtggccgctctccaggaacacgtcgatcatcaggcgctcgaagtagcccgtgcccagctcgcggcgcagcagggcgaagtcgtcctcgtagcgcaggtaggtcgtggccatctcgtcgtcgtagagccagccggacagcgccgtcatggacagcgccacgccgtcggccatgccgaagtcgcgctcgcgcatgacgaactcggcccgcgagagcgacgcctccacgagcgtgcggtcgatgccctgctcggccacggcgcgcagggcatcctcgaaggcggcgcggaagcgttcggcggccccgggcttcgacccgcgcagctgcacgacggcgaacggctgcagcatcccgtcggccacgaatgcctgcacgtcatcggccaggccggcgtccagcagcgcgcgcttcacgggcgcctcgttgctgcccatgagcgcgtccagcaggatgtccaccgccacgaggcgcgtgcgctcggcagcgtcgcctatgacgtagcccaggcccgcgcaggcgttctcgggggccgtgtccatgtcgcgcaccacgtgctcggccaccacgggcgcctgggcctccagggcgtgcggctcgagcggcgccctgccggctgccgtgcgctcggcagcgcgggcggcctcctcgtcggccacgggggagaggtactcccggtccaagaacgccagcatgcgatccagatccacgtcgccgtacagcgtgaggtagctgttgtccagccggtagtggcgcgcgtgctcgtccaggaactgctcataggtcaggtcggggatggcgcgcggcgtaccgcccgactcgaagcggtaggccgtgtcggggaacagcgccgcctgcagctcgtcgtagagcacggagttggcgtcggagagcgcgcccttcatctcgttgtacaccacgccgttgagcacgagctccgcctggccgtcctcggcctcggtcgccgccacgaggtcgcccgcgatggagtcgccctcgtcggcctccgcgtcggcggccagttcgtagtgccagccctcctgctcgaagatggcgcgcttatggtagatggccgggtgcagcaccgcgtccaggtacacgtccgcgaggttcagcaggtcctggtcgttcgtgcttgccacgggatacagggtcttgtcggggaacgtcatggcgttcaggaacgtctgcatggagctcttcagcaggtccacgaacggctccttgacggggaacttgtccgagccgcacagcacggagtgctccagtatgtggaacacgcccgtgtcgtcggcgggcggcgtcttgaacgcgatggagaacgccttgttggcgtcgtcgttcgccaggtagagcagtcgcgcgccgctcttccggtgggagagaacgtatgccgtcccgtcgatctcgggcagctcctcgcgcgtgagcacggtgaacccgtgcagctggtcgttaggtgagagttccatgggtggctcgctttcctcgtggcagcgttgcgtttccgctcattgtcgcacaaaaaaaggaggcccggcagggcctccatactatcggttgactagtcgatgaccgccgttcccgggccgccctcgtcgtagcggtggcaggcgcactggtggttcggcttcacctcgaccagcgggggcatgccctcgtcgcagccctcgaccttcgcgaagcagcggccggcgaagcggcagccgggcggcgggtcgatggggctgggcacgtcgccttccagaatgatgcggtcgcgcttcgtggccgggtcgaccgacgggatggccgacaggagcgcctgcgtgtacggcgacagcgggtcggcgtacagcgacttcttcggggcgatctccatcatcttgcccaggtacatgacgcccacgcggtcggacacgtgcttcaccacgttcaggccgtgggcgatgaacaggtacgtgaggccgaactgctccttgagctcgtccagcaggttcagcacctgagcctggatggacacgtcgagcgccgacaccggctcgtcgcacacgatgagcttcgggttcacggcgagtgcccgcgcgatgcccacgcgttggcgctggccgcccgagaactcgtgggggtagcggttgcgcatgtagttcgccaggcccacgcactccagcagctcgttcacgcgatcctctacctggtccttcggcaggatgttgttggtgaggatgggctcggcgatgatgtcgccgatgcgcatgcgcgggttcagcgacgcataggggtcctggaagatcagctggatgtccttgcagtaggccttgcgctccgcgggcttcatggccgtgaggtcgtgcccgtcgaagatgatcttgccggacgtgggcttcagcaggttcaccagcatcttgcccacggtggtcttgccgcagcccgactcgcccaccaggccgaacgcctcgccgcggcggatctggaagctcacgtcgtccacggcctgcacgtgcgaagtggccttgccgaagaagttcgtctcggcggcgaagcgcttcgtgaggtgctggacgtccagcaggatgtcctgctggggcgcggacgtgccgtccgcgcccgcctgcggctgggcggcagcggccttgttcccgttgctctcgctcatcggcccgcctcctcgctcttctcaagttcctctagctctgcctcgcggatctcctcgccggccagcagcgcctcggccgtctccacgttgcgcgccgcctcggcgtcggcatgcgcctcggcctcgccctcggcgatggcggccgcgctcttggcctggccctcggcgttctcgtacaggaagcaccgcaccttgtggccgcccacgtccaccaggtcggggatcttctcgcggcagatgtccatgcaggagtcgcaccggtcggagaagtggcagcccgggggcatctccagcgggttcggcaccatgcccttgatcatgtacaggcgcttcgagtcgtcgtcctccaggcgggggattgacttcagcaggcccagcgtgtagggatgcatcgggtggtcgaacagcgtgcgcacctcggcctcctccaccacctggccgcagtacatgaccaccacgcggtcggccgtctcggacaccacgcccaggtcgtgcgtgatcagcagcacggccatgccggtatcgtcgcgcaggcggcgcagcaggtccaggatctgcgcctggatggtcacgtcgagggccgtggtgggctcgtcggcgatgagcagcttcgggttgcacgacagcgccatggctatcatgacgcgctggcgcatgccgcccgacatctggtgcgggtagtcgtcgatgcgcttctcggggctcgggatgcccaccttgcgcagcatgtcgatggcgcgctcgcgcgcctccttcttcgacacgttctcgtgcgtgcggatggcctccacgatctgcttgcccacgcggtacaccgggttgagcgacgtcatgggctcttggaagatcatggccatgtcgttgccgcgcagctcgcggtactcgcgttcggacagcgtcaccaggtccttgccctcgaactccatcgagccgccggccacgtgccccggctcggccagaaggcccatgaccgagaggctggtcacggacttgccggagcccgactcgcccacgatggccaggatctcgccggcgtccacgtcgaagctcacgtcctcgacggccttgacgatgcccttcttgacgggaaactccgtggagaggttcttcaccgataacagcatgcgatcacctcttccttgctttggggtccaggccgtcgcggatgccgtcgcccagcaggttgaacgccagcacggtcagcgtgatggccatgccggggaagatcatgagccacggcgcgcggaacagctcgttgcggccgcgtcccagcatgtcgccccactcggccgccggaggctgcacgcccaggcccaggaagccgagcgccgccgcatccaggatggcggtggagatgccgagcgtcgcgcgcacgatgatggacggcagcacgttcggcagcacgtggcggaagatgatggcggcgttggagtcgcccacgacgcgcgccgcggccacgtagtcgttctccttgatggagagtatctccgagcgcacgatgcgcgcgtactcgggaatggacaccaggccgatggccacgaccgccttctcgatgccgggcccgagggccgccatgatggcgatggccagcaggatggaggggatggccagcatcatgtccatgatgcgcatgatgatcgtatccgccttgccgcccttgtagccggcgatggagcccaggagcacgcccatcgtcagcgagatggccacggcggccaggcccacggtcagcgtgatctgcgttccgacgagcacgcggcagaagatgtcgcggccctggatgtcggtgccgaaccaatgctgcgccgagggcccgagcaaggactcgctcaggttctgcgcgtacgggtcgtagggcagcacgctcggcacgaacttcgtgaccagcgcgatgatgatgagcagcaggatgaagataccgctcacgagcgacgccttgttcgacacgatgccggcgaacacgtccttccagatgctctcgcgcttctccttggccggcccgccgttcaagacgatctcggcggcgggctcggttgcgagcttctgcttctttcccatcgatatcacccctcttccttcgcgccgtacttgatgcggggatcaaggtaggcgtacacgatatcgacgacaaggttcatgataacgaagatgaccgccaccaagagcacgatgccctggacgacggggaagtcgctcttcagcacgcagtcgacggcgaacttgccgatgcccggccaggcgaacaccgtctcggtgagcagcgcgccgcctaggaggctgccgaactgcaggccgatgaccgtggagatgggcagcatggcgttgcgcagcgcgtgcttgatgttcacggtgcccttcttcaggcccttggcgcgcgcggtgcggatgtagtccgcgttcagcgtctcgagcatgctcgagcgcgtcatgcgtgtgatgatggccatggagtacagcgacagcgccaccgtgggcaggatgaggtgcacgagcacgtcgcccagcgccttccagtcgccccgcatgatggtgtcgagtatgaagaagcccgtccccccggtgggttggagcaggggcgtcacgcgcccgctcgaaggcagcacgtgcaggatgccggcgaacagcaggatgagcaggatgcccgaccagaagatgggcatggagacgcccacgagggccaccaccatgctcacgttgtcggcaagcttgttcttcttcaccgccgccagcacgccgagggccacgcccaaaagcgatgccacgatgatggcgcagatggcgagctcggccgtggcggggaagcgcgcggcgatctcggccgtgaccggctggtgcgtgtagtaggacgttccgaggtcgccctgcacggcgcccacgatgaagttgatgtactgcatccagatgggatcgtccaacccgttgtccgcgcgccacgccgccatcgcctcgggtgttgcgtgctcgcccagaaccaccggagccgggtccggggccaacacgcgcgtgatgaggaagatgatgatcgtaacacccagcaaaacgggaatcaccatgaggattctcttgaggatgtacttgagcataaagcccctttcttacctgtcctgctccgttatccgaacgaatacaggaacgaagccgaagacccgtggcccccggcttcgggcacgccaaaccgtccttggcgtgcagatcatcagatcgtttacgaccggatgacagtgtagcgcaagtgcggcccgcacgcgacgagaatacgacgtgcgggccgcacagggaaaacccggcgccctcgcgggcgccggggaacagcctttacgcttccttcgagacgcccttgaagaacacgactcccgtcggatggtagtagaagtccttgaccttggggctgtagcccagcaggttcttggagtgggagatgagcacccacggctgcttctcggcaaccatttcctcgcactgcaggtagatggcgtcgcgcgcgtcgccatcgggggtcttcaggccctcggcgatgagcgccttgtactcgtcgtcctgccagtgggccacgttcatggaccagttcgtgtcggcgagcaggttcatgaaattgtccgggtcgccgttatcgcccgtccagccgtagaagcagatgtcgtacgggtccgtctgcaccttcgtcttgtaggtggtccagtcgtactgcgtgatgctcagctccacgcccacggcggacaggtagccctggatcatgttggccaggtcgctgccgcccttctggttgtaggggcgggcggtggtgtaggtgatgcactgcagcgacgtgatgcccttgtcggccagcgtcttcttggcggcctcgggatcgtaggccgtctgcttgacgtccttggtgtagggggccatccaggtgggcatgaccgagttcgccacggtggcgtagtcgccgtagatggacttcaccatctcctcgacgttgatggcctgggccacggccttgcggacctcctggtccgtgcacttgccggtctcggtgttgaacgccatgtagttgatggtcatgccgtcctcggagaacagctcgaagccgttgtcgacgatctggtcggccgatgcggggtcgacgctggagatgatgtcgcactcgccgttgatgagcgaggtcaggcgcgtgttgccctcggcgatgatcttgaacacgaggttcttcgtcttgggagcctcgccccagtagtcctcgttggcaacgagggtgaccgaagcgcccttcgtccagtcgacgaacttgtaggggccggtgcccacggggttggtgatggcctggccgtcggtggccgcctcgatggcgctcggcgccacgatgggggaggccagggccatggcgaggttcttcacgaacggggcggaagccgcgcgcatcgtgatcttcacggtgtagtcgtcaacggcctcgacgctcgcgacgccgttgcccgcctcttcctcgccgaacacgaacgacgcgtagggcatgtcggagttgcggttgggctcgagctgacgctcgatggaggccttcacggcctcggcgttgaagtcggtgccgtcatggaacttgatgccctcgttgagcttgatggtgtacaccaggccgtcgtcggagatctcgggcaggtccttggccaggcagggcgacaccttcgcgtcggtcttgccgtactggtacaggccctcgtacatgttgcaggacaccacggcggactcgccgtcgtcgaagtacgccgggtcgaccgcgcgcgggtcggccgtcaggctgtacgtgatggtgtcggccgtgccgccgccggcgggggcgtccgcgccctcgtccttcttggcgtcgtcgccaccgccgcagcctgccatgctgacgaggccgaagcctgccgccgacacgccgagcagctccatgaactgacgcctgctgaacgcactcttgctttccataggggtatgtctccttccctcaaaccccgcgcgtcgcggggccctccttcgagctttcagctcgcgcgcggtacgtcgcatcctgcggcgaccgtcgcgtatccgtatactttattacaataaagcgtaaggaagcgcaacaaaaccgcccgaaacgcgatattaatctgccgagcgcaccaattggcccccgaaaggcagcggaaggggcggcgggcggagggccccgctgccgggccggccgcttacgcgagggcgcgcctgcggagcctgctctgccagcccgctcgcggtagggccgcaagagggcctgcgcgccgagcggcttgccgcgatcgggattgcccccttcccaaggccgcccggttggtgctatgcttcgtccgacccggaaagcccgaccgaagaaaggccgcaatgccctcaaccgcccacaccgcagctttcgccgacagcgtgcttaacacgttgcccgtcggcgcgtggtggtggaagagaaggcattgatcccgggtctcgcataggcttctgttccgcgcatgcatacacagaagagccctcggagatccgggggctctttttgtttgcgcggacggagatgagggttataggacaaaaagtgtgtccggcccgattgttcactgacggtactcgaccgccgtgtggaactctccccaggctactcccgcaccgtattcgtcaggcgtcccgccatcccgcctcttgggcttggaggccatcgcgaacagcccttcgacgtcatcgtcggtgggcatggccttcagcatcctggcggcagggaggggcgacccggcgtgcgcgtaacaccaccagaagatcgccttgacgcgccgcatcctggacagcccgcggtggtttcggatcatctcgcgcagctgcgcgttcacgcctccctctatcatgttggaggtggagtcccactcgccgccccgctcttcggccatctccacgaacgcgaacagcgtccccgaccgcacgaggccgttgagcgcgcggcgggccttcctcagctcccggtgcacgtagcgcctcttgccgtcttcgagcgcgaactcgcgcaggaacccctcccacttggagcaccactccgcgtactcggccagccacgctgccgccgatccggcgtccttggccttcagcagcttcttggcgaggccgtagagctccttgcccgcctccagcttggggcgcgaggtggtgcacctttttacctggcagaatgcgtggaacgtgcacctctggacgcaggtgcccggccacatggcgcgcgccgccttggcaaacccggcgcccccgtcggagacggccaggcgcggcggggccatcttggccatgagcgccgcccaggcgccggagttctcgctctcggccaggtgccaggcgagcacgtgctctttggtgcaggctatgagcacgacgagccccgagatccagatgccgtccaagaacacgacgtcgcacacctccccggtgtaggagggcaggggccacatctgccagaatctggcggctttcctgcgaaacgtcctggacgagcatccgaagtcctcttggccgcgcttggagaagagccatcggaggaaggcgtcgagctccttcgccgaattgtcgatacggtgcgtcgtggatgccccgcatgccttgcacctccacctttgcgcgcccgctttcgtcttgccgttgcgcttcatcgcaccgccgcacgcgccgcacttcgggttatccattcgtccgctcctgcccaagatgaacttttctctccgaaaagctatcttgaacaggcgtgtcaagcgcaaaccggacacactttttgtccgggtgaaaagttggggcgaaacaacttttcagtgtgatttcttcagattgaactgggaaaaagatggtttgtcggacacactttttgtcctataacccgaggatgaaccgcggcggggacgccgcagcaacgtgaaaggaaccatcatgaccgagaacgcgccgcaccgcctgtacctgcgagaagaccagatccccgcgcagtggtacaacctgcgggccgacatgccggagaagcccgagcccatccggctgccgaacggcgccgtggcgcgccccgaggacctcgcgtccgtgttctgcgacgagctggtggcgcaggagctcgacgacgacacggcctacttcgacatccccgagcccgtgcgggagatgtaccgcatctaccggccctcgccgctatgccgcgcgtacaacctggagcgcgcactgggcacgcccgcgaagatctactacaagttcgagggcaacaacacgtccggctcccacaagctgaactccgccatcgcgcaggcctactacgccaaggcccaggagctcacgggcatcaccaccgagacgggcgcgggccagtggggcacggcgctcgccgaggccgccgaccacttcggactcaacctggacgtgttcatggtgaagtgctcctacgagcagaagccgttccgccgcaacatcatggagacgttcaaggccaacgtcacgccctcgccgtcggacaccacggccatcggccgcaagatgctctccgagcatcccgattccacgggatcgctcggcacggccatctccgaggcggtggagcgcgcgctgaacatccccgagaacaaggggcgctacacgctgggcagcgtgctcaaccaggtggtgctgcaccagtcggtcatcgggttggagagctacgccgcttttcaagagctgggcgagtacccggacgtggtgatagggtgcgcgggcggcgggtcgaacctgggcggcctcatcgcgccgttcatgcgcgacacgctgcgcggcgagcgtcccgacacgcgcttcgtggccgtggagcctgcgagctgcccctcgctcacgcgcgggcgctacgcctacgacttcgccgacacgggccagacgtgcccgcttgccaagatgtacacgcttggcaacggcttccagcccagcgccgatcacgccggcggcctgcgctaccacggcatgagccccatcgtgtcgaagttgaagcacgatggctacctggaggccgtggccgtgaggcagaccgacgtgttcgccgccgccgtggagttcgcgcgcttggagactatcctgcccgcgcccgagagcgcgcacgccatcttccaggccatggaggaggcgcgccgctgcgccgagacgggggaggccaagaccatcctgttcggcctcaccggcaccggctacttcgacatgaaggcctacgacgccttcaacaagggcgagatggtcgaccacgagcccaccgacgaggagctggaagccggcttcgccaccatcccgcacatcgagggcctgcagtaggaggcggccctcggccgaggccggaggaggggcgtcccccccccggccacccggccgcggccgcgctccccgcttggcaacgggcgcgatgcctgtcgggggcgccacaccatgcgagcgggtcgcctgggctgggagctgcgtcgcgttacgcgggagccctgcgctcgagcttcgcacgggggacgccgcactgcacggggatcgcaccaagcgggagctccgtaaagcgcaggggcgccgccccgggtagggagccgcgccgcgcaggtgatggctgtctccgcataggccggtgtttttgtcacgcgaaaccgtccttcctgtcaaaaaagagccggtttggcaatcgagaagcgcgtttcgaggcgcctttcgacaggtcgcctcgagaaaggccaggtcgcctttttgagcgttacgttgtcgattgccaaaccggctcttttttgacaggaaaggccggaatcggcggcagatcccggcctttcgctcgcgagggcggcctgcggttccggcagcgtcccctggcgcgctgcgaacggggattcacccgccgtgcagcgggtccatcaggcggggcttcgctaggctcgcccgcccgccccgctgcggcgcgcctgctcgggcgcgcgtctgcatcctagccggcaaccgtttcgcctcatgaggcgaaacggtgctaccatggttccatgagccttttccgtgccgagcatatcgccctgtcctaccgtcgcggcggcgaagccgtgccgcttctgcgcgacgcgtcgctctcgctcgaggcgggcgtgatctgcgacctcgtgggaccatcgggtgcggggaagtcgacgctcctgcgcgcgtgcgcgctcatgctggggcgcgactccggcgagctctacctggacggacggccctcctcggcgttcaagccgaccgagtggcgccgccaggtgtgcctcgtgccgcagcaagccgcgctcgtggcgggcacggtgcgcgacaacctggtgctcccgtggaggctcaaggtgaacgccggcacgcagccgcccgccgacgacgagctcgcgcgcctgctggacgcggccgagctctccgacgtgggcctggcccgcgacgtgtcgcagctctccggcggccaggccgctcgcgtggcgctcctgcgcgcgttcgccacgcgcccgcgcgtgctgctgctcgacgaggtggacgcggcgctcgacgacgactccgcgcttgcggtgggccgcctcacgcgcagcctcgtggacgcgcgcaccgcctgcctgcgcatccgccaccgcgcctccgacggcttcgcgtccggcacgttcacgctggcggacggcgcgctctccttcgcggcggcgggcggggagggggtgcgcccgtgaccgacggcgtggtggacatcggctacgtggagctcttctcggcgagcgccctcatgctcgtggcgggcctcgtgtcgtggaagctggagctcgggcagacgcgccgcatcgccgtgtcgtcggtgcgctgcttcgtgcagctcctcgccgcgggcttcctgctcacgtacctgttcgagttccaaacgtggtggctcgtgctcttggtgctggcggccatggtgatcgccgccacgcagatcgccacgtcgcgcgtgaagagccgcatccccgggctggtgcccgccgtgttcgtctcgctcttcgtgtcctccaccgccatcggcctcatcgtggtggaaggggtcgtgcacgccgagccgtggtacaacgcgcggcagctcgtgcccatcgtgggcatgatcatgggcaacgccatggctgccgtggccgtggccatcgaccggctgttcgcggacatggacgcccgcgcctccgagatgttctcgctcgtggcgctcggggcgacgccgcacgaggcggctgccccctcgctcaaggccgccatcggggcgggcatgacgccggtgctcgccaacatgtcggcggcgggcatcgtcacgttccccggcatgatgaccggccagctgctcgcgggcgccgacccgctggccgcggccaagtaccagatcgtggtcatgctcatgctttcggcggccaacaccatcgccatcgtcatggcgagctatctcacgtaccgccgccgcttcgcccccgatggatattatttggacaagggcctgcgcggataggccgtaccttataatcggcaagacgcgaaaggaatgcaccgtggctgacgagaaggcgttttcccatattacggttaccaccgacgatgatgacgacgtcgtcatccaggcgggcgcccgcgcggtttcgcgcccggtccccgtacccgtgccggagcccgattgcgcgcccgttgccgaggaacctgcgtccggcgaggccgccgcggaagaggacgtatccggcaacccgtcttccagccgctcgggcgagatgccgcggtcctcggaggagccctgtcgcgagcagcggctcgaagatctttcgggagcacccatgcccaaggcccagaaggccgtgctggctacggcgctgctgctcatcgtagggttcgccgcatactacttcttcttcatgcgctgatgcgctctcctcaaaggcaggaaggtcgaacgatgccaaaacacgctgcaagcaaaccatccggggccccgtcggatcccgatcgcactcccgatgccggcggccctgccgcagacgaccgcgacgagcgcattggcctgacggaggcgttcgcgcccgtcggcgccgacccggcggccgcagcgcccgaggctcctgccgacgaccgggacaacgccatcggcctcacccaggcgttcgccccggtgggcggtgctccgagcggcccggcgcacgccggcggcttcagctacaagggcgacaccgacgacgagtacccggacgccttcgacagcctcgagccgcgcgacacgccgtcgctgctgctcgacgacgaggcgcccctggagcccgagccgccgaagggcctccacggcaagaaggacaagacggacgtgcccccgcatatgcgcaagtcgcgccgcatgcgccgcgtgctcatcgtggttatcgtgctgctggtggtgctcatcggcgttctgggttacctcacctggcgcctcgtcgccgagagccagacgctggccgcccagcagacgcagcagcagcaggacgcgcaggaggtgaccgccatccagcaggaggagacgaaggacgcctccaccgagaccacgaagaagaccgaggcgccgaacctcgccgccgtgctgggcctcggccaggacgaggccctggctgcgctcgcccatggcgcccaggtaaccgcctcgaaggacgtgaacgaggagggcaaccccatcaagaaggacgtgacggtggctttgaccgacgagccggccgacacgcgcacgggcacgcccacggtgtacctgggcctcaacgaggagggcaaggtcgtccaggcgggctactccgcctccaccgccgcgctcggctacggcacgctcagcttcgccgatgccgtcaagaacgagcacgtggtggagaagacgctgcaggaggccggcataccggtggccgagggcgcggccgtgctgcccgaggacaagacggcctactccacctacgacaccgacggcacgaccctcgtgaaggagaactgctcgttctcgggcacggtcgacctgaacggcgcgccccacgagtggtccgcggtgctgtcctacaactacaccaccgcgaacatgaccggcaacctagccgacaccatccgcatcatctacgtgtacatcaacgcttaggggttccggcggcctcccggcggcgggaacctgccgacgctgcggccggccgtgctcgatcttggcgcgatcccggaggctcgcgtaccgcagtacgcttcgtctccgcgatccggccaacctcgggcacggccggcctcgctaacttgctacgacaatatgcaatcccgttttcgcgccttctcacgccccgtgcggtcggaagccgaagtactgctcgcaggcgtcggcgaaggctgcctcgtcgggcagggggatgcgctccttcttgccgtcttttcgcacggtgagcatgtcgtcccagatggcgaagtagccgttcggcgtgcgcaggttcgctatgcggtggtcgtggaactccgtgcccggacgggagcaggcaaggttgagcgcgtcgaagtccttgtccatcacggttgccaggcacagctccagctcggtctgcatgcgagagggcccctcgatgccgtagagatccttcttcgccccggtcacgcggtccacggcccaccagtacgcgtcgatgcggcgcgcggtgaacgactcgccgcggatgatctgctccagtccgtccgcgagcgagagcgaggccgagggcagcggcccgccgaagcccacgtccacgaggacctctttgccgtccagctccacgagcacggcgcggtggttgatgggatctttcaccttggccccgcatacggcgcggcacaggcacggacgcacccggtagcccaggcttgccagcagcgcctcgaacaaggcgttcagctcgaagcagtagccgccgcggcgttgcgcgaccagcttgtcgaacacccgggccggctccaggtcgggcggctcggtgcagcggtacatgtcgatggtctcgaacgggatggagcactggtgcgcgtagacgagttcgtcgagcgcctcccgcgtgggacgttcgggccgctcgagcccgaggcgtgcaaggtaggcgcgcgtcctttgcgcgccgagagcgaattcgccttccatagatctcccctgttcggtctacggtgcccgggcttcccctgcgcccgaggcgtcacgtgccaatgatagcgcaaaacgcacgcaaagtgggatgggccttccatcttgctcgatgcggccgcttgcatggcgggcgggcgcaggccgacagggcgggcggaacgcgaccggcgcggcggcctactcggcctcgtcggccttgcgggcggcgcgcacgttctcgagcgagatggtggggatgcgcacgagcatgaggtacagcaggaacagggccacgcagcccaggacgatccagacgacgggcttgcggacgaaaaaggcgctggcgcccatgagcacgaacgacacggtgagtatgcgcaccttcgtggcagcggggatgcccccggcctccttgaacgcggccacgtaggtgcggtacaccttcgtggagacgatccacgcgtggcagcgcggcgacgaccgcgcgaacaggaacgtggccagaaggagcagcggagtggtgggcagcacgggcacgaacacgccgatgcagcctatgacgcaggcgatccaggctccggcgagcatgagcaggcggggcaggcgattcatggaagtccttccgtagcggtgggcggacggtgctcctcggcggcgtttcgccgttggcagcagtataccgaacgccaagctccgcgggcggaatccgcggggttttcccgacgggcggcctcggaaggtcctttccagccatgcacgaggttgcgcgcatggccggcacgcggcatcgccgattgcacgtggcctggcgaaaagatggcgagagaggatggctttggcgaggaggcggagaagacggcagggagggttccgcgaaaaggacgattcaccccttgcatcttccgcttgccgtgctacaataggcaggctgtttacacaagcgaggggaaaccctccacctgattcggcgcttcggctgctgatgggtcgctcgaatacggggccgcacgcggcccggttatgagaatcgaacccgtcgctttccggagcggcgggttttttcattgaagcgcgcaagcgcggaagaatgggaggtgagcgcgatagctgctcaagagcctcggctcaacgaagaaatcaccgtccgggaatgccgtctgatcggcttcgacggcgagcagatgggcatttacgtcacggcggaggcccagcgcgtcgcggacaaccaggggctcgatctcgtggagatcgccccgaacgccgaaccgcccgtgtgccgcatcatggactacgggaagttcaagtacgaccaggccatcaaggccaagcaggcccgcaagaaccagagcaaggtcgagacgaaggaaatgaagttccggccgaagatcgacgtgggcgactacacgacgaagaagaagcacgtcatgcgcttcctcgacgccggcaacaaggtgaagatcaccatcatgttccgcgggcgcgagatggcgcacccggagctgggcctcaccatcctggagcgcctggccgacgacctgaaggacgaggcggtcatcgagaaccagccgaagatggaaggccgcaacatgcacatgctcatcgcccccctgcccgcagcggtggcggcgaagaagaaaaaggaaaacgagaagaaggaagctgaagggaaggacgagtaatgcccaagatgaagacccatcgcggcaccgcgaagcgtttccgcgtcaccggttccggcaagatcatgcgctcgaaggcctacaagagccacatcatgaccaagaagagccagaagcgcaagcgcaacttccgccacgaaaccgaagtgtccaaggccgatcagaagaccgtcgcgcgcggtctcggccttcgctagagaaggaacaggtgatagaacatggctcgtgtcaagcgtgcagtcagcgcccataagaagcgtcgtaccgtcctcaaccgcgccaagggctactacggtgcgaagtcccgttcctaccgtgccgcgaaggagcaggtgcagcattcgctccagtacatgtatcgcgaccgccgcaacaagaagcgcgagatccgccgcctgtggatcacccgcatcaacgcggccgcccgcatcaacggcatgagctactcggtgctcatgaacggcctcaagaaggccggcgtgcagctggaccgcaaggtgctgtccgacatggccgtcaacgaccccgcggcgttcaccgccatcaccgaggtcgccaagaaggccctgtagcaacctgcgggccttcgggcctgcagagctttatgcgccgggaacgaacggcgccatgaagaaaaggccccgcatcgcggggccttttgcggtgctcgacggggcgccgggtgtgacagggggacgtgtgtgacagggggacggggacaatgtcacgccccgtggaggggacgggcgtcttacgcttcggcaagatcccggtcgtggccatcttcgtgttcccagccatccaggtggcacagctcgtccacgccggtgagcgtgcgggtgaggtaggcctgcaccacttcgcgcgcgcttccgtgcgcgccggctatgacctcgatacctgcgtggcagaacacgttcgccacgtcgtagtcgatggctcccacgatgagcgtgtccacgcccatctccacgagcagagccacgagcttgggggcggccaagccggggttcggcaggttctggcattccacgatgatgccccgatcgacccggtaacacatgtagctggcgcattgcctgaaacggggagcaacttccaagccttcgctggctactgcgatcctcatgagcaccctttccattcgatctgactcccttacgatagcgtgtttgcccgattgcgtgtccgccctttcgcccagcggggaaaaatagtaagctgaacgacatggatacctttgaagagctttcttatgacgtcgtcgtggttggagcgggcatagccggcgcggcctgtgcccgcgagctgtcccgctaccggcttgacgtggccgtgctcgaagccggcaacgacgtggcctgcggggcgacccgcgcgaactccggcatcgtgcatgccggctacgacccggtgcccggcacgctcaaggcgcgctacaaccgggagggctcgcggctcttcgctcggtgggccgacgagctgggtttcgcctaccggcgcaacggctcgctcgtgctggcgttcaccgacgaggagctggcgagcgtccgtgcgctcgtggcacgggcggcggagaacggcgtggagggcgtgcgcgagctggacgctgcggaggtgcgcgcgctggagccggccgtcgccccgtctgcgaagggcgcgctgctggccgagaccggcgccctatgcgatccgtacgaggttgcgctcgcctgcttggagcaggccgcggagcacggcgcgcggctgttcttcggcgagcgggtggtgggcatcgggcggtcggggcaggccggcgagggcggtccggacggctcgggcgggcgctatctcgtgtcgacctcgtcaggcgcgcgcattgcctgccgggccgtggtgaacgcggcgggcgtgcatgccgacgaattgaacaacctggtgagcgcccacaagcttcgcatcgtgccgcggcggggcgagtacctgctctacgacaccgaccagggcggcgcgttctcccacacggtgttccaagcgccctcgcgcgcaggcaagggcgtgctcgtgacgccgaccgtgcacggcaacctgctggtggggccgaacgccgtggagcaggggagcaaggaggacgtgtccacgagcgccgagggcctcgcgttcgtgctggaggcggcgcggcgaacgtggcccgatgcgggcacgcgcggcgtcatcgcgaacttcgcgggcctgcgtgcctcgtgcgcggagggcgacttcgtcatcggccagccggacgacgcgccgggcttcttcaacgtggcctgcttcgactcgccgggcctcacctcggcgcccgccgtggccgtggacgtggccgccggcgtggccgggctgctgggggcttcgccaaggccggacttcgacccgcgccgccggcgcgccgtgccgttctcagagatgggcgaggaggagcgtgcccgagccatcgcggccgatccacgcgccgggcatgtggtgtgccgctgctgcgaggtgacggaggccgaggtcgtggcggcgcttcatggcccggtgcccgtgctctcgctcgacgcgctcaaatggcgcacgcgcgctacgatggggcggtgccacggcgggttctgctcgcccgagatcgcgaagatcgtcgcgcgcgagacgggcacggctccggacgccttggacaagcggctgccgggctcgccgctcgtggccgcggcgcggccggactatgcggcgctggcgcggatcgaaggcgaagggggccttgcggccggcgcgcacgcgctttcgggcgcagcagggcgcggcgccgacacggtcgggtcgcttgccgatgccccttccgtggcgggttccccctacgacgtggtcgtggtgggcgggggtgcggcgggcatggccgccgcgcgcgccgcagccgacgccgaagcgcgccgggtgcttttggtggaccgcgaggcgaagctgggcggcatcctgaagcagtgcgtgcacaacgggttcggccttcaccgcttcggcgaggagctcaccgggcccgagtacgccgcgcgcgaggccgcggcgctcgaaggacgcccggccgccgttggcggtgaggccggggcgcaggatgcgcccggtgcgacggcctgtgtggaggtgctgctcggagcgtcggtgctttcggtagacgcggcgcgcgccgatgccggggagcttgtggtgcgcgcagtgagcggggcgggggtccacgtgctgcgcgcccgcgccgtcgtgctggccacgggctcgcgcgagcgcggcgccggcgcgcttaacctggccggcagccgcccgtcgggcgtgttctcggccggcagcgcgcagaacttcatgaatttgcaggggtgcctgccgggccggcgcgccgtcatcctgggctcgggcgacatcggccttatcatggcgcgccgcctggcctcccagggcgcccaggtcgagggcgtctacgagctgatgccccatccctcgggcctgcgccgcaacatcgtgcagtgcctggacgacttcggcatcccgctgcacctgagccgcacggtcgtgcgtctggagggtgcgggccggctggaggccgtgcacatcgcccatgtcgaccccgccacgctcgagcccgtcccgggtaccgagcggcgcgtggcctgcgacaccctgctgctgtccgtgggcctcatccccgagaacgaggtggcgaagacggccggcgcggcgctcgatgcggtgacgggcggcccgcgggtcgacaaccggttggccaccggcgtgccggggctcttcgcctgcggaaacgcgctgcatgtgcacgacttggtggaccatgcgtccgccgagggcgagtcggccggcgcggctgcggcggcctatgcgcgccgcgttgccctcggcgggcatgctgccggggagggggcgcgcggtaccgcgttgccggttgccgccgtgacggcctttcccgtgctcccggacgagggggttcgctacgtggttccccaggccatcgacccggccacgggtgccgacgaggacgtgacgctgtcgctgcgcgtgtcgcgcgccctgcgcgggccgcgcttcttcgtggagggcgtggctgccgacgggtcggtgcgcacggtgaagaaagccaagaccatggtggcggtgccggccgagatggtgcagatcaagctatcgggtgccgacgttgcgggcctctcctcgctgcacgtgcgggtggaggggcgtccggacgatgcgccgtcgcccgttgcgtcgcaagcggcggctttgcaggccgcgcgaggcgccgacaagcggcccgacgtggcgggagggggagccgaatgatgcagcttgccaccgagataaccacgttcacctgcatctgctgcccgttgggctgcctgcttgaggtgtctttcgacgagcagggcagcgtgaccgaggtgtccggcaatacgtgcgggcgcggtgcggcgtacgcggagcgcgaggctgcggcgcccgagcgcatggtgacggccgtgctgcccgtggagggctgcctggaacccgtgagcgtgaagacggcgtcccccgtgccgaaggcccgggtggccgacgtgctggcagcctgcctgtccgcgcgcttggcggcaccggtcgcggcgggcgacgtcgtcgtggccgacgcgtgcggcaccggcgtggacgtcgtcgccacgaaaagcgtaccatagcggcgaggattgcaaagggctgccaggagcgagggcgccggcaggcgaggcgagggcgaaggggcaaggtggccgccatggcggacgaagacgtgcggggacagcaggaggaagggcgcggtgcccgcatcgcggggacggccatcgtggctgtgggcgtggtcgcgctgatattcgccgctgccgcggcggcgttcttcctgttggccgagctgctgcagggagcgtggctcctggccggcagcgcgctcgtcgtgctggccggcctcgtgtgggccgccaaccgcctggttcgcgtcgccgccaaccagaacaaggacccgctggggtaagaccctcgcccgcggatggcggaagggcgtcccggctggcccatgacgggaggacggccacggccagctggcgattccggccagctggcggcggggatgcgggtgccttgccggcgacccgttccggtgccgggagagggtcgggtggacgagatccggggctatggcatgtttgccgtccggataacgcagggcagattctcccgaacaggtatttctctgtgatcgttccaatcgcgcaggtggaaaacatgccatggccccggatctcgtccctgtgccattaggtcaggtattgcccgatgccgcagcttccggcagtgcgattctcctccctagcgctgctttccgcggcgcttcgccacgtcggcgcggtgggcgcgcccgggccgcaggtcgctgccgccgcgggcggacttcgccggcgaagatcccttcgccggctgctgcttcgactgggtgggacggccagaggccccctgcgcgggcttcctcgccgagggctgtgccgtcggctggcccttgccggctttcgccgccgcgcccgaggccggcttcttcgggcccttctgggcggggcgctggcgggtcggctggccgcctgccacgccggccggcttcttcgccgcgcgcttcctgccgccctgcccgccggcaccggcaccgcgaccctgcccgcgcccgccggcatcctgcgccccttccgcggcggcctcgcgggcgcgctccttcttgcgctcgcgcttcgccatctcgcgtgcggcctgggctatctcggggtcggtgcgcgcggccttgcgcgtggcgtgggcagcggcctcggccagcgcctcctgctcgtcgaacgaggctatctccatctcggggatctcgcgcttgatgagcttctggatgtcgcgcagcgcgtcctcggtctccgggctcacgaacgagatggcccagccctcctcgccggcgcggcccgtgcggccgatgcggtgcacgtagtcctcgggcacggtgggcaggtcgtagttgatcacatggtcgacgctctccacgtcgatgccccgtgccagcacgtccgtggccacgagcacgtcggtggtgccgctcatgaagttgtcgagcgcgcggcggcgctggttctggctgcggtcggagtggatggcctcggccgtgtagcccgccttcttcagacggcggcacgtggcgtcggcacggctgcgggtgcgggcgaacacgatgacgcgctcgtgccccttctcggccagcaccgccttcagcagggccggcttgagcgtctgcggggcgcggacgatgaactgctccaccgtgtcggccgtctcgcccttgtgggctatctccaccatggccgggtcgtgcaggagctttcccacgctgcccatgatggagcggtcgatggtggccgagaacaggagcgtctgccggctggcgggcgtcgcccctatgatcttgcgcatggagggcagaaagcccatgtccagcatgcggtctgcctcgtcgagcacgagcacctccacgtcgcccaggcgcgcggccccttggtccatgaggtccacgaggcggccgggcgtggcgatgagcacgtcggtgccgtgcttgagcttctggatctgcggctcgtaggacaggccgcccaccacggtggctatgcggtggtgggtggacacggccacggcggcgcacacctcgccgatctgctgcgccagctcgcgcgtgggcgtgaccaccagcatgagcggcccctgcccgcccttcgcgtgcccgagcccgtccagggcgggcagcgagaacgcggccgtcttgcccgtgccggtcttggcggccgcaatgaggtcgcggccctccagcaccagcgggatggcctgctcctgcacgggggtgggcgtttcgtatcccaggcgcgttacggcgtcgaggacttccggggacagccccagctcgttgaactgcttcatattcctctgtttctgcttcgtaaggttccaaaacggcggcccgcggccgtcgatgccgtgcggggctcgatccgccgcagcgcgcattcggaagatcgacgcgcagcggggctccgcccggcgcgcaatgcccccattatcccccaagacgctggtcatgcgggcgatctcgcggaatcgccacagaaccgccgcggcggcgggcggggagtcgggaggcgggaaaagcgggcggcgggggcggcccgcgtccggcgcgctagtcgggcacggatatctccagggcccgcacgaggtcggggaggtagaactcgtccaggttgaagccgctgtctatgaggtagcggttgaagtcgaacgtgcggtacgcccagaggtggtagacggttccgccgagctcgcacgtggcggtctcgtcgggcgggcggcccaggacggtgatgccgagcacggcggggttcgtggagcagcccacgtagacgggcaccttgtcgttggcgacgaacaggttcttgtcgccgcccaggtagtcgaagataatctcggccgccttctcctcctccgaggcgtaggcgagcggctggctgcgatgctgcggcatcacgtcgaagttggcgggcgcggattccaggtagagcgggttcgagtagcgttctcccctctggtcgaggaaggcgaaagcgagccaatcgccgtccgattcgccggcggccaggcatacggcgacggcggtgcggttgccgccgtagggcggtccctcgaacacgaacagcggttcggacatgctctggtaaagcgagctttcgccgtgcgccgcccgggccgccgcgagcgccgccccgggcgagtcgtagtaggttgcggcctcttcggcgccttcgcaatagcgcacctcggacagcatggatatgcccaccagcaagtcgagggggttctccccgacctcggacagctccttggcctcgcgggggtcgaggtactcgtccacggccaccatcagctcgggagcgctatggcggatggcggaggcgtcctgttggcgctcgcgcggggtcagggcgacgacggcgacgaggaccgcgagcgcgaccacggccgcgcaggccgcggccgtggcggctcgtctcggcccgcggtgtccgctcgcggggttcggtgctgcgtccaatcggttcacctccgtgtcgcttgagggccgcatcgggcgccgccgcttggcccccgtccgatgcgccgctcggctctagcgcgtgtgcgcgggcttcccgccccagtagaagcgcaggaaatgcttcctccgctgcgggtcgtcggggcccttggggtgcgcggccagctccagcgtggcacgggcaacgtcgcgcgcggcgtccgggtggcgcaggaagctgccgttgatcaacatggagcggatgctctccgggttcttctcgatgtggcgcagcgcgtccagcagctcgcgggacgtggtcacgtgcatggccgcgccgagcgaggtgagcatccgcacgttcaccttctcctggccgtacgcgcggcccaacagcaccatgggcacctgcgcgcacaggcattccgtgaccacgaggccgccggacttgcagatgaccacgtcgctggccgccatgagcgccgccatgccctccacgtagtcgagcacgctcacgttggcaagtcccagatcggcgcattcctgccgcaggtggcgggcgtaatcggcgtcgttgccggccacgatgacgaagtgcatgtccgaaagcgcgtggaggtagggcagcagcttgtcgagcgcgtcgcggaagtgcacgtaggggcgcggcagctgcgcgccggccagcgccagcaccacggtcttgtcctgcggcagccccaggcgctcgcgcgtctcgcgctggtcgtaggtgcggcggaagtcctcgcgcgtggggatgcccgtgatgcggatgccctcctcgggcacgcgacgggggcgcagcgtctcggccatggactcgttcgccacgcagaacaggtcggtgtagcggtgcggccagaggccctcggtctcgtagtcggtgggcacgcacacgatggggaactccaggcccgagagcatgcgcgcgcccacggccacgttcgccgccgtgatgtgcgtgcacacgatggccagcgggcgcacctcgcgcacgtgctcggtgaaggcggggtacatgatgcgcgaccaagcggtgccgccggcccacaaaaggcggccggtgagcgtgaagcgccaggtgaggtcatagatgggacgcgtggccccggtgaagagcgatgcggcgtggtcgccgtcgaacacgatgcggccccagtccaggatgtcgacgacctctacttccaggtcctcgggaacgggaacgccggcaagcgcgccctgcggcgcatgggggcggggcgcgccgtctgcggcttctccggcgccggcccgggcggccgccgcctcgtcgcgcagcagctcgaaggcctgggccacggccatggccgcgctgcggtggcccgagcccacggaagcgtgcatgacgatgacgcgcggcttgggcggcgctgcggcctcgtcgcccgcgggctctgcggtatccgacaatgccggcgcggcggccggcgtgtcggctgcatcggaaggcctcgcatttccgacggggcccgaggggggctcctcggcctcgccggggcgatcgattaggggttgcggccgagccgccttgtccgtgtccatgcttccatcataccgcaacgtccccgcttgcgggcgatttcccggtccgccagcacccggattcacggaacgagtggaacccttccgaaagcggggcgcccgatggttacggattcgtgacggacggcgaacgggaaggtgcgcgcccggccgtcgggtaaactggtcgccggcggtactccggcgcacgggaactcggaaggcacgaccgtgcgccggaagcgccatctctcggctttgcgcgggccgtcttggaacccgggcccgttccgatacgcgcgggccgccctggcatcctgctccgacatccgcggcatcgctgcgctcggcgcttcgatgcctgaaaattcacccttgcattgccgcgctggctttgcaataatgttcaggctgttttccttggcggaaaacgacttcgtccccatagtctagaggtcaggacgcggccctttcaaggctgagacacgggttcgattcccgttgggggcaccacccttgcaacccggctaccctcgtggagtcgggttttctgtttcgtgcgaaggatggaatggaaatgggaatcgacgagagaaaaatgcttggcaggaagatacaggaataccgtgaggggctcgacctcactcaggaggaactggccgtgaccataggaaacggcagcaagcagtgcatctcgtctatcgagaacggcgcgaagaacgttaccatcgacgttctatgtcgcatcgcgtccgctcttaaagtgagggtaggagacctcatctcattctaagtcgagattttatccccgacgggggggcattgcttcatgcatgcctggacgcccgcgaaagccgcctgcgttctcatgatctttacctggcatcttccagaacgccggtcttggcggggagcaggttcggcagctgggacaccaccacgccggccaggatgacgacgacgccgacggcctgcagggtgctcacgggctcgcccagcacgaacaccgagatgaggatgccgcagggcagctccgaggacgccatgatggtggacaggccggttggcaggtgcggggtgccgatgccgaacagcacaacggggatgagcaggccgaatgcgcccagtacgaggccgtacttccagatgccggcctgcagtgcgccgcttgcgaagtagccggggcacacggcgaagccgaggatgcacgcgcccaggcatacgaacaggccgcgctggatgggcggcaggtccacgccgatgcgccccgacaggaacatgaacagcgccgtgctcacggccgagagcagcccgcacgccacgccgaggggatccatggcgcccgccccctccgagaacagcccgctggcgagcagcgtgccgcccaggatgatggcggccgccgcgagctcggccgtgctcggacggcggcgcgtgacgacgatctggatgaccacgccgatccaggtgaactggaacaacagcgtgatggccacggccacggacagcctcgtgagcgcgaagttgtacagcacgcaggtagtgcaggtggtcaggccgagtcccagcaggcgcagcacgccgcagggggagagatgcacgggacgtttgcccgcaagcgccagcaccgccagcgccacggcgaacaggagcgtgccgaacagcggctggctcgccgcgacctgcgtccattggaagccgtccgcaagcgcgaacttcaccgtggtggccatgatgccgtagctggcgccgcccgcgaacacgagggccgagtatttcaagatgttcttctgcatggacgccattctagcgcattccccgcgcggtgcgcggttacaatagcgccatgccttaccgaaccatcacagccgaaaacaccgctgcggccctgggcgccgccgtggcctgcgcccgcgaccttgccgacggcggggccgtgcccgcgatgctggtgccctcgccgcccgcagccgcgcgggcacgccgcgcgctcgcggacggcggcggcgcgctcggcgtgcgggtggcgacgttctcctcgtggatcgcggatcgctgggagctcttcggggacgggcgccgcctcgtgtcctcggcggagcgcatgctgctcgtgcggcgcgccatcggcgaggctgcggacggcggcgcggcgtcgggcggcgcattggcggatgcgggcgccgccgaggccggacgggggctcgcgccggccgccctggaggcgttgggggcgacgccggggacggtcgacctcgtggcgggcctcgcgcgcgaggcgctgccctggctcgcagacgcgggctcgtcgggcgaggcgagcctgagcgacggcgagcgggccgtcgtggcggcgctcgcgcgctacaccgcgaagctgcgcgcggccgggctctgcgagctctccgaggcggcgcaggcgctctccgggacgcttcccgcgtcgccggtcgtaacgctgggattcgtcgagcccggctgcgccctcggccatctgctggatgcgctttccaagcgtgccgacgtcgtgcgcgtcgacgacgcctgcagcgcgcccgacggcgcccctgggcgcaacggcgagctgcaatcactgctggggcgcctgttcgcgcccgccgacggcacggccgtggagccgacgggggccgtgcgcttcctgcttccggccggccgctacgccgcgcctgcgctcgtggcgcgcaccctggccgacgccgcgctcgcggagcgcgccgcggcccgccgggagggccgcgcgccgctgtgcgtgtgcgcggcctgccgagagccggccgccctgttcgccgagacggccgacttcctggcgcgccgcggcgtggacgccgccgtgtcggcgcgcacgccgttcgcgcagaccggtttcggccgggcgttcctggcgctcgcggagttcgcctggggttccgggccctgcgcggcgaaggccgccgatttcgcgctcagcccgttctcgggcgtgccgcagcgggcggcctgggcgctcgacgccgcctggcgcggagaccgcacggccgaccacgcccgcatcgaggccgacctgcgcgcggcaagcgaggtgctggacgcggcgctgccggcgctcgggcgtgatgacgcggacgcggcgctcgcggtgttggaggagcgcctgcgccgcatgggcggcctggacgaggcgtaccgcgccgggcagctggccgccgtcgcctgcgcgcggcgcttcgcggccgcctgcgcccaggcgggggagccgctggcaggtgcgctggagctgctcgcgcgccagccggtgccgtcgggcgcgtgggagggcgcctcggaaggcgcggcgccggatgccccgtgcgagccctccgtgctgttcgcgagcctggccgacgccgccgaccgcccgccgtgctcgtgcgcggtgctcgtgctgtgcgacctggaggcgagctcgtatccggtgcgccccgccgaggacgccgcgacgctgctcctggagaggttggggcttgcggcgtgcggcgacgcgctggcggcctcgcgccgccgcttcttccgggcgctgtcgtgcgcgcgcgacgcggtggtgtgcgagcgcgtgctgagcacggcggacgcggacgaggcctacccggccgtcatgtacgaggagctgatcgactgctaccggcccgaccccacgcgcatgggcgacctcgaccgcgcgacggggctgccccaggcgctcgtgcccttcgccgagcgtgcgggcgaggatgcccttcacgcgaacctggcgcccggcgacgatgcgtccgatgcggaggcgtgggaggttcctgcgagcggggacgtgtcgcctgccgcgcgcgggcgcgtcgtgctgccgcgcgagggcgggtcggcttccggcgaccgcccggcgacgcccgtcctgtcgccctcggccatcgagagctacctcgagtgtccctgcaagtggttctcgctgaggcgcctgcgcctgtccgagcccgacgcgggcttcgggccgctggagatgggcagtttctcccatggcgtgcttaagagcttctacgagcacttcatcgaggcgggcaacgcgaaggtggcgccgggcaacttggaagaggcgcgctcgctcatgcgcgagacgttcgcccgccatctggcgttccagcccgagctcaagcgcaaggccaacccgcttttgcccctcacggccttcgagcgcgccgaggcgcacggcctcgagcgccggctcgtgtcctacctcgaccgcgaggccgcgctgctgcccggctttgcccccgcctacttcgagctcgacttcggcgcgaaggagccgttcgcgtacgggggcttcgagctgcggggcagcgtcgatcgcatcgacgtgaacgggcgcggccaggccgtggtcatcgactacaagggatcgctctcgcccgactacgcgctggcctcggcgtcgccggcggccaccgccggcggggcggtgctgccgcacaaggtgcaggcgctcgtgtacgcccaggtggcccgccgcctgctggggctggaggtcgtgggagcgctctacgtgtcgtacgggagggacgggcgcgtcgccggcgccttcgaccgcaccttcgtgggcgcggccgacgtgccgggcatcgacgcggaagcctgcggggcgccggggccggccgccgaggccgtgggcgccgggtcgttcgccgagttggcggaccgggtggaggagggcatcgcccgggcggccctcagcatgggggcggggcaggtgtcgcccgacccgcgcggcgctgacccgtgcggcttctgccccgtgctcgcctgcgagaggaggcgttaggccgtgaacctggattcctgcacgccgggccagcgcgagagcgtgatgcgcgtggacggcccgctgctcgtgtccgccggggcgggctcgggcaagacgttcacgctcacgcagcgcatcgcctacgcactcctgcccgagagcgggccggcggcgggcggcatcgacgaggtgctggccatcacgttcaccgagaaggcggccgccgagatcaaggcccgcgtcaagcgcacgctgcgcgccgagggcatgtgcgaggaggccctgaaggtggacgccgcctggatatccaccatccacggcatgtgcgcgcgtatcctgcggacgcacgcgctggagctggggctggatccggcgttcggcatcgtgggcgacgcggagcgcgccgacctcgtggccgcgagcatcgacgaggcgctcggcgccgacaacgacatcatcgagcgcgggtcgtacggggcgctgttcgacgagttcccggcgcgctcggcactgccctcggcgccctcggtggcgtcgatgctgcagacgctgctcgacaaggccgtgggcctgaggggcgggctggacgccgttgagctggggccggagccgccggcagcatcggcgctcgcgcgcgagctgctgctggcgtacgaggacgtggcgggcgcgctcgagcaggccggcaagagcgccgcggccgagcgggcgcgggtgcaggcgaccgaggcccaggaggcgctctcggcgttcatcgccgggcagccggacggctgcctgcgcgacctcgcggccgtggtggacgggtgcgcgtttctgccgaagacgttcggcggctccgacgtgaaggagcgggtggcggcataccagcaggtccacgcgcacgtgtgccacagcttggcgctgggcttggcctggccgcgcgcggccgagctcatggcgctcgcgcgcgacgtggcgcgccgctacgaggacaagaagcgcgctctgtgcaagctggacaacgatgatttgctggtgaggacgctggccgccttcgaggagcacccacacgtggccggccgctacgccgaccgcttcaagctggtcatggtggacgagttccaggacacgagccagctgcagatagacctggtggcccacctggctgggccggggcttgcgcgcctgtgcaccgtgggcgacgcgcagcagtccatctaccgcttccgcggggccgacgtgaacgtgtacgaggcccacaagcgcacgatgcgctcgggcgaggtgggcgcgctctacgtggagcttgcgaagaatttccgcagccatgccgacgtgctcgcgttcgtggaccgtgtgttcgagcagccccacgtgttcggcgacggcttcatgtcgctcgagccgcacgaggggcgcccgtcggcgtaccgcggcgacggcccgcgcatcgatctggtgctggccctgcgccccgccgcgcgcgggagcggcgtgggggtcgacgacgcgaaggccgcctgcgcccgcgccatcgcccggcggttcgccgcgctgcgggcgtgcgggcacgcgccgggcgacatggtggtgctgctgggcaagatgtcgcgtgccgagacgtacgcccgggcgctgcgcgacgagggcttcgagtgcgccgtgacgggagggtcgctgttcgcggcggctcccgaggtgcgcgtggtggcccggttcgtggaggcgctggcgaacccggcgaacacggcggcgctgttcgaggtgctcacgagcgacatggtgcgcctgtcggccgacgaccttctggagctggcgaccgagcgggacgacgagacgggcgagctgcgccgccgcgacctggacaaggggttcgcccgcctggcggagcgcgcggacgggcttccgccgcgcctggcccatgccgtgcgcctgctcgcgcgcgcccagcgcgacgcgcgcacccgccccctctcgcgcgtcgtgcgcgatgccgtcgtgcgctcgggctggatggcgcggctcgagggccagggcgccgcgggcctggcgtgcgcagccaacgtgctcaaggccgtgcgcctcatcgagcagctggagggggagcgcggcctggggctggcgagcgcggcacgcgcgttctcggccgagctggcggcggggatgaaggaggcgcccggcgcgctctcgggcagcggcggagacgtggtgaggatcatgacgatccacgcttcgaagggccttgagttccccatcgtggccgtggcggacttcgccggcccggcgctgcccccgggcaagctcgtggtggagacgtgcggtgcggccgcgcacgcctcgcttgcagcgggcggctcgctggacgcctttcccggcgtggcgaagcgggcgggcgccggcggcttcgaggacgatgaggatgccgacctggccgccgcccggcgcctgttggaggaaggcggccccgcgcgcgacggccggggcgcacccgcgtgcacccaggacgcctaccgcgcggcgctgcgcggccgcgcagcggccgaggagctggccgaggcgcgccgcaagctgtacgtggcgctcacccgggcgagcgaggcgctggtcgtggccatggacgcgaaggcgcccgcggccggcaagcctcccgcgtatccggcgctcgtggacgacgtccgcagcgcgctctgcggcgcggcctacttcccggagggcgaggccctgctggagtacggcggcagcgcgccggcgcgcttcgagcgcatcgccgtgcaggcggcgggtgccgcattcggcgacgccgatcccgatgcggaggcggaagggtcggcctgcggctccgatgcggcacgcgcgccgttcgccgtgccgcgcatggccgggttcgagcctctgccgcgccgaccctggcgaccggccggcgaggatgctttctcttactcgtccatagcccccgcatacgcaccagccttcgacgaagcgctgggggccgcaacggagacgggtgtcggtgcgccgtcctcggtcgaccccatcgtcggtgcgctgccgtcgacgctccgggacgaaggggaggaggcgcacctggaagccgacgctgacaaggccacggcgctcggcagcgcgttccaccgcgccgcgcagttcgccgtagaggcgggcgccgtccccgacgacgcgcggctcgcggcgatcgccgaagccctcgcgctctcgcctgcgcagcgcggccggcttgccgatgcctgcgcgcgctggttcggcagcgccgcctgcgcggaaacccatgcttgggagttgcgccgcgccgaggtgcccttcgtcgtggcgctggacgatgcgctcatggagggcgagatcgaccttttgtgcacgcacggcgccgaaccgggcggcacggcgctcgccatcgactacaagacgggcggctcggacgccgagacccccgcgcagctgaacggaaagcacctgctgcaggcccaatgctatgcctatgcgctgctgtcgcagggcttcgacgaggtggagctgcgcttcgtgcgcgtcgagcgccccgagcgcccgcgcggggcgggtaccgcgtccgcggtcggtcctggcgaaccccaggttgtgtcgtaccgcttcgcccaatccgacctcgaggccctgcgggatgccatagtgcgagcccgtgccgccagcacctgagcacgaccgaactgcggctcgccaagaccggtcgccttggtgctcccgctcgctgcgagaacctccttcccgcctcctgtgctcgtagtgtaacctaaaggttacgtagcgatatcatcgcccaatgcctgagtgaaaaagcccgaaccttttattatgcgaagtcgggggcgactaatcacgactgcaattttgaaggacgagcaggtattatgcggaatgcaaagaggggcggaagagagcgaggcaacgcatcagcccgacgcgagcatcgtgtatccgcccctgcgccttcgaggaccgcgcgcgaacgtgcgctaccgcctgccgtgctcgcggtacgcctcggtcacttgcagctcgtactgcttgcgggtgcccttcaccacggtgtccaggatgagcccgcaggtgaagctcaagatgccgatgaacacgagcgcaacggccaaaagcgcggagggcagcttcggcacgagccccgtggcggcgaactcccagaccacgggcacgcccgcgacgagccccagcacgcagaacagcagcgccacccagctgaagagggccagcggccggtagtccttgaacagcgacaggatcatgagcagcaccttgcacccgtcggagaacgtgtccagcttgctctccgagccctcgggcctgtcgcggtagtcgatgggaacctcggcgatgcgccagcgcttgtccaccgcgtggatggacagctccgtctctatctcgaagccggggctgagcaccggcatggtcttggcgaacacggcgttgtaggcgcggtagccggtcatgacgtcggagaactcgaagccgtagatccacttgatgagcacgcgcacgaggtcgttgccgaagccgtggaacgcgcggtcgttctcctcgccgtaggtgccgttggagaggcggtcacccaccaccatgtcggcctcgtcggccatgagcggggcgaggagctccggcgcggcctcggccgggtaggtgtcgtcgccgtccaccatgaggtagtagtccgcgtcgatgtcgcgcatcatctggcgcacgacgttgcccttgccctggcgccgctcggcgcgcaccacggccccgtgctcgcgcgcgatctctcccgtgccgtcggaggagttgttgtcgtagacgtagacggtggcatcgggcagcacccggtggaagtcgtccaccaccttgccgatggtcacggcctcgttgtagcaggggatgagcacggccacgctgccctgctcgggcacgttctgggtgcgcggcgccccggcctgcgcgtccttcgtctcttgcacgtttcgctcctcgattctcgtatgcgcctatcctacccgaaaggcccctcgcgcgccagccgtcgcggggcgtttcaccgtggattcgcaagggcggagccttccccggcgccctttcccggccggccgtcaggaagccgttgccaagcggtaggacggcgggggagggtgccgcccgcggcgatggtagaatgcccgaggttccgacgacgaagatgggtgaggctttcagcatgggcgtgcatttcgattcgcacgggcgcaggcgcgtggcggcggctatcgtggcggtggccgtggccgtggcgctggtgctggcctacaccatcgtctccacgcgcaaggccaccgacgaggtcatcgcgaacgtgagcgaagtgtacctcggcgagcttagcaagcagctggtcttccacttcgatacgggcgtggagaacaagttcagccagctggagacggtggcgagcggtctggagctggctgctcccgacagccgggagcagatggcgggctacctgcggacgcaggcgggcaacgacgattacgcgtttctcgccgtgcggacctcctccggcgagctcgtctccgcggacggcgacgtgcgcgcctgcgacgatgacgacggtgagctgcccgcgtaccgcgatgcgcaggggcgccaggtcgtgttgtacgacgacatgatagtgctggtggacgacgtcgagccgtttcgctgcggcgacgacatgatcgtggccgccgtctgcggcttcgcctccctgggcgtgggcgaccgcctcaacctcacgctgttcgacggcttctcgcgctccatcatgatcgaccgcaacggcgattgcgtggtgagcgaccggaacagcggcctgaatccaggcgagagcctgttctcgctgatcgacgagcggggctcctttgtcggaggcagcgccgaggaggaaaggatccgctcggttctcgcgcgtggcgacaccgtcaacgtgcccatcgtgttcgatggacgcagcgagtacctgtacttctacccgctcgggcatgcggaatggtacctgtgcaccgtcatgccctacagcgtcatcgagggagatatcggcgaccttagcggcaccatcgccgcaaacgccgccatcgtgggcgtggccgtgctgttgttcgtgctgctggtgttccttatctactaccggatggccaggcgcaacacgcgccttctggccgaggagaaggaccgcgccgagcgcgcgttcgccgaggcccagcaggcgagcctggccaagaccgagttcctgtcgcgcatgtcgcacgagatacgcacgcccatgaacggcatcatgggcatgacggccatcgcgcttgagagcatcggcgacgacggcaaggtgcgcacgtgcctggagaaggttacgctgtcctccgagcacctgctgtcgctcatcaacgacatcctcgacatgagcaagatcgagagcggcaaggtggagataaagaaagagccgttcgacctgtccacgttcatcgggtcgctggcggccgtgttccgcgcgcaggcctccgagcgcgacgtcgccttcgccgccgtggtggagggcgacgtgcccggccatgtggtgggcgatccgctgcggctcaaccaggtgatctacaacctcatgggcaacgcgttcaagttcactcccgaaggcgggagcgtcacgctgcgcatcgagcgtctcgcggatgcgggggacggctgcatctggctgcggttcgcggtggacgacacgggctgcggcatcgagcccgagcacctggacaagatattcgcctcgttcgagcagggcggctcctccgtggcgcgcaagcacgggggcacagggctggggctggccatcacgaagcgcttcgtggagctcatgggcgggcgcatccgcgtggccagcgtcgtgggccacggctcgtcgttcgcggtggacgtgcccctcggccgcgccaccggcgagccctccattgtcgaggagccggacgccgaggagggggccgtgcccgtcggcatccagccggaagcgcacgacttcgcgggcacgcacatcctcgtggccgaggacaacgcgctgaaccaggagattgccgtggagctcatgaccatggcgggcgcaagcgtcgagacggcctccacgggccgtgaggcggtggaggcgttcgcggcctccgatgtgggccatttcgacctcgtgctcatggacgtgcagatgcccgagctggacggatacggggcggcgcgcgccatccgggccatggaccgccccgacgcctccacggtggtcatcctggccatgacggccaacgccttcaccgaggacgaggagcgcagcgcggagagcgggatggacggccacttgagcaagccccttgatattcgccgcgtttatgccacaatagacgggtttttggagaagcgccgcaacgggcgctgaggcccggccgccgtgcggccggcggcggggaggcgcgaacgtgaagaagctcattgcccagatcatgaagttcggcgtggtgggcgttatcgccttcgcgatcgactacggcctccttgcgctcctgaccgaggcgttcggcgtgaactacctggtgagcgccaccgtctcgttcaccgtgtccgtggtgttcaactacgtggcgtccatgcgctacgtgttcaggcacaaggagggcatgagccgccgccgcgagttcgtcatcttcgtggtgctgtcggtgatcggccttcttatcaacaacctctgcatgtgggcgggcgtggagcttctgggcgtccactacctgatcgtgaagatattcgccaccatcgtggtcatggtgtggaacttcgtcacgcgcaagaagttcctcgacgccggcgacgagccgggcgagatcctctcggacatcgagtagggagcgcgggcgggaccggcgtggcgcccaggaggagccggccggtaaaagaagggccgggcgctgcgcccggcctcgatgctctctgctggtgcccttgacaggattcgaacctgcggctttctgctccggaggcagacgctctatcccctgagctacaagggcacgacggcagattatacgctatgatggtcgaaaacgtcgatcaaagctaaggaaatccaaattcatggaagagacgctgcgcatcgagcgcatggggaacggggccgaggccgtggggcgcttggcgagcggcaaggcggtgttcgtggcgggcggtgcgcccggcgacgccgtgcgcgtggaggtggtggaggagaaggcctcgttcgcgcgggcgcgcatcgtggcggtcgaggagccctccctccagcgtgtggagccgtgctgcccacagggggacgcctgcggcggctgcccgtggcagcacctgtcctacgaggcccagctggaggcgaagcgcgccaacgtcgtcggtgcgctcgtgcacacgacgggcttcgacgccgcgcgcgccgaggacctcgtgcgcccctgcctgccgagcaagcggcagtggggctaccgcaacaagctggagctgggcgccgcgcgcgcggagaacggcgagttcctgctgggcttccatcgcgagggcacgcacgagatagccacgccggccgtctgcccgctcgcccatgatgccgtcgccaaggcgcccaaggccctgcgcggcgcgctgcggttcgctcagggctcggccgacctgggaatcttccgggtgggcgtgcggcacagcctgcgcacgcgcgagatcgagatcgcgctgtggaccaagcccggcgcgttcccccgcgcccatgtggcgaagacgctcaagagcgcgctcaaggccacgagcatcgtgcgcgtgctggccgaccccgggcgcgcgcgcaagataaagggagtggagaccctcgacggcaagggctgctggggcgaggagctggccggtgcgcgcttcctgaccagcgcgccgtcgttcttccaggtgaacaccgcccaggcagagaagctggcagccgaggtcgtggagggcctgggcggccggatgggcgaggagggccccgagggcctggacgggctgctcgtggccgacctctacgccgggggcggcacgttctccgtgccgctcgcgcaggccggggccgacgtcatcgccatcgaggccgccgggtcgtcggtgcgcgacctgcgccgcaacgccgagatgaacggcgtggacatcgaggtggtgggcggcgacgccgcccgcgagctgcccgagctgggcgggctggacgcgctcgtggtggaccccccgcgcgccggcctcgccgacggcgtggcggagagcatcgccgaggcggcccccgcgcgcgtggcctacgtgagctgcaaccccgccacctgggcgcgcgatgtggcccgcttcgagcaaaacggctaccgcctggtgcgcgcgcaacccgtggacctgttcccccagacgcaccacgtggaggtggcgagcctgttcgagcgtgagtgacgctctcgtccgcgtagagggggcgccgctctcgggcgcgcccgccccgaggggccgccgcgcggttttgcgggggcggcaacgtgcggcgcgcctttcaaacccttccaaacgccccgtccacaggcgcgtgaatgttatacgatttttcacctgggccgggcgttacctgctaaaattcccaatcgtatgtggtaattcgccaacgcggcgcaaccggctccggccggggtgcgacgcgacgtaacgcaagtgaggaaaaggagccaccatggcgcagtacacgcccgaataccagccgaccggcgacgagatcgcggtcatcaccacgtcgaagggcacgatccgcgtgcagctcaagggcaaggacgcccccatccacgtgggcaacttcgtggagctggcgcgcaagggcttctacgacgacttgaagttccaccgctacgtgccgggcttcgtgatccagggcggctgcccgaacacgcgcgagctgtcctccgaggaggtcgtgaacgtgacgaagagcccccgctcccgtctgggcacgggcggcccgggctactccatcaaggaggagtacaccacgaacccgcacaacgagcacaacaacggcacgctggccatggctcgctcgcaggatccgaactccgccggctcgcagttctacttctgcctgggcgcccagcccatgctcgactcgggctacacggtgttcggcgacacgatcgagggactcgacgtcatcggcagcctgcgcgtgggcgatgtgatcgagcacgtggagatcgagaacgccgccgaatagcgcatcagggcgcccgccagccgggcgccctcgaccaaacgtaaggaagcagatgaacaacgacctattccagcaagcccgcgcggcctatgccgcgaaggactacgcaggcgccctccaggcgttcacgcagtgcttgcaggatggaagccacccgctcgcgccgggcgaggcggggctgctctaccaccagatagggaactgcctcgtcaagctcaaggactgcaacgaggccatccatgcctacacgcaggccacggccgacgcggcctacgacgcgtgcggcacggtgaactacaacttggggatggcctacgcggcgctgcacgactacgaggatgcggtcaagcacttcgagatagccgtgtccgacgccaagtacgacacgccgtacaaggcctacaccggcatgggcaacgcgctgctgaagctgggcaagtccgccgaggcgggcgtggcgttccgcgaggcggcgctcgacgagggcaaccccgaccccacgaaggcgctgctgaacctgggcgtgtgcttcatggcgctcgaccgtccggccgacgccgtggcttcctacgagagcgcgctgcagttcggcatgcagcccgacacgaagaacaagctctacgccaacctcgggcaggcctacgtggcgtgcgggcagatgcagaaggccgtgaacgccttcgagcagtccatcgccgacaagacgtactacctgtccgactccgcgagcgtggactaccagcgcgccatcgcggccgtggcccagggcacctccgagatcacgcaggtcatgcccgccgtggccgccgccggcgacctgtcgggcctggacgtggcggccgacggcgcccccatgtacgccgacgagggcgcgtacgcctacggccagcaggatccgtactactacgccgacgcctacggcgagcaggcgtactccggcaccgaggcgggcgaccacttcttcaacgcgagcgacgaagagctggagaaatggtcgaagggcctggccaagcaggaccgcaagcgccgcaatgtggggctgaaggtgctcgtggccatcgtgcttttggtggtggtggcgttcggcgcggccgtgttcctgtacacgcagggctggggctacccgacgcaggagaccgtggtcaaggagctgttcgccaaccccgaggccgcgtcttccaccgtgttcgccaaggaggtcgacgccgacaaggccaagaccatggtcgagccgctcgtggccgacgcgaatcctgccatcgacggcgtggacaagtccatgagcgactccacggtgtacgtgacggccaagaccgagcagggcggcgacgtgcagtacaaggtgtcgctcgtgcgcgacatgatcggctggaaggtgtcgagcgtcgagctctacttcccgagccagaactaaccgggttcaccgaaagtgcgcgcgcgtgcgcgcactttcttcatgtctgtataaaagagagaaagggaaccacatggcagtgcagaagacctacaccatgatcaagcccgacggcgtgcgcaacggccacatcggcgagatcgtcaaccgcttcgagcgcgcgggccttagcatcgagcgcatggagctgggcatggtcaccgacgagcaggccaaggccaactacgccgagcacgagggcaagccgttctacgagggcctcatctcctacatcaccagcggccccgtggtgaagatggtcgtgtccggcgagggcgcggtggcgaagtgccgctcgctcatgggcgccacgaacccggcggaggcggcccccggcacgatccgcggcgacttcggcctcatcatggacgagaacgtcatccacggctccgacagccccgagtccgctgagcgagaaatcggcatcttcttcgaatagttctcgcggctggcccgctgggcgggtattctgttcgcattagcaggtcaccagacgagaaaaggacgagagcatgctctatcgcgtcatcgatgcctcagaacttccctcgctcgtgtcggctttcatggaatcctatgaagtggtagctccggtcaagcgcgaccggagctacgtgttcgaggccgtggaatcgtacgacgacatagagctgggttacgacacgaccatctcatcgcccaagaagtacttcctgccacccaccgagatgctcttccccttcgatgcccgcgcggaagaggtggcgtccttcgccgccgagatcacgccccgcgtcatcttcggcgcccatgcctgcgacatcaacgcgctgaaccggctcgacctcgtgttccgcgacggccgctaccccgatccctactacgtggcgcgccgggcggccacgctcgtggtgggagtgagctgcgtgcccaccgacacgtgcttctgccacctgtggggagccgacgaggcccgtttcggctacgacctgttcctgcaggacatcggcggcaagtacctcgtgagcatctccagcgtggaggcggcgaacatcctggaggcggcgtgcagcccgcgcgtggccaccgacgaggaccgcatcgagttccgccatgccacgcggcggcgccaggaggccttcaacggcgacatccccgacatccaggacgtggccatgctcatggacgcgttccacaaggacccgtactgggaggagctgggcgggcgctgcctggcctgcacggcgtgctcggccgtgtgccccacgtgcttctgcttcgacatccaggacacgctcgaccccgacgggcgcaccggcgtgcgcgagcgcacgtgggactcgtgcacctcgccgcagttcgcccaggtggccggcggtcacaacttccgcgccgacgggcgcaaccgcgtccggcaccgcatgtaccacaagctcaacggcttcctggccaaccacgaccgcatgctctgcgtgggctgcgggcgctgcgtgacggcgtgcaaggcgaacatcaaccccatcgaggtgctggagttcttcgagaggaagggggcctgcgatgccgagtagctgcgcggtttccacggttcaggtgcatccgctggagggcgggcccgcaccgctcaccggcgaggagatgatggccgccaacccgtaccggccctggcctgcccgcatcacgtccatcatcgacgtgacggcgaccgagaagctgttcgagttccggctcatcgacgaccgcatccgcgacgcgttctcccacgagcccggccagttcgtcgaggtgtccatcttcggcgtgggagaggcgcccatctccatctccagctcgcccacgaagcgcggcttcatcgagctgtgcgtgcgccgcgccggcgcgttcaccaaggtgctgcacgagatgcagtgcggcgacgtcgtggggctgcgcggcccgttcgggcgcgggttccccatcgaggacatgaagggccacgacatcctgctggtggcgggcggcctcggcatcgcgcctttgcgctcgctcatcaacaacatccacgacgagcgctccgagttcggcaaggtcaccatcatctacgggtcgaagaacccgtccgaggtgatgttccgccagcagttcgagatgtggcgccaccgcaaggacttcgacctctacctgaccgtcgaccaacccgacgacacgtgggatggcgaggtgggcctggtcacgaagccgttcgagcatctggagatcgacgcgtccaacacgttcggggcgctgtgcgggccgccggtcatgtaccggttcgccatcgacgaaatgcgcaagaagggcatcagctacgaccgcatctacgtgagcttcgagcgccatatgaaatgcggcatgggcaagtgcggccactgccagatcgggcaccagtacgtgtgcatcgacgggcccgtgttcaactactgggaagccaagaacattcaggggtcgatgtgatatgagcggatactgcatagcctgtcaagagaaaccgcagcctccctgcgtcgtggtggtcggcctggccagctgcttcggctgccagctgcagatcacgaacgtcgaggagcacctgctggacgtgctcggacagatagacctgcgctactggcagctgacctcgagcgagcccatgcccgaagccttcgatgtcgccgtcatcgaaggcgcggtgaccaccaaggaggctgaggagaccgtgcggcagctgcgcgagcgcgccggcgccgtcatcgccatcggcgcctgcgccaccacggccggcatacccggcatggcggcggcgggcttctccgagcggccgggccaggtgtacgacctcgtgcccgaggcctgtggcgacatgatagcgccgcagcccgtgggggccgtcatcgacgtggacttcgaggtgcgcacgtgcccggtggactccctcgacttcatcgacgtgctccagcgcgcgctctacggctcgaacaaggccgtgcccacgcgcacgatgtgcggcgactgcaagcgcaacgagacgagctgcttcttcggcaagcagcagctgtgcctggggctggtgacgcgtgccgggtgcggtgcgcgctgcgtgaacctggggaggccctgcaacgggtgccgcgggctgtcgcccgacgcgaacctgccctcggcgcgcgaggcgtgcgagcgctacggcgtgcccgtggcggacttcgacaaggcgctggagatgttcaaccaggtgaatcccgccctagcggcgagcgagtagggagcttccatgacgaaaaccgccatacacgtggaccatatcgcacgggtggagggccacggcaacgtgcacgtggtcatcgaggacggcgccgtgaagaccgtggagatgaacgtggtggagccggcacgcctgttcgagagcatggtgcgcggccgcagctggcgcgaggtgtcctacatctcctcgcgcatctgcggcatctgctcggccagccacgtggtcaccgacctcaaggccatcgagcgcatcttcggcgtgcaggtcacgccccgcacccgggccctgcgcgagctgctggtatacggctcgtacctgcagaaccacgccacgcacctgttcgtgctggccgcgcccgacttcgtggggcagaagagcgtgttcccgctggccgagagcgacccggcgctgttcgagggggcgctcgggctgaaggcgctcggcaacgagctgtgcacggccgtgggcggccggtccatccaccccatcacggcggtggtgggcggcttcacccacgagataggggcgggggagtaccgcgcccttgccgacaagatggactcgttcgcggcgttcgcggctgcggccgtggacctgttcgccggcttcccggtgccgcgcatcgccacgtccggcgacctgctggccatggtggagcccgactactacccggtggagtgctccgacacggcgcgcttcctggacgccggcatcgagttcgacgccaacgacgtggaagcgcacctggaggagtacgccgtgccgcattccgccgcgctgctggcgcgcgtgagggagacggggtcgcccttcttcacgggcgcgctcgcccgcatcaacgcctcgtggcagcacctggggcagaacgccaaggtggccgccgccaaggcgggcctgcgcccgcccgagcgcaaccccttcatgaacaacgtggcccaggccgtggagctggtcgatgcgctcgaccgctgcgcgggcatctgccgcgcgctggccgagccgggcgccgtggagggctcgagcgagccggtggacttcgaggtgcgggccggtcgcggcgtgggcttcaccgaggccccgcgcggcgcgctgttccacgacctggagctggacgccgagggccgagtggtgcacgcctccatcatgacgcccaccgcccagaacgtggcgaacctcgaggccgacatgcgcctgctggccgagcagctcgtggccgacggctccgaagaggacgaggtgcgccttgagatcgagaagctcgtgcgcgcctacgacccctgcctgtcctgcagcgttcactagaatgagacagggggacggggatgatgtctcatccccgtccccctgcaacgcgttggctgtgcgctgcgacgtcaggctcgggcaacgatgttgcgtccgacacccgtgagccgttcgatctgtcgtacggaaagtcccagcgcccgcagcttcctgagggcgcgatcccgctcgctcttgtcgagcaatgccagccggtctgcgaaatcggctccgaggtgggaggcggctacccgctccgcctcggcttcgcttaaatagggcccccgctccttcaggcttaccaggtagtcgtggccttgggacgggtcgcagtatccctcgaaggattctgcgcccccaaccagctccagcaccagcgatgtgtcgcagattcgcggctttccgacgtattcgccgtagctgctccaggggcagtcgcgtggatgcgaggcccccgtgtccagcggattgagatggatgtagcggatcgcggcgagaaggtgggcttccgtttcgacgggggcgctaaggcaccaggcaagcagcctgacgtcgtctttctcgggaagcgcgcggagcctttcgacgaaacgcagacggtccttgtcgtcttcgaacagcctgcgtcgccccgctccttgcgctgtgacatggtatatgccgctgttcgattctcgacgggcttgtctcggcatgtcggctcctgtcctcggcgctattcgcgatgccgtgattattgcacgatgggggggggttgtgctcggcaaggaggggttgtgtccgcgaatccagaatgagacatcatccccgtccccgtgtctcattccgcccgccgggcggggtgtgcccctcgtggattttcaacgccggggcaacgcctgtgctagaatgcgtttttacttggaatacgagaattcaaggggtttgcctctatgtcctttttagacgcgttctccgggctgaccggccaaatgtctacggacatggccatcgacctcgggactgccaatacactggtcgccatcacgggcgagggcatcgtcatcaacgagccctccgtcgtcgccatcgagaagagcacgcaccgggtgctcgcggtgggccacgaggcgaagaacatgatcaaccacacgcccgaggcgttctcggccgagcatccgctcaaggacggcgtcatcgccgactacgacgtgaccgaggccatgctctcggcgttcatcaacaaggccgcggtgcgcaagtacccgtggcaggccaagccgcgcatcgtcatctgcatcccgtgcggcgccacgtcggtggagaagcgcgcggtgttcgaggccgccatccaggccggcgcgcgccaggcctacctcatcgaggagcccatggccgcggccatgggcgccgacctgcccgtcaccgagcccacgggctccatggtggtggacatcggcggcggcaccacggaggtggccgtcatctcgctcggcggcatcgtcacgtcgtcgtcgctgcgcctggctggcaaccgcatggacgaggccatcgccatgcacctgcgcgaccttctgggcatcaagatcggcgagcgcacggccgagatcatcaagatcaagatcggctccatcctgccgttcgaggacggccgcgagcgcgacatgatcatctccggccaggacgtgatcaccgagcagccgaaggaggtgaccatccagtccgaggacgtgcgcgccgcgctcatcggcccctgcgaggagatggtcatccatatcaaggagacgttcaagaagacgaacccggacctcgcgtccgacatcatacagaacggcatcctgctcacgggcggcggcggcctcttgtccgggctggaccgctacctcaccgacaagctggagatcccggtgtgggtgagcgagacggcgctcacgaacgtcgtcaccggatgcctgaaggtgctcgagacgcccacggcgctcaagcagacgctcatgcggtcgaagtaaggcagcgcccctcaccgcatggccctcaacttccaacagagcggatcggcatcggcgaagcgggtgctgctcgtcgcattgctcgtggtctccttggccctcgccacgctgtacgcgcgcgagggcgagggcgggccgctgcacgccgtgcagggggccgtggcggtggcggtcgggcccttcaagctcgtcggcgccgcggccgacgcgggcgtttcctcggcgggcgaggggatcgagaacctcacggccgacgagtcgacgctctccggcttgcgcgagagcaacgaggagctgcgccgccgccttgccgaggccgacgagtacaagcaggaggcggagcgcctggagggcctgctcgacctcaagcaatcctacgacatcgacggcgtggccgcgcgcgtcgtgggcaagagcgtggaggcgtacaaccagaccgtgaccctggacgtgggccgcgacgacggcgtggagagcggcatgaccgtcatgggcgcgaccggtgtcgtgggccaggtgaggagcaccgacgcccgcacctgcgaggtgcggctgctcaccgaccagaactcaggcgcggcggccatcatccagtcgaaccgcggcgagggaatcgtgcgcggctcgctcgagggcctgctgtacctggagaacgtggacgaggccaactggcccgtggtgggcgacgtgatcgtgacctcggggctgggcggcagctacgtgcgcggcctcatcatcggcacggtggtgcgggtggacgccgcggcgggcaacgccacgggccgcatcgtggtgaagcccaacgacacggcggagtcgctttccgaggtgctggtggtgcgcggactgaactccgagggcgcgctcggctcgacgccgcaggccggcgccggcggctccggcgcgacaggcggcgacgcggcgggcgaaaacggagacggcgaaggaggcggtgaatcgtgaacgtgacgcgcgacggcatagcggtcgcggtgggcgccgtgatcgcggtgctcttccagatcgtcgtggctcccaacatcgccctgttcggcgccatgcccaacttcgtggtggcctacgcgctgctcgtggccatcgtgcgcccggcgacggccggcccggtgatgccgttcgtgctgggcctcgtgttcgacctggtgtccggcggcccggtgggggccatggccttcttgctggtgctcatgacgtttctggccgcgcgggccttcgccgtgctcgacaacgacacgctgttcatgccgctcgtcatcttcgtggcggccacggtgctcgtggaggcgctctacgccgcgttccttctggcgctcggcttcgacgccggcgcgctcgacgtgttcctgtaccgcgcgctgccgtgcgcgctctacgactgcgtgataggcctcgtgctctacccgcttgccgcgcgcgtccttgcgggcgccgcgccggcccagcccggcacgccgcgcctgcgctaggaggccgcccgtgatcgccgccctcatcgcagccgccgtcacgctcgtggcggccgtcgccgtcatcgtggcggtgctcgtcgtgcgcagccgcacgaagaccccctacgccggccagaagaaggacgtgcgctcggtgggcaacgtgggcgtgtcctcgacgttgggcggcgcgggcaagcgcgcgggcggcgccgcggcaccgcgcgtgaactcgtcgcagccggcctccaaggcggcctccgaggggctgaagccccgcttcctcgccatgggcgtgctcacggcggccatcttcggctcgctcggagcgaagctctggagcatgcaggtgctggcctcggagacgttctccagcgcggcccagaagaacaagttcaccgtcgtgcccacgcccgccccgcgcggctacatctacgacgccgacggcgtggccatcgtgaagaaccgctcgtcgctcaccgtgctggcggacgccgaggtggcgaacgaccgcgacgtggtgcagcgactgtccaccgtgctgggggtgccgtacaacgtggtgcgccagcgcatccaggacgccacgggcggcgcgcagagccagcgcgtggtggccagcgacgtgcgcctgcgcgacgtggccttcatctccgagcacgccgacgcgttccccggcgtggccgtgcagacgcgcaccgtgcgcgactacccctacggcgccctcgcggcgcatgcggtgggctacaccggctccgtgacggccgacgacctggccgtgatccccgacgggcgcgagatcgagctgggcgacacggtgggccgcgcgggcgtggagagcgtgtacgaccacctgctggcgggcgaccacggccagcgcaccgtcgtggccgacgccgagggcaacgtggtggaggtggcgagcgagacgcagcccgagcgcggcagcgacgtgtacctgtgcgtgaaggcccccgtgcagtacgtgtgcgaccgtgccctcgccgagctcatcgccccgaaggacggcgtcatcggcacgggcaagggctgcgccggcgccgtcgtggtcatggacgtgcgcgacggcggcatcgtggcgctgtcgagctaccccacgttctcgccggagacgttcacggggaccatatcgctggagacctgggacctgttcaacaccgacgagtcgtaccaccccatgctgaaccgcgccgtttcgggcacgtaccccgccgcatccacctacaaggcgttcaccggcctcgcggcgctcgcctacgggttcgccgacacgaagaggacgtgggactgcggcggctcgtgggacggcttcaataccggtcagcggcagatgtgctggaagcacagcgggcatggcgtgctcgacttccgcgggggcgtcgtgaactcgtgcgacgtcgtgttctacgatatcggcaagcagttcttccaggccagcaggagccagggcggctccatcagcgacacggccatgcaggacgagatcgcgaagtacgggttcggcaagaagacgggcatcgacctgggcaacatcgaggaggtcggccgcatccccacgccggaatggcgtgcggagcatttccgcgactacccgacggaggcggtgtggaagggcggcttcaacacgaacatggccatcgggcagggcgacgtgctggtaacgcccatccaggtggccgttgcctacggtgccatcgccaccggcaacctcatgaagccgcacctgttgaaggaggtgcgcaactcctcgggcgaggtggtgaggtcgttcgagcccgaggtcgtgggcacgcccgacgtgaagcccgagaacctggccgtcatgcgcgacgccctgaagggtgtgtccaccgagaacgctgagctcgtggcgctgttcaacaagttcggcctcgatcccgccacggtggcctgcaagacgggtacgggcgaggtctccggcaaggaggactacgcctggttcgcctgctacgcgcccttcgacgacccgaagtacgtcgtggcatgcgtggtcgagcagggcggcggcggctcggccgtcggcgcgccgctcggcatcgaggtgctggccgccgcgctcaacgccgatgcgggcgcgctcacggacgtgggctccgtcgcggggtccacgggcaagtcgcaggagctggcgacgtccggctcgtcggggcgaacggactaggaagggaggcagccatggcccagccgccgcagataaactcggtgaggacgcccgacaaggccgtcgtcgatgccacgcgctcgcgccgtttcccctcgctcaacctgccgctcgtcgtggtggtggcgctgctcgcaggctacggcctcgtcgtggtgtactcggccgtgtacggcgaccccgactacagcttcccgcgccaggcagccttggtggcggcgggcgccgtggtcatgatcgtgctctggcgcttcgactaccggcgcctgtccgagttcaccacgctgttcctcatcgtgaacgtggtgctcatcctctcgccgcacatccccggcttgggaaccgatgcgggcatgggctcccagtcgtggatcaagatgggcccgctcccgcaggtccagcccggcgagttcgcgaagatcaccgtcatcctgctggacgcgagcgtcatggcgcgctacggcggcaggctcgacgatctgcgcgagtacctcaaggcgctcggcatcatgctcatcccgtttctgtgcatcatgacgcagcccgacctgggcacgggcctcgtgtacctgttcatcggcgcggtggcgctcgtggtgggcggcgcgcggccgaagttcctgctggtcacgctagctgccggcatcgtggccgtggcctgcgtgttcgcgctcgacgaggtgctggccgtgcgcaacgccgacggcaccgtggagtacaagctgctcaagaactaccagcgcgcccgcctgctcgtgttcctcgaccccgagctcgatcccacaggtgacggctacaacctgaagcaggcgcagatagccatcgggtcgggcggcctgttcggccagggctacatgcagggatcccagcatgcgctgggaatactgcccgaggcgcccaccgacttcatcttctgcgtgctggccgaggaactcgggtttttcggtgtagtggtgctgctggggctgtacctcgcgctcgttttggtaagcttccgcatagccggctcggccggcgacttgttcggcctgctcatcgttatgtgcgtggtgggcatgtggctgttccagatacttgagaacattggcatgacctgcgggctcatgcctatcacgggcatacccctgccgttcatgagctacggttcgacgggcacgatcatgaacttcatcatgctggggctcgtaggctcggtatgggcccacaacactgcgaccgggaagaaggacagctatgcagatacccgttgacgtgaaggccgtcatcgacgaggcgacgaacatcgacgaggcgcggcagacgccgctatcggtgagcgtgtacatcgacgagagcgcccccggcgacgtcgtcgcgcgggtgcgcggcgcgttcgccagcgcgagcccgcatgcgcgggtgtcgctgatgtacttggacgggcgtccgttcgcgccgtatgccggcgacgacatggccgtcatcgtggcaggcttctccgaccaggtgggagcctatgccgatgagctgcgcgccgcaggcgtgcccgtcatggttgccaccaccatgccctcgctcgtggccgagatcgcgcagtcgcaaggccatcccatcccgcatgccgacgtggtggcgcccgatgcgccggggcgcggggggcgcctgctgcccgcccgcacggacggcgcggcgcccgtggccgccgccgagccgtacgtgctcgacgagcacgccgccgcctcgctcgaccgccgtatgggcgagtggatcatcgccgcctgccatgacaagcgcctggcgttcgcgttggcgttcccgttcgtgcgccgtccgctgtccgtggacgccgtgaacgcaacggccatgcagaacgccggcgtcggcctcgtggtgttcattcccggcgccgacctgcccatcatgacgctgaaccaggcgaagatgctgctccagatagccgccgcgtacggcgagcccatgagcatggagcgcgtgaaggagctggctgccgtcgtgggcggcgcattcgcgctgcgctcggtggcacgccaagtggtggcgttcgtgcccgcgctcggctgggccgtgaaggctgccatcggctacacgggcacccaggccatgggccgcgccgccatcgagtacttcgaggagggcggcagcatggcgggcctcgccggggtggtggtccgggcccgcgacaaagccgtcgagctggccgaggacgcccgcgagaccgtgtgcggcgagccttctcccgcgccggcccatgctgcggcgcctgtgcggggcggcggtcgcgtggccgatgccgcgcgctcggccgcgacgagggtggccggcgtcgcgcgcagcgccgccgggtcggccgtgccgttcgcctcgtcggtcgtgcaggccggcgcccaggctgccggtgtggaagcgcctgcggcggcccggagcgccgcgcgctcggtggccggcgccgcgcgctcgcgtctcaaggtcacgcgtccctccgcgcactagcgcgcttcccaacgaaagaaggtcgaatccaatgacggatctctggccgcgcctcaaggcgctgcttggcgatgcggagcgtcccgcgcgctacatcaaccgcgaatggggatgcgtgtacaagcccgacgcggacttccgcttctgcatggtctatcccgacacctacgagctggggcaggcgaaccaggccgtgcgcatcctcgtgaacgcggtgaacgcagtggacggcatggccgccgagcgcgcgttcctgccggcgccgacgctctgcgacaccatgcgcgccgagggcctgccgctgttctccatcgagagctgcgctcccgtggccgagttcgacgcggtgggcatcacgctgccgcacgagctggctgccacgaacgtgctggagacgctcgacctggccggtatcccgctgcgtgccgacgcgcgcggcgagggcgacccgctggtgctgggcgggggcccctgtgcgttcaaccccgagccgtacgcgccgttcttcgacgccttcagcatcggcgagggggaggaagccgtgcccgaggcgctcgcgctcgtcaggcgcctgcgcgccgagggcgcgccgcgcgcggccatcctgcggacgcttgcccacgaaccgggctggtacgtgccgtcgctctaccgctggcgcagcgagcccgaggcccaggaagcgggctcgtggatcgagcccctcgaggagggccttccggtgcgcatagagaagcgcctgttcgggggctttgcggaaagccctggctgggagccgtgcatcgtgccgttcaccgaggtggtgcacgatcgcctgaacgtggaggtgctgcgcgggtgcgcccgcggttgccgcttctgccaggcgggcatgatgtaccgccccgtgcgcgagcgctcggtcgacaacgtggtggcgtccacgctggcagggctcgccgcgacgggctacgacgaggtgagcctgacgtcgctctcgtcgacggaccactcccagatcgcggacatcctcacgcgcctcaaccatgcctgcgacggcaagggcgtgcggatttcggtgccctcgcagcgcctggacgcgttcggcgtggacatggcgggtttggtggcgggccagaagaagggcggactcacgttcgcgcccgaggccggcactcagcgcctgcgcgacgtcatcaacaagaacgtgaccgaggaggatctgttcggcgccctggacgcggcgttcgcggccggatggcggcgcgtcaagctgtacttcatgatgggcctgcccaccgagacggacgacgacatcaagggcattgcgagcctggcgagccgtgcctacgaccgcgcgaaagccgccgtgccgcccgagcagcggggcaacgtgcgcgtgagcgtgtcgtgtgcgctcttcgttccgaaggcccagacgccgttccagtgggacgggcagataacgcccgaggaggcgctgcgtcgcgtgggcatcctgcgtcgcagcgtgaagtacaaggccgttgacgtgcactggcacgatccggccacgagcttcgtggaggcggtcatgagccgtgcgggccgcgaggcggcggcgtgggtcgaggccgcctggcggcgcggcgctcgcttcgacgcctggacggagtgcttcgacggcgaggcgtggcgggcggctgccgacgaggcgggcgtcgaccccgaggccatcgcgcagacgggctacccgacggaccgcgtcatgccgtgggagcatatctccacgggcgtgtccccgcgcttcctcgcacgggagcgccgcctggccgacgagggccgcacgacgccggactgcacgttcggccggtgctcggcgtgcggcgcctgccccgcgctcggggccgacaacgagctggcctcgccgcgcacggcacccgccgccctgcagcatgccgcgggcgagcctgccggaggaggccgcgatgaggccgcgcctgcgaccgccgaaggtaaggaggcctcccgtggctgatcctcgcaacttccgcctgcgcgttgagttctgcaagcaggggcgcctggcgctgctgagccacctcgaggtggcccgtgcgctcgagcgcgccgtacggcgcgccggtttgccgttcgccatcagccagggcttctcgccccacatgaagatcgccttcggggccgccctgcccgtgggcgtgggagggctgcacgaggtgttcgacctgcagcttacgcgctacgtgccgcccgagcgggcgctcgaggcgctccaggcggccagcgcccccgatctcatggcgaaggaatgccgctacatcgaggcttccgcacccgccgcctccgtcgcgtacccgctgagcacctaccgcgcgctgctgtcgtgcgcgcccgccgcgctgccggtgcccgacgagataaccgtcgtgcgcaagaagaaggagaaggtgctgcgcacagccgacttcctcatgggcggcatcgagctggcaggcgccgtggccacgttcgccctcgaggcgaagcccacgggctccttgcgccccgacgtgctgctgcacgcctgcgtggatgcgtacaacgctgcaggggcggatacgcccgcgctcggcgccgcggcggatgcgccgagcggccttccagaggacagcctctccgccgagtcctgcgcgccggacgagcgcctgcgcgtcgtcaccctcacgcgcatcgagcaacgcgcctgacgcgctgctcgacgggatggtgctagggggcggggacgaggtatcgtccccgcccccttgccgcttcggccgtatacggccgaagcgggctcttacggcatcgaccgatgccgcgggcggctatcaagcccggcagttcgagcggtcgggtgccttcagctgcttgagccaggcctcgtaagcctccttgtcgctgcggctgggtatgccgtcgcgcgacggtcgcgcggcgttcctccgcggctcgggggcagagtcgtccgccggcgcggcgccggacgtggtgcggggattctcctccatggaccctcctttatcggttgcggacgcaggcgcgccgccgggcgcgttttcccgagtatagagtacgcggcgggacggaggtatatgcccagagggctaattccagggcacgagcatccctccggccggatgggatgttcgcaggtgctcccaggcgtcgataacggcaaaaaggctccgagcgaaatcgcccggagccttcgaattctgatggcgggatgtacgagacttgaactcgcgacctccgacgtgacaggccggcgctctaaccaactgagctaacaccccgtgaagcagtggtggttattctaccgggtgttgccttctcgcgcaataccctaattcatacttttcgcctcaaagaaaaaacccgcacgaggcgggttttccagattccaatggcgggatgtacgagacttgaactcgcgacctccgacgtgacaggccggcgctctaaccaactgagctaacaccccgtgctttgcagcgcggattattctaccggtagcgtccatccggcgcaataccctattttgagttttttcgaatcgcgaagtcaggttgccgaaggggctgttgcgcggcattcgtgcaggttctgtgtccgtgtaaacaatttagaaactaaaatttaaattatgctaaggtttagcagctaaactacaagggagatcaggaaaggagacgccgtggacgaatcgttcgccgagacgaagcgcgggctgtacgagctcatgcagcgcatgcggcacgaccgcatcaccccgcccacgcccgaaggcgtgacgccgtcggaggcgcgcaccatgatgacggtggcgatgctggaggagcatggcgagcccatcaggcccggccgcgtggcggagctctcgcacacgacgcccagcgcgctgtcgcagacgttcaaggcgctcgaggagaagggtctgatcgagcggcgccgggcaggggacgactaccgcgccgtcacggtgagcctcaccgccgagggccgccggttcgccgcggaggggcgtcgcatgcgcgacgagcacatggagcaggtcatggcgttcgtgggcgaggaggacatggcgcatcttgtgcgcatcctcaagcgcgtcgtcgagttccacgaccgcacgcacgcgggcggcgagtcggcgctgtgtccttgcggccccgcgccctccgcaccgcgcgaccctgaaggaggagatgccccgtgcgcatagtccgctacctcaagaactccaagatcgcggtcgcgctcatcgtgtgcctgctcatcgtgcaggcgttcaccgaccttgcgctgccgaactacacgtcccagatcgtggacgtgggcatccagcagtcgggcgtggagcacgccgccaccgaggagatgacggcccgcacccacgacctcgtggccatgatgctgcccgagggcgacgagaagacgttcgaggccgcctacgacgagaccgaccagggcacctacaagctgaacgcccagggcgagcgcgagcaggccgagctcgaccgcatggtgtcgctgccgctcgtggccatccactactcccatcagatccccgacctcgacctcgaccaggccctgcaggcctaccaggcgggcgccgtccagaaacagcagatcctcgacatgctggacaaggcgaaggagcagatgggcgacatgggcgattccatcgtcgaccagcaggccatcgcggctgctcgcgcggagtacgagcagctcggctacaacctctccgacatgcagatgcgctacctcgtgcgcatcggcctgaccatgctgggcctcgcggcgctgggcatggcggtggccatcctcgtgggcttcatcgcctcgcgcacggccgccaaggtgggcgccacgctgcgcgcgaagctcttccgccaggtggtgtcgttctccgacgccgaggtgcagagcttctcggccgcctcgctcatcacgcgcggcacgaacgacatccaactcgtgcagatggtcacggtcatgctgctgcgcatggtgctgtacgcgcccatcctggccatcggcggcatcatcatggtgtcgcgcacgaacctggccatgagctggatcatcgtgctggccgtagtggtcatcggcgtgctcatcgtcgtgctcatgaaggtggccatgcccaagttcaagatcatgcagaagctcatcgaccgcgtgaacctcgtgtcgcgcgagatactcacgggcctgcccgtcatccgcgcgttcgaccgccagcccttcgaggagcagcgcttcgacgtggccagcacgcgcctcatgaagacccagctgttcacgaaccgcgtcatgacgttcatgatgccgctgatgatgctcatcatgaacggcgtgtcggtgctcatcgtgtgggtgggcggctcctacatcgacaacggcaccatccagacgggcgacctcatcgcgttcatcacctacgccatggtcatcatcatgggcttcctcatgatcggcatgatctccatcatgctgccgcgcgccgacgtggccgcgcagcgcgtggacgaggtgctttcgaagcagcccaccatctgcgaccctgcgcccgggaaggcgcgcgacgcggagctggccggccgcacgggcggcgcccgcatcgtgttcgacgacgtgagcttcaagtacggcgactcggccgagtgcgtgctggagaacctggacttcgcctgcgagccggggcagaccacggccatcatcggctccaccggctcgggcaagtcgacggtggtgaagctcatcgagcgcttctacgacgtcacctgcggctccatcaccgtggacggcgtggacgtgcgcgacgtgagccaggaggctctgcgcgcgcagctgggctacgtgccgcagaaggcgtttttgttcagcggcaccatccagtcgaacatcgcgtactcggacgagggcatgcccgaggagcgcgtggagctggcggcccaggtggcccaggccgccgacttcatcgcctcgaaggccgaggggctcgacgccgaggtgtcgcagggcggcacgaacgtgtcgggcggccagcgccagcgcctggccatcgcccgagcgctggccacggaggcccgcgcgtacctcttcgacgacagcttctcggcgctcgactacaagaccgatgcggcgctgcgccaggagctgcacacgcgcctgggcggcaagacggtggtcatcgtggcccagcgcatctccaccatcctgcacgccgacaagatcgtcgtgctcgacgacggccggatcgtcggccagggcacgcacgacgagctcatggagggctgcgaggagtaccgggagatcgcgatgtcgcagctctcggccgaggaactgaacgggggtgatgcggcatgagcgcgcagacggacggggcggccacgcgccgcggccccatgggcggccacggccccgggcacggcatgatgcccggagagaagcccaaggacttcaagggcacgctcaagaagatgatcggcttcatgggccgtttcaaggcggcgctcgtggtggtgctcgtgttcgccatcggctccacggtgttcaacatcgttggacccaaggtgctctccacggccacgaccgagctgttcaacggcatcgtggcgaagatcgacggctcgggcggcataaacttcgacgccatcgcgcagatactcctgttcacgctggggctgtacctgctgtccgcagcctgctcgttcgtgcagggctggatcatgtcgtcggtatcgcagcgcacgagctacgagctgcgccgctccatcgccgagaagatcgaccgcatgcccatgggctacttcgagcgcaactcggtgggcgacaccctctcgcgcatcaccaacgacgtggacacgctcgggcagagcctgaaccagggcgtgacccagctcataacgtccgtcaccaccatcatcggcgtgctcgtcatgatgctgaccatcaacccgctcatgacgctcgtcaccgtggtcatcctgccggtgtcggtggtgctcatcatggtggtggtgaagcgctcgcagaagttcttcctggcgcagcagcgcacgctcggcgagatcaacggcctggtggaggagacgttctcgggccacgccatcgtgaaggcgttcaaccgcgaggacggcacggtggacaacttcaacgagacgaacgcgcgcctgtacaactcggcatggaagagccagttcttcagcggcctcatgcagcccatcatgaacttcgtgggcaacctggggtacgtggccgtggccatcacgggcagcttcctggccgtgcagggcatcatcaccgtgggcgacatccaggcgttcatccagtacgtgaagaacttcacgcagcccatcacgcagctcacgcaggtgtcgaacgtgctgcagcagatggccgccgccgccgagcgcatcttcgagttcctggacgagcccgaggaggagccggaccacgcgacgatcacgtcgtcgcaggtggagtgcgaggtagaattcgatcacgtgcacttcggctacaatccggagaagcccgtcatcaaggacttctcggcgcgcgtgaccgagggccagaccgtggcgctcgtgggacccaccggcgccggcaagaccacgatggtgaagctgctcatgcgcttctacgacgtgcagtcgggctccatcaagataggcggccacgatatccgcgacttcgcgcgcgacgacctgcgctcgatgttcggcatggtgctgcaggacacgtggctgttcaacggctccatccgcgacaacatccgctacggcaagctggacgccaccgacgaggaggtggaggcggcggcgaaggccgcctacgtccaccacttcatccagacgctgcccgagggcttcgataccgagatcaacgaggacgccagcaacatcagccagggccagcggcagctgctcaccatcgcgcgcgccatcctggccgaccgccgcatgctcatcctcgacgaggccacgagctcggtggacacccgcaccgaggagcgcatccagaaggccatggacaacctcatggccgggcgcacctcgttcgtcatcgcgcaccgcctgtccaccatcaagaacgcggacctcatcctcgtcatccgcgacggcgacatcgtggagcagggcacgcacgaggaattgctcgcgcttggcggtttctacgcggagctgtataattcacagttcgctgagactatcgacgagatcgaggactagcgcgaccgcgggaggggcccgccgccgtgcgggccccgcggccgggcatgcgggccggacctcgtcgcgacgacgaggatggcctatgtcccgaccgggggagacgacaacggaagagcaccagggcgacggcgtgccgttcgccggccctgacacgggccgcgagggcgacgcgccggcgcggctcgcggtgttcgacttcgacggcacgagcatcgagggcaactcgcccgtgctgctcgtgcagcacctcatggagcgcggcatgctgcgcaagcgggtgatcttccgcatcctgttgtgggcggcggcctacaagctgcgcctgccgcagaacgagagcaaggtgcgcagcctggtgttcacggcgttcgagggccgttcggccgacgaggtggaccggttcctggccgacttctacgacgagcgcatcgcgctcctgttccgccccgaggccgacgccgccatgcgcgcccatgcggcggcgggcgacacggtggtggtcatctcggccacgttcgagcccatcatcctgcgcgccatggagcaccatcccttcgcgttccagatatccacgcgcatgcgcaaggcgcccgacggcacgtacacccgcgaggtggagggcctgcccgtggagggcgaggagaagatcgcggccgtgcagcgtttcggcgacggccgtttcggaccggggaactgggtgctggacagcgcctacggcgaccaccactcagaccgcgcggtgctgggcgccgcccgacacgcctttgccgtcgaccccgaccgcccgctcgcccgcacggcccgcgcgaagggctggacggttctcggctggtgagacagggggacggggatgacgtctcattcgcttgcggcggcatccccgtccccctgtcccatccctttccatcccgtgacgttttgaggtttttgcggcgcgccctatgcgcctgccctccagtccggtaaaatgcgacttgaccatatacaattgcgcatctgacaggcgaaacatacttgcgaaggaggtgggtccatgttcgagaacgctgacgcgaacagctcaccaagccagaacgacgaatacggcaactctgccgccgactacctgcaccgtgccgcgcaagcttgcgcggcgggcgacgcggtgctgggcatgcacctgtacctcgccgccttcgagaagggggcgcacggcgcctacgcgcccgacgacgaggccgtggggggcctccgccaggcatgggccctggcctgcaagctgaaagagcgctcgcttgccgagtacatcttcgagaagctggagccctatctggcctccgacgaggtggccgcttgcgccgagcagctgcagcgccttgcgctcgacaagctggaggagttcgggctgacgcgcgaggacctggaggacatgaccgacatgatctcccaggacttcctcggcatcgatgcgccgcggctcatgaaggtggagcacgtcacgctcccgcgatcaccgcgtgcggcgctgcccgacccggaggaggcggaggctgccgaggccggggacgatacggcgaaggctgccgagaacgccggggaagccgacaagggcgccgcagcttggcggcgcgaggcgggcggcacgaagggcgaccaggggaagggcgcatcttccgagcacgccgcggcgctcgcccaggctgccaaggcggtggaggacgccatgggcgccgatgccgacgcgcacgccgtggtgtcggcgatcgagcgcatctcttacgccgatatcgtcggctacaacgacgcggtagcgctcatgcgcgacttcggcctgggaatgcaggacgacccccagttccagagccttgtggagctgctcaacgcgcgccacggcctggaccgcatgccggctgccgacgcgatactcttccgctcgcccgcccgcgaggacgcgaaccgcttcatggcggccacgctcggcgagctggacatgccggccatccgcatgcgcatggaggagaacctccagggcatgcccgtgctgtgcgtcatggcgcaggccgacaaccagccccagctcaacgccgcgcgcaacgccttcgaggggccgggcgtgctcatgctggaggacttggacctgtgggcgtcgcccatgaccgagggcggcgacgacttcggcggcttcgtgttctccagcctgtcgcgcggcgcgcgcgaggctatcggcctcgtccgctcggcggtggagaacccggacgtgttcgtgctggcctcggcggcggaggcgggggagatcgacccgttcttctacgacctgctggagccgctgtccatcgtggacatcgactatcccacgccggaggagcgcgtggacatctggatggagatcgcgcgcgagcatccgtcgctgcgcggcgtgaaccgggtcgacctcgtgcgtctgtcctccggcatgccccgctacgacatctacatggcggcgcgcgaggccatcgaggaagcctacaaggccagcctcgtggcacggcgctacgtgcccgtcaccgcagacaacctgttcgacaagctggcggcataccagccgctcgactcggacgagtaccgtgccctcgaggacgccgtcgtgcgggacttccgccgcgacctcgaccatctcgacgatctgctgaaaggaaccgaggagtagactttatggatatcacgcgacgctgcgattacgcctgccgtatcctccgggccgcctacaagagcggcgacgcctacgtatccgtgtccgacatcgccgaggacgaggacataccctacgcgttcgcgcgcagtatccagcacgacctggtgaagggaggcctcataaagaccgtgcgcggcgcgcacggcggtctcatactcaactgcgatccggccgaggtgacgctgctggaagtgctggaggccatccaggggccggtgagcatctcgctgtgcgccctggatcccgactactgccagaagcagccggaatgcgcctacaacaaggtgtggcagggcgcggacaggctgctcaacggctacttcgcatccatcacgctcaaggacctgttcgaacagggagccacccatcccgtggtggagggggccatgggagcaggggaggcgccctcgccggccgtcggcgccgtcgtgccccgcgacgcgtcggaggcgcgggcgagcgcctgcgcgtgcgcgcgccggacctgcacgcagggcccatgccgctgacggacggcccgcggcccgcgtggccgcccgccgtgcccgaccgcgaggcgttcacggcgctcgtgcgcgagcggggggcggctctttaccgcgaccttccgtggcgcaacctcgacgatccctacgccgtgctcgtgtccgagatcatgctccagcagacgcaggtggcgcgcgtggggcggttctgggagcgcttcatggcgctgttccccacgatcgacgcgcttgcgtcggccgacacgtccgacgttctggcccagtggcaggggctcggctacaaccgccgtgcccttgcgctgaagaggacggctgacctctgcgccgccgagcgcggcggtcagctgccctgcacggccgaggagctggtgcagctgcccggtatcggcccggccacggcggccggcgtcgtggcgttcgccttcgaccgcccctcgctctacctggagacgaacgtgcgcacggtgttcctgcacgagctgttcccgaaccgcgagggcgtgagggatcgggagctggctcccctcgtggcggacacgtgccccgaggagggcgcccgggcatggtattacgcgcttttggactacggtgcgcatctgaagacgcaggtggcgaacccgtcgcggcgcagcgcccaccatacgcgccagtcggccttcgaggggtcgcgacggcagaagcgcgccgagctcgtgcgcatcgtgctggctgctccgggcatcgccgtgccggagctggccgagcgcctggacgccttcgagcaggctgccggccgcccctgcgtggatgcggacgtgttcgacggcatcgtcgccgacctggtttccgagggcttcttccgccgggagggcgacctgctcttcgcttagggggcggggcggctatggtccgcgtcgactgggcgccacggggccggtgtttgccatagcctctgttctcgtcaacgtctcggcaagctcctgatcaggtgatagagcatattgcgcctgatcagggaagcggacgaaaacggaggctgtggcatggcgtttcccgtcttggcggcggaaacctatgctagaatatccgaatcccgtgggggagtagtcggcgccgaaaggtgcggctgcgtcaacatgctgcttcttctcgaagctggcgcaacctgaaacgacaagactcgcggtgtggcgcccgacgccgcaccgctcgcttctgcagccggtgcgcacgcgccggtgtttttttttgcctgcagcccggatcggcgctgcggcgcggccagggggatcgcggagaagacgagaggaatacgaccatgggattcgcggagctgttcttgatcgcggtggggctgtcgatggacgccttcgccgtatcggtgtgcaagggcctgtgcatgaagcgcctggacatgcgccaggcactggtcatcgcgctgttcttcggcggtttccagggacttatgccgctcctcggctgggcgctggggacgcagttcgagcgttacatcacgccggtggaccactggatagccttcggcctgctggcgctcatcggcggcaagatgctgtgggacgccttccatgaggacgacgatgagctgtcctgccctgccgacggcaggctcgacttgcgggagctcgtcatgctcgccatcgccacgagcatcgacgcgctcgccgtgggcatcacgttcgcgttcctgcgcgtggacatagccctgtccgtggggctcatcggcgtcaccacgttcgtgctggctctcgtgggcgtggccgtaggccatcgcttcggcgcgcgctacgagaaagccgccgccatcgccggaggcgtcgtcctcgtcctcatcggcacgaagatcctgctggagcacctgggcatcctggcgctctagcgcccttaatccacggggtagctgccgagcaccttcacctcgcgcagcttcagcctcaggcagttcaaggcggtctgcacggccagggcgttcgcgctctcctcgaactcgatgaagaacatgtagtcgcccagctgctgcttggtgggacgcgactggatcatggacaggtcgatgcccgcgtaggcgaactccgacagtatcatgttgagcgtgccggcgcggttaacctgcaggaacagcgcgagcgaggtcttgtagcgctcgccgcggaacacggcggggtggccctggcggccgatgagggcgaacagcgtctggttgccgaaatggtcctcgatgtcgcgctcggccacgcgcgcgccgtgcagctcggccgcgaaggcgttggcgatgccggccacgtgcacgtcctcggcggccatgcgcgcgctctcggccgtggacgacgtggtgatcgtcgcgcgccccggcagccgctcggccaggaagcgccggcactgcgcgagcccctgggcgtgcgaggccacgcaggtcacgtcctccagcttcgcgtcggggtgcagcaccaggcagtggtggatgtcgagcacgtgctcgcccaggatggaggcctggctcttgaacgcgaagttgtcgagcgtggcggtgaccgacccctcgagcgagttctccttcgccaccacgccgaactcgcacttgccgcggtccacggcgtcgaacacctcgtcgaacgacgcgcattccaggagcgcgggctcgtcgatgccgaggcgcgccgcgaaggcgcgggcggcctcgtgggtgtaggtgccggcggggccgaggtaggcgaacacgggtgcggagacgggcatggggttgtccttcggtcgatgtggatgcgacggtcgctttgcgcgccatcttatgatatccttccgagcggtgttgcccgaggagtgggtcgcttctatgcaggaatccaacatttctcctgtttttcgatgagcggccttgtatcgcacgtggttcgaggaggttggccccgttaggcgagattttgcataaaatcgcgcctaacctgcataaatcatgttacgagtaggggtatctgtaacatttttgtaccatttgcggcccaaacgttgcgctcgcgtagacgctaagccacaagaaacacttctcggggaaaatgctagcagtgaatgtcagacgagaagcacctgaggaggtgtgcacatggaaacagaggccacggtttcagagtttcaggagatgctctccgctcgcggtgtgacgcggcggagcttcatgaagctttgcggcgccgttgccgcggctgccgggctgtcccagctcgccgcgccgcagatagcgcaggccctcgagaaatccgtgatcggcgctacgaaggggaagctctacccggtcatctggatcgaaggcgcgtcgtgcacgggatgtaccgagtcgttcgcccaggtcgagacgccggatcccgcgagcgtcgtgctggagctgatctcgctcaactattcggagacgctttccgcggctgcgggctggtcgatggaggaagccaaggagcagacgatcgaggccggcaactacatcctcgtgtacgagggtgccgtgctggagggttgggaaggccaggcgctgcgcgtggccgacaagcccggcacggagcacctgatcgaggctgcggagaaggccaacgccgtggtggcgctgggttcctgcgccgtcaacggcgggtggatgggcgcccatccgaacagctcgggcgcgctcggcgtgcagcagttcctggagaaggcgggcatcgatgtggatgtcatcaacatccccggctgccccgcgaaccccgagtggctcgtgtccgtgctcgtggacgtgatcatgctcgagaagctgcccccgctcaccaacgagggcaagcccgagggcatcttcggccagacgatccacgacaactgcgagcgtcgcggccatttcgagaacggcgagttcgtctaccagttcggctccgaggaggaggccaaggggtactgcctgtacccgctcggctgccgcgggccgcagacgaagtccaactgcggcgtgacgctgtggaacaaccgccgcagctggtgcgtgcaggcgggttccccctgcatcggctgctgcgaggctgcgccgaacgatcccggccacaactgggtcgaggtcaacaccccgttctacaagcgccatcgcgacctgcgcataggcgattggatggtccagcccggcacgatcgcgctcggcatcacgggcatcctggccgccgcgctcgtcgtgcacggcttcggcatgaagatcacgggccgcatggacggcggcgccgacttcgagaaggtccgcgcctgggacaagaaccaccccgacaaggcgatcgggaagtacgacctcactcgcgacgaggccaaggccgcgtgcgagaagagcagccgcaacgcgaacgcgaaggctgtcgaatccgatgaagaagaagggaggtaagcctacatgacccgttcagttatcgacccgatcacccgcatcgagggccacctccgcgtggagatggaggtcaccaacggcaaggtctccgacgcctgggtatccggcggctgcttccgcggcatggagatggtcgtggagaaccgcacgcccgaagacgccgcgcagatcgtgcagcgcatctgcggcgtgtgcccggtgtctcacgcccactcgtccgccatcgcggccgagaaggcctacggcatcaagatctcgaacaacgcgcgcatcatccgcaacatcttggaaggcgcccagttcctgcacagccatatcctgtggttctacaacctggctgcgctggactacgtgaacccgctcaacgccctcaaggccgacgcggccgacgcctacgacctcgcccaggccgccggcacgtccacgaacagcgacttcgtggccctgaaggagcgcctgtcgaacttcgccgacaacggccagctgtccatcttctcgggcaactggttcgacgccgaggacggcaccggctacaagctgccgcccgagctcgacctcatctgcacggcccactatttggaggcgctgcagatgcaggccaaggcctcccaggtctctgccatcatcggcggcaagatgccgcacgtcatgacgctgatcccgggcggcacggcgttcgttcccaccgaccagaagctcgacgacctcaagtacctcgtcgacgagatctacaactgggtcgaggccacgatgatccccgacacgctcgccatcgcgccgtactacatcgacgcgctcaactggggcaagggctgcggccgctacgtggcctggggcgtgttcgagaacgagagcatggagctcaaggaccgctacctgcccatgggcgtcatcgacgacaagctcaacctctccgacgtgaaggaagagctcatcaccgagtacatgggccactcctggtacaggggcgaggagacctacacgtctccgtacttcgtcaccgagcccgagttcacctcctacgacgtgaacgaccgctacacgtgggtcaagtgccccgcttacgacggcaagccctacgaggccggcggcctgtcccgcatcctcgcggcgtacaagcgcaacgtgccgttcatcgtggagcaggtagacggcctgctggaggcgctgggcgcccccggccagatcggcgtggcgcagtccacgctcggccgcaccgccgtccgccagatcgagacgctctacatcgccggcctcatgaaggactgggtcgccgagctctgcgaggccgtgaagagcggcgacagcgagtacttccgcgagcccgccaccatcaccggctccggcaccggcttctgggaggcgccgcgcggcgcgctctaccactccgaggaggtcaaggacggcaagatcacgggctaccagatcatcatcccgaccacctggaacctcgcgccgaagaacgccaacggcgagagcggcccgatggagcaggccctcatcggcaacccggtgggcgacatcgagaagcccatcaacgcgctgcgcacggtgcacagcttcgacccctgcactgcgtgcgcggtccacatcaccgagccggcgacgggcaagagcttcgagaccgtcacgagcccttggggggtgaagtagcatggcgcacttggcacactaccgcgaagcgcatccgatgcccttcgtcatcacgcactggatcaacctcgtctgcatgatcctgctgatcgtcacgggcttcagcattcacttcccgttctggcccgcgttcatgggcatcgcccgcggcgtgcacgtgttctgcggtttcatcctgttcatcaactgcatcgtccgcgtgatcatggccttcttcgtgaagtcctcgccggccggcggcacgcgctaccaggtcacggactacaagacctggctgccccaggccgacaaccgccaccagctgggcgcatggatcaagtactacctgttcctgaagaaggaccacccgctgggcgccaagctgggcgttccgcagaagatcagctacctggccatccccatcctcatcatcctgatgttctacacgggcctggccctgtgggctcccacgatgaacatgggctttttcgcggccggcacggatctggtgggcggcctcatgtcgatgcgcatcatccactacttcatgatgtacgtcttcatctgcttcatgttcatccacatctacctggcgaacatcgagggcatctccccgacgctgctcatgttcttctggaaggagcacggcggactcgtgtacgatcccgagcaccacacgatcgtgggcgacgacgacctgcatcacggcgagaaggcgtaagcgctcggcattcgctccgcgcatcgcgtctccatgagggaggggacctgggaaaccgggtcccctccctttttcgcgggcggagaggcgtgcgccgtctgccgggcgtgcaataacgtacaagcgccgcggcgcatgcatcgactatactgtgcctttgcgaaaggagagcaggcatatgcgatgcgaaggcggccggaccgggggtccgcaggcggcggaggagccgcggggtatggacgcgcgcgaggtgcgggcgctcgcacgccccgacgggtccatcgtggaggtgtgctcgctggccgggaacatccgggcgttcccgaaccacctgcacgaccattacgtggtgggagccctgtacgccagccgccgcgcgctcaccatcagcgcccgcgagctgcacgtgctggagcccggcgacgtgttcctggtcaaccccggcgacccccatgcctgcgacccgctcgacgacgagccgttcgcgtaccgctgcgcgaacgtgccggtggccgcgatggccgcgcttgccgggccggacggaggaccggcggacgtgcccgagcgcgcccgcgccgcgggagacgcgccgactgccgaagtcggggccgttgcgggcccgtccggccgggccgcggacggttcggcgcccgccgcgcccgcgccgcggttcgccgttcccgtgctgcgggatcccgcgctgttcgagcgggcggacgcgttcttcaagcggggagcacacgagggtgcaccggcgctcgacgagctcgacggtttgctgcgcgcccttctcgacgccgctgacgcggcggccggcggcgcgcgggcgtgtgcggagccgggaggccccgtggccgccgcacgggcgttcgtggataagcgctacgccgagcgcatcgcgctcgaggacctggcggccgtcgcgcgcacgagccgctatgtgctcgtgcgcgccttcaagagggagctgggcatcacgccgggccgctatatcgcggccgtgcgcgtcatgcacgcgaagagcctgctggagcagggctgcacgcccgtggaggccgccggcctcgcaggcttcgcagaccaggcccatctcgggcgcgtgttccgcaacgtgacggggctcacgccggcgcgctaccgcgccgcctgcgcgggggatgcctcatgagcgcgcgcgaggcggcgaaggtcgcgcgggcggccggagggtcggcggcgcgcgggcacctgttcgcgctcttcaccgtggcggtgtggggcacgacgttcgtggccacgaaagtgctgctcgtggatttcgcgcccatcgagatactgttctaccgcttcctcatagggttcttggtgctgtgggcgtgccgtcctcgccatgtgaggctgggcggctggcgcgaggaggcgctcgtagcggcggccggcctcacgggcgtggtgctgtacttcctgttcgagaacatcgcgctcacctacaccacggccagcaacgtgggcgtgatcgtggcggtgaacccgttcttcacggcgctgctgtcctcggcgctgctgcgcgacgagaagctgcacccggtgttcttcgccgggttcgcgcttgccatggcgggcatcgtgctcatcagctgggaggggctgggcacggacggcgtggtgggcgacgcgcttgcggtggcggccgcggccgtgtgggcgttctacgccgtgctcacccgcaagctttcgctgctgtgcgacgacaccatccagatgacgaagcgcacgttcgcctggggcctcgtgctcatggtgccggcgctgttcctgctggacttccagttcggcatcgagcggttcgccgatccggttgcggccgcgaacatgctgttcctgggcgtgggcgcgtcggcggcgtgcttcgccacgtggggcatcgccgtgaagcttctgggcgccgtgaagacgagcgcctacatctacctcgtgccggtgatcacggttgcggcgtcggtgctggtgctgggcgagccgctcacgccgcagatctgcgtcggcgtcgtgctgacctgcgccgggctcgtgctgtccgagcgaggcaagggcgcgccgcccgcggaggccgcagcgtgcggggacggccgcgcgggcgcggaggccgcgggcggcgctggagtccccggctgcgaggaggctgcgcccgaccggcgctagaggccctcgcgctcgatgaagcgcacgaacgcccgcgcctgccgctccaggtagggtgccgaggagtccagcgcgagcacgccgtctgcggcctgggtggcgatgtgggggatggccaggcgcggctggttcatgatgcgcgcatccaggaagctgagcacgcccacgagctgctcctgcgcatgcgccgccccgctcatgccgatgctggcgccggccagcgccacgggcttgccggccagcacctggccctcggcctcgctcacagggcgcgagagccagtcgatcaggttcttcagcgggccggggatggcgtggttgtactcggggctgaacagccacagcccgtcggcccgcttgacctcgtcgcggacgcgcgccacggcgccgggcgcagggtgctcgatatcctggttcatgagcgggacgtcgtcccaggcgagcagccggaagcctgcttcggggtgcagcctgcccagcgcagctcccgcggcctcggcgagctggcggttgtagcttccctgccgaagcgatccggcgatggcgagtatgtccatgagatgcctctcgatccattaatgttatcgtcttggtgtcatatgatagcacgtttgacatgtcgcggcttggattggcgttgaaccgtcacggaaaaccgcttggccccctgcgccttctgcaggcgacggcttcgctataataggcgacgatcacgagagcgaaggagacatcggtggctgaattgacggaccagcagatcgcacgggaagagaagttcctggagggcataccgcgcctcaacgtgggtgcgcttttcctcccgcccatctgggggccggcgcatggcatgtgggcggcgctcctgttctatcccatctggctgttcgcggacaacgcattctacgcggcatggacggagcgcacgccgctcgcgctcatcgtggcggcagccgttttcgtgacgctcacggcgggcacggtggccttctccctcatcgggcagcccttcgccgcgcatcgcgccgcctcgcgcggcgtggagaaggatgcgtacctgcgccgtcagcgcgtatgggccgcggtgagcgtggtcgcgggttgcgccatgatcgccggggccacgtactacaacctggccatccgcccgacgttgggggcgtgatgggcatgggggaggagcatgccgtgggcggcgcggtcgcgacggacgcgccggagggcggcgctgtgcggcgcatcggggtgttctgcgtggggaacaagctcatgctggacgacgggctgggcaccgccgtgtacgaggagctggtagagcgctacgaggcgcccggcaacgtggagctcttcgacgtgggttgcctgagcatggatatgctgccgtacgtgcgcgacttcgacgtgctcctcaccgtggacgcggtagacggcacggacgccgagccgggcaccgtgttccgcttcgagcccgacgccatggcgcgccactcgggtgccacggcatcgctgcacgacttgaagctcgtcgacctgttcgacgccgccacgctgctgggctacgaggccgagggcctgtgcctgggcatgcaggtggagaacccttcgccggccgtggtgacggtgggcctcacgccgaaggtggccgccgcgctgcccctcctggtggagacggtggcgggcgagcttgcgcgactgggctcgccgctcgtcccgcgcgcgggtgcagccggataagatcggcttcgtaacggcacggtttcaacgcagccaacgttccgtgaagcgcctttacagggagccgacgccgctggtagcatgctgacctcgtgaggacggccctttatggaggcaaccccgtaatgccccgcgcggcccttcggccgcccttggtgcggcgccgatgcgtcgcggcctcctcctcccgttccggagagccagcaagaggagtgccgagcaccgtgccgaaccccagcgaagagaccgactacctgcgtgccatgcccgtgccgttcgccgtcgtcaagaccatccccgacgaggaggggcgcaccgtcgacctggtgttcgcctatgtaaacgatgccgccatcgccttggcaggctgcgcgcgcgaggtgctcgtgggctcgtcggtgttcgatgcctgccccgatgttgcgcgctgcatgctgggagtgctggacgacacggcgcgcacgggcgccgcgcagtacttcacctgccgcagcgtttccggcgaccgttacttctccgtgcgttcctaccgcccccgcgagggcttctgcgcctgcgtgctccaggacgttaccgagcaggctctgctggaccgccgattgcgcgaggagcgtcgtctcctggagcgccaggccatgcgcgatccgctgaccggcctgtaccatgtgcggcagggcaggcgcctcgtggagggcgcccttgccgaaccgcgctgggagggtgcgtgcagcgcgctgttcatgttcgatgtggacgacttcaagaaggtgaacgacgagcacgggcaccaccgcggcgacgacgtgctgcgcgggttcgcccagctgctggagcagtcgttccggcgtaccgacatcgtgttccgcgcgggcggcgacgagttctccgcgttcgtggccgacatcccgtgcgcctgcgtggccgagcggatatgctccgacgtcatcgcgggcgtcgagcggctctcggccgagggcgtgccggtgagcgtgagcatcggcgctgccgtggggaggcccggctggtcgcacgagtcgtactaccgcgtggccgaccaggcgctgtaccgcatcaagcgcacggggaagagcgcgtaccgcgtggccgtaatggacggccccgccgcccccgcgtcggccctgtccggggcgcccgagcgccgcagcctgcggcgctccgcgcggaaaggggcgccgcgtacccagcctgcggcctgacctgcgcggggccggtcaggcctcttgctttccggggccgcccgcgcccaggaagcgctcctcgaactgcccggcggtcagcgggcgcgaaacgaggaatccctgcacgctgtctgcaccgatggcgcgcacggtgtccagctcggttcgctcctcaaccccctccaccgtcacctcgatgtccacgctatggcagagatcgatgacggcgtcgatgaacgcgcggttgaacgactcggcatggatgttcttgatgaacagccgatcgatcttaacgatgtcggccggcgactgcgacagcaggccgagcgaggagtaccccgtgccgaagtcgtccatggccaggcgtatgccgatggcgcgcagccggtcgaacgtcgcgcgcagcgcctccaggtcggtgacgaagtagctctccgtcatctccagcacgatacggctcggcttggtgccggcctcgaccagggcatgctccacgaacggcacgaagtcggcctcgagcagctgcaggtaggagatgttcacgttcatgatgaagtcgggctggacgaggtcccatgccgcgcactgccggacggcctgctggaacacccagcggcccacggcgccgatgaggccgtaggactccagcacggggatgaactcggccgggctcacgctgccgaactcgtctgcgctccagcgcagcagcgcctcggcgccgacgatgcgcagcgtgtcggcgtccacgagcggctggtagtgcaaggggaagccccgcatgccgtccatgacggacgcctgcaggcggtcgctgagctccaggcggcgcagcttctccctcgacatgtccgacgagaagaacgacacggtgttcttgccgcggtgcttgctctcctccagcgcgctctcggcatgcttgatgaggtcgagccccgtggagccgtcctcgccgaccatggcgatgccgccggacaccgtgcagaagtacggcacgccctcgatggcctgctggcggttggcgaaggcgtgcacggtgcggtacaggtcctccatggcgccgcggtcggcatcgtcgagcacgaccgcgaactcgtcgccgtcgaagcggaacgccgaggcgttctcgggcagcaggcgctggagcgtctgcgcgaactggcgcagcacgccgttgccgaacgagtggtcgttgagcgagttgatgcgcgagaagtcgtcgagccccaaaagcaggacgccgcccgaggggcgctcgtgggcgagcaggcggtcgagcacctgcaggcacttgccgtgcatgaacaggcccgtggtggcgtccaccttgcccttgcgctccaagctggtgacggcgcccgagaacagcacgggcgcgccgtcgtcgtcgtgcatgagcagcccgcggcatacgatccagatgtactcgcccttgcggttgcgcacctggtactccaggtcgtgctcgtcggtcttgccgcagagcatgtcgtcgatggattcgtcgaagctctggcggtcgcgctcaagtatgagctcgcgccatcggggaatgagcccctcgaacacgcgtccgggcaggtcgaagtcgtgcagcatgttctcggacacgagcgccatgtccgttttcatgtcgatgatgtaaaggtagtcgtccgtgctgtacgctatggcatcgtagaacaggcgcggatcgaggtcgaaggagttcagcgcttcattcgcgtccatgcagggctacctcgcgtcttgttgacgggcattcaaattaacgttgatcgtattgtaaggtcaatcggccttctcggcgagcagaaaacgcaaggagaggggttttcggcaggctgcggccggcccgggcgccggtgcgcggggtccggcgggctcggccgtggcggttgcgtgacgaaacgcctgcggttgcgccacaacggctgcgcgcggctctggagcgcgggcggcgcggttatggtgttccgaaaagccgtggcccgcgttcgcgcgcggccgagaaggagccttccgccatgcgaatcaacacgatcagcgcctacgagaccactgccgagaagttcttcggcgccttggagtcatgggacgtcgacctgctgctggacacgcgcttgaagaacacgaaccagctggcaggcttcaccaagaagaacgacctggcgtacttcgtgccgaagctcctgcacgccgactacgtgcacgacaagctgttcgccccggcgcccaccatgctcgagcgctacctgcacggcaacatcggctgggacgcctacgccgacgcctatcgcgaggacatccgcgagcgcgaggccgtgccgcagttctacgaccgttacggcgagtacaaaagcgtctgcctcctgggcaccgccacccacaagcgccgcagccacgtcgaggtgctccagcagatgctcgaggccgcgacgaagggctagcgccctcgcttcgccggcatcgggcgcccgctttcacgccgcctgcgcctggtcttgcgccgagccagccttgccatccgccgagcggtgattccgtcagcgcgtgcgatccacgcacttcgggcccgcttcctgcgagaccgtctcaagccctgctcttcccgtttccctatgccgatgctccatgggaagcatcggtacggttgttgggtctccttgcaaaactagcaattgctagtataatagctagcgcacactagttttaggaggatacgtgaggagcagggacacgaaagggcgaatcgtcgaggcggcgttcgggttgttcgcggagcaggggtaccatgccgtttccgtgcgcgacatcgcggcggcggtgggtgtcaaggacgcgtcgctctacaaccatttcccgggcaagcaggccatcttcgacgcggtgctggccgcgcagctcgagcgcacgcgcgcggtgttcgcggagcagggcgtcatgaccgcgccggtcgaggaccccgccgggtacgccggtgcgttcgaggagacggagcggcgggtgctggcggggttccggcacttcttcgcggacggggacatggtccggctgcgccggctgctggccgcaagccggtacgccgacgcccacgctgcggaggcgttccgcttcgtgttcgtggagcagcccctggccatccagcgcgcggtgttcgagcacctgatggccatcgggcagttcgcactcgacgacgcccaggccctcgcgcgcgagttctacgggccggtgttcctgctgctgctctcggacgttccctgggaggacgcggagccgctcatacgcgaccacctgggacggttcttctctgcacatgcgatcggggcacctgcgggcgctgcggcggaaggaggcgcgcgatgagcgccatcgtggtgtacgcgtcgcagacagggttcacgcgccggtacgcggaatggatcgcagaggagctgggctgcggggccgtgccggtggagcgggctgacgcgatagatgcaggcgcgtgcgacgtgatcgtgttcggcggctggctccatgcgggcggcctggtggggaagaagtggctcgcgcgcacccgggcagcgcacccgggcacccccttcgtcgcgttcgccgtgggcgcgacgccgccggagtggaccgacatggtggacgaggcgatggcgcgggagtttccctcgccggagctcgacgacgtggagcggttctacctgcgcggcgggttcgcctacgagcggctgagcctgccgaacaagctggccatgaagatgttcttcaagatgcaggagaagcaggcggccaccgacccacgcgccgccgagatgctctcggggatgcgcggcggcttcgacggcaccgaccgcgccgccatcgcgccggtggtcgcccgggtgcgcgagctggcggccgcggccggccagccgccggcctgacgggtgctcggccggcccgtcgccgaccgcttgccgagccggatgcgcctagcggcgagggtgcgcggcgggatgccgcatgaggccgtgctcggtgcaccaggtgtagagcgtgccgccgggcaggtgcggcaagcgcgcctcgccgccctgctcggggtacagcttctccacggccaggcggtcgtagcccacgacggcggcgaagcccaggctgtgggccttctccatgggatggtcgaacgtgaggtaccagtcgccctctgcgtcctccacccgcacggcgtgcacgtcgtcggcggcttgcacgggcagcggcccgagcttcctgccgcagcaggagacgtcggcgtcccccgtggtggtgatgatgttctcgcaggaagggcaaacgcggaatgccgtgcgcctcatagtgcctccttggagctcgtcgggggagaggctgcctgccaaaagcgcctcgacggtggcgcccagctcttcggcgagcgcgggcaaaagcgacacgtcggggcagccgcccccgcgctcccacttcgacacggccttgtcgcccacgcccacgagctgcgccagctggagctgcgtgagcccgcgctcctcccgcaggctgcggatgagctcgccggtgcgtctgatgtccatggttctcctcctggttcggtttcgcgtgccgtcccacgatacccgtgcgcggcggcgcgcgcaatgaacgctccgtagagtgcggtcggcgaaggcgtggtccgtctgccgggctagaacgagggcctcgggcagctcgacggtgcggctcctttgcgcaggctcacggccccgcgcaaaggagccgcgagtatggcaggccccgttcccggagatgcgttagcggcggcgcgcctcggccttcttcacgcgatcgacgaggaagtcgcgcacgccgtcgcgctcgatgcccagcgacacggacagctcgtcgcacagcaggttctcggccaggtcgaagtacttcttgtccgtggcggtgatctggcggccggcaccggaacggcgcacggtgcgctcgtgcacggacttcatgatgggcacgaggtcctgcggcgagaacgtcttgaggcgcttgtcgtactcctccttcaggcgccgctccagcagcgtgggcgtgttcgcacccggcttcagggcgtcctcgtcgatggtctgcgcgtcggcgatggaatcgatgagcgcgagcgcctccttgcgcgacatggcggggcgcagcgcgggcggctcggcctcggggacggctacgaagagcttgagggagttctcgaacagcgcgtgcagctcgaagtagtcccggctctcgaagtacgcctcgcgcacggcggccaccttgcagacgtgatggcggtagacgacgatgtctccgggggaaaccatggcgacctcctggtctgattgggtggggaaacggttgcgcgattccatcgcgtcagaaggacggcgcagatcagcatggctattgtaccaattttggcgccgatggcgcccgcgtgcgatcggcgaacggtcgcggcgacgaagagctttcctgccaggcgcgcggagaagggccctactcccccttgccctccaccgcgccggcggggcaggcgtggtagcagttgccgcactcgtcgcagcgctcgcccaggatggcatagggctcgccgggcacgatggccttgaacgagcagcccgcgaggcaggtgccgcaggcgatgcagtcgtccgtgatccgcaggcccggctcctcgtacgcgtcgccgccgaacgcgaagcgctcgcggtggagcttatggtcgcggttgaccatggcgtagtcgtagtcgtacagctcgccgtggaagcggtgcagcacgaacacgcgcgtctcggggtacttggcgatgtcgtacacggccacgttgaagttgcggtcgtgcggggctttggcctcgacttcggccatcgatagttcgcgcacctcgccggccacgcgcatctggtagccgggcttgaacaggggcaggttgttctcgtcgaacacgaccttggcctccgtgcgctctccgttcacggccagccgcccgctctgtttaagctggcggtagaacggcttcacgtccatggtgcgcaggtagagcccctcgtcgtcgtaggcgaagaagtgggcgatgcgcgcctccacgccgccgtgcccgtcgggcgtggcgaagctgcagcagccgatctcgtcgaaacggtcgaaaacttccttcatggtgagcatgggccgggtcctttctcgcaggtcagttcgtgggcagggcgcgccagcggcgggcgatggcctcggcgtgggcgcgcatgaggtccatccccaaaagctcggtgcagtcctcggagacgttcgacacggagttcgcgtcgatgatgcaggggccgcggccgcactcgatgacgtcgaagctgcccagctcgatggacagcacggcggcggcccgctccgcggcgtcggtgatttcgcggggaacgtcggggtaggcggcgtaggtggagccgaagcggtaggccgacaggccgttgtccgccacggagcgcttcaccacgagcgcgcacgcgccgtccaccacctcgatgcgcgtgaggaagccgcgcgccggctccacgtactcctcggcgatgaacgcgatggcgggggccccggccaagaacgaccgggcctcgtcggcgctgcgcgcgatggcggtgcaggtggtgcggccgccgcagttcggcttgagcacgcaggggtaggagagtgatgcggggtcgacgtcctttggaatcgcgcaggcgtagacggcgggcgtgacgaggccggccgcggccagcgtctcggtcgcaaggcgcttgtcgacctcgaagaagtgggcgcgcgccgggttcaccagcgggatgccgcgctcctcggccgtgcgcgcgaggagcgccatgcgcttaagcgaggccgtgtgcccgcggaaccgggcgctcgcgaacacgcggctgaccagcatctcacaggcgagcgccgcctgcatgctcgccgcgtcctccatgtccagcagaagcgcgggcgccccgcacgcctccagctcggccgccagcttatggtcggaccactcgtccgactcgtacagcacgcctatcatcggatgctccattccaacagcttgcccaagaaccgctgcagctccggcgtggccggatggtcgaacaggcgggcgctctcgccgtattccagcaggcgcccgccgtgcaggaacgccaccttgtcgcaggcgcggcgggcgaagcccatctcgtgcgtgaccacgatgaaacgggtgccggtctccttgaggtcgcggatgaggtcgagcacgtcgttggtgtactcggggtcgagcgcgctcgttggctcgtcgagcagcagcatcttgggagacgccgccacggcgcgcgcgatggcaacgcgctgctgctggccgcccgagagctgggcggggcgcttggcctcctcggccgccagcccgaagcgcgcgagcaggtcggcggcgcgctcacgggcctggtcctcgggcacgccatgaaccacggaaagcggcagcgccacgttctccagagcgctcaagtggtggaacagcccgctcgcctggaacacgaagcctagctgggagcggtaggacggaagcgcgcgctcgtcgtagtccacgcgttcgccgtccacctccactgtgccgtccgtgggcgcgatgagcccgcccacgatgcgcagcagcgtggacttcccgccgcccgacggcccgatgacggcgagcgtggtcacgtcgtcatcgaagtcgatgccgcgcagcacgggcacgccgtcgaaccccttctccaggtgctccagcctaatgcgcatagccgaacctcttctcgaagcgcttgctcacgaacatgatgggcagcgtgaggcacagatacagcccgcccagcagcaggaagccgccgaagaagttgtagttggtggccgtgatctcgcggatggtctgcgtgagctcgatgaccgcgatgaccgacaggagcgacgagtccttcacgatggtggcgaactgcccggtgagccccggcagcgtgcgcgccaccagctgaggcagcaccacgtggcgcacggtctgcgcgcgcgtgaagcccacggcgcgggcggcctccagctggctctcgtcgatggacagcaggctgccgcgcacgatctcggcgatgtaggcgccggcgaacacggacaggatgacgacgcccgccaccaccttgttgtcgatgccccacgccgtgccgatgatgtagtagaacaggtagatctgcacgagcagcggcgtgccgcgcacgagcttcacgtacaggtcgcacaggtagcgcacgggcagcacgcgcgcgctctgacccagggccacgggcaccccgatggccatgctggccacgaggctggccgccgagagctccaccgtgagcaggaagccgctgccgatgcggtcgcggtactgccccacgaagtcgaagttcagcgtgatgccggccatgccgagcgagacccagaacacggcaatcacggcgacgcagaccaaaaggtagttcgccgcggccttgagcggcggcgtttcctggcggggcgccgccgtgaacgggcgggcgagcggtgagggtgctttcaacgggcgcctttctcgcggcggtcggacggcgcggctactcgaagtcgaagaaccacttgaagcccagctcgtcgaaggcggccttctcgctggccaggtacttctcggtcaggcggtcgaactcgcccgaggccttcgactgggcgatgaactcgttcagctggcccagcagctcgtcgttgcccttggccacggcgatgccccacgactcggggtcctggaacgggatgaacacggcctcggtagtgtcggggttcttctggttgttgcggtagatggtcagctggtcgtacaggaagccgtcggccttgccctgcacgacctcggtcacgcaggcgctctcgtcggccaggcgcacgacctcggcttcggtaaggttcttcgtggcgaacacgtcgccggtggagccggtcttcacggccaccttcttgccggcctggttcaagtcgtcgatgctgccgatgcccgactgggcgttggccaggatggccagctgcgccatggcgtaggggtcggagaagtccaccgactccttgcgggcgtccgtgatggtgatggacgacatgaggcagtcggccttgccggtctgcaccatggggatgaggccgtcgaacgcggtgttctcgatgaccacgtcgtagccgtacgccgcgccgaagtccttcatgaagtccacggacacgccgctggggttgccggcgtcgtccttcgtctcgaacgggggataggccagctccatggccacggtcagcgtcttgtcggcgccgtcgcctgcgggcgcggcgtcgttcgagccctcggtgccgccgttcgacgagcaggcggtcagggcgaggagcgccgccgcggcgagcgcgagggcggcgaggaccgcgcgcaggcggcgcgggcgggtgggggcggtggtgttcatgcgtgttctccctccagagcggtttcgaagttctcctgcatcgtgcggagcgtgcggtcgagcgcctcaagctcgccgtcgcccaggccgcggcactgcacgtcggcgagcgcgttcgagatggactcgaagacgggttgcagctgccgcccgcgctcggtgagcgccacgagcgtcacgcgtttgtcctcgggcagcttcgccgtggacacgtagccgcatcccgccagcttcttcaccagcgcggtgacggtggacgggtcgcggccgatgcgctgcgcaagctcgcacatgggcagctcgccgtgtgcgaacagctgcacgaagatgtcgccgtgcgagggcgcgatgcccgcaaggccgtgctgctcgagctgctcggtgatgaagcggttcgccagggcgagcgtccgggccagctggttgacggttccgcgcaagccggcctcctttcgatgcgtcggatgctccgagattatactttgatgtcaaagtaatgtcaaaaggactcttccgtcaggcggcggctcccggctaaaatcatagtaaatttgtagcaattatggtgtgcggtggattttcccgtggcggttgacttggagcgggctccggggtatatgctgctgtcgtaacaggagatggcggcggtgcgtccagccgcccgcttgcggccgaggctgcctgcgggactgggaccgccgcggaaaaggagcatggcatgaccccccgaatcaccgaggccgcacgggcgtaccgcgagaagctgtatcccggaagcgcggccaccctgtacgagaccgatcccgagttcgtggagctgttcgccaacttcgcgttcgacgaggtggtgaacgccgagggcgccggcggcggcaaccttgatgaccgcacgcgctttttggccatactgtccgcgctcgtgggcagccagggcgtcgaggcgttcaaggcactcgcgcccgccgcgcttgcggtgggcttggagcccgtggcgctgaaggagctggtgtaccaatcgatggcctacgtgggcttcggccgcatgctgccgttcttgctggcggcgaacgaggtgctgggcgagcgcggcgagtgtctgccgctcgagccccagggcacgacgacgcgcgaggaccgacgcgaggccggcaaccgcgcgcaggtggagatcttcggcgagggcatgcgggagtcgtggacgcgcggccccgaggaccggcgccatgtgagcgaatggctggccgcgaactgcttcggcgactggtacacgcgcggcggcctgaccctggccgagcgcgagctggtcacgctgtgcctgctggccgcgcagggcggctgcgagccgcagctgacgggccacgccctgggcaacctgaggctgggcaacgacaaggagcttttggtgggcgccgtgtcgcagtgcatcccctacgtgggctacccgcgcgccctgaacgcgctcgcctgcatcgacgaggccgccgagcgcctcgcggccgagggggaggcgggagcgtagaacttgcttgcgcgggctgtcgcagcgtgtggaagcccgtccccgggcgggcggttccacccggggacgggctgccgggcaggggccgctacgcgaacagcgcagcggccttctccatgcgctcggcgataggcacgccgaaggggcagcggggctcgcacgactggcaggcgatgcagtcggcgcccgctgcgtcgagggcctcgtagtgggcgcgcacgctggcggggacctcgtcttgcatcgtggccaggtcgtagaacttgttcaccagggcgatgtcgatgcccgagggacagggcgtgcagtggccgcagtacgtgcactggccgaagtaggcgtgtttgggagcgccggcgagcacgctcgcataatcgcgctcctcgttggtagcctgctcgtaggcgcaggcgtcggccacgtgcgacggcgttgcgaagccagccaggatgctggccacggcgggacgcgtgagcgcgtagtgaacgcactgcgtgggcgtcatcgccacgccgaacggcgacgcctcggcgctgaacagccggccgccggcatagcccttcatgacggtgaggcccacgccctcgcgctcgcagagcgcgtagagctcggcgcgtgccgggtccatgccgcccagctcgtcggcgtagtcgaacgtgaaggcgtcgtcgaggctcgcgtgcgcgggcagtaggtcgaaggcggggttcacgctgaacatgaccacctcgatctcaccggagagcgccgcgcggcgcgccacctcgggcgcgtgggtggacaggccgatatggccgatcgtgccggcctccttgagcgcgcgcacgtagccgatgaactcacctgccatgatggcctcgtactcgtccacgtcgtccacgtagtggatcatgcccagctccacgtggtcggtgcccaggcgcgcgagcaggtcctcgaacgcgggacgcacgaaggccaggtcgcgtgtgcgcgtgtactggccgttctgccaggtggatccgatgtggccctggatgatccaacggtcgcggttgcccgcgatggcggctcccaggttgctgcggacctcgggttcagccatccagcagtcgagtatgttgatgccggacgcggcacacgcgtctgcgaccgccttcacctcggcggccgacttcttctccatccattcggcgccgaagcctatttcgcttacctcgaggccggtgcggcccagttcccgatagcgcatggttccccctcgttcgttgtgtctatgcgttaataataccgtcgaacgcgcttgcatgcgaacgcgtttagcgtgatgtcatttaacaccctggatcgcgctccaagtcaaggagggtcgccgccttttcttctcgtgcgtttctgaacgctttccccgaaagtgttcagaaacgcttccatcaggccctttgtctctcgacgaatgcgagacggggtcgtaccatgccctcgggggagtttctcgcaaggaggttcaacatggttttctcggtggttctgcaccagatgggggtgttcttcctcatcgtgatcgtgggaatggcggcgtcgcggctcggcgtggtgaagcgcgattatctgaaggaacttgcgtcgctcgtgtcgaaggtgttcctcccggcgctcatcttctacatgacctaccacggtacgacgcgccagcaggtgctcgacaacgtgcctatgatcgcgcttgcggcagggttctacgtagtggtgagcgcgatcatgaaggcgctcgccctgctcttgaagccgaagggcgaccggcagaaggtatttaggttcgccttcatcttcggcaacacgggattcgtgggcataccgttgctcgcggcgctgtatccggaaagcggtcttttgtatatggcgctgttttccatcgtggaccagttgctgttctggacatatggcgtgtatctggccacggcctcagaccggcgggcgcgcttcgggcttcggcagctggcgagccccaacatcgtggccatagtgctggcgttggttttcgtgctcgctggcgtgcagctgccgggcctcgtgatggacgtgctggataccgtgtcgggcgcgacgacggctctctgcatggtgtatttgggatgcctgttctactattcgaactggggtgtggcgctcaaggcgcgcgaggtgtatgcaggcatcgcggtgaaaatggtgctgctccccgtggtgctcggcaggctgctgttcctgacgggactgccggaggacatggtggtgtcgatgatcgtgatcatggcgctgcccaccatgacggtagtgcccatggtggcggctgcgcacgggaacgagggcgagtacgcggcgggagtgaccgtggtcacgctcgcgtcctgcatcgtcaccttgccgttcgtggttctcttggcgacgggctaggcgggcggcatgcggcggtttgcaggtgcctcgagaccggcgacgatgaacgcgtcaagcgtttctcgcgtggcgtcccaggcgccgggcgcgcggcgcgatgcgcgggcgaccgcgtagcaaccgctgatctggaacacgaggatagcagttgcctgttcgggcgttaggcggccgcgcgcggtctctcgtccgacgaacgtatgttggtagcgttcgatgatcttgtcgaccactcgcgtgaccagaaggtcgtcgtcgaatatgggtgcgtacttgccggcgttgcgcacacgctcgcacagcggacagtcgccgcaggatgcttcggtgtccccgcggcgcacccccaccatgtcatgcgggttctcgaagcagtcttccaagatggcatcgagggtgtctgagaggttgcggtaatgcaggtagaacgtgctgcggctcgtgccagcggtgcggcagacctcggccacggtggcatcgtggaaccgcttgcgtgccatgacttcgagcaatgcgtccttgagtgcctgctcggtggcgaaagaccttttgtctgcgcgggacatgcgcgccccctccccttcgggtcgcccatacggcggcatgcttcgccgagcgggcggggaaagcatagcatgtcctgcggcgccgtgcctagagcgccgcgtactcctcggcgcccaccggttcgtaccattcgttcgagccgttcacggcgggcacctccacagccaggtgcgcgaaccagctgtcggcggcggcgccgtgccagtgcttcacgttggcggggatgttcaccacgtcgcctgccttgagcgcacgggctggacgtccctcttcctggtaccagccgcgcccgcccgtgaccagcaggatctgtccgccgcccgactcggcgcggtggacgtgccagtggttgcggcagcccggctcgaacgtgacgttgccgatggtcacctgctcggtggagagcatgtgcaggtagctccgaccggtgaagtaccggccgaaggggttctccgccccgcgcgggaatatctctttctcgggggtcgtcggggtgtcgctcatgggtgcctcctaggttcgcgatgggttgtcccgtccacgatacctcttggagcccgctcgaagtcaagggctttccgcgccatgcgcgcctacctcccgagcgtccggcgcaggcaggcggccgtggcgccggtgccgtgcgcggcaagggcggcgggggttcccgcgaacacgaggcgcccgccggcatcgcctcccccggggccgaggtcgatcacccagtcgctcgcgcacagcacccggtggtcgtgctccaccgccacgaccgtgttgccggcgtccaccaggcggtccagcagcgcgaggaaatgctccacgtcctgcgggtgcaggccgcgcgtgggctcgtccagcaggtagagcgtgcgctcccggccgcccccgaggagctcgcgtgccagcttcaggcgctggccctcgccgcccgagagcgtggtgagcggttgccccagttccaggtagccgagtcccacgtcgaccagcaggccgagcgtgcgggcgatcttggggtgggaggcgaaggcgtcctgcgcctcgtccaccgacaacgccagcacgtcggctatggagcgtccgtctagcgtcgcctccagcacctcgtcgtggaagcggcggccgtggcaggttgggcagggggcctgcacgtccttgaagaagagcaggttgctggtgacggtgcccatgccctcgcacgtctcgcagcggccgccaggggtgttgaaggagaacgccttcgccgagagtcctcgcgagcgcgcctccggggcggcggcgaaggccgcgcggatgggagcccacacgtccgcgtacgtggccacgttcgagcgtttcatgcgcgcgatgggcgtttgctccacggcgacgatgcggtcgaggtgcccgcagccggacacggcgttctcggggccggccgcgtcgccttgcgccaggacgtcgaacacgagggtggacttgcccgagccggacggccccgtcaccgtcacgaggcacccggcggggatgtccgcgtccagatggtcgaggttgaaccgggtggcattgcgtatctcgatcggggcgccccggggcgtgcgcggcgccgccttgggcgcgagcgggcgcgcgaggaagcgcccggtggcggagtcgggcgcggcggcgaggtcggcgagcgacccctcggccaccacgcgccctccgcaggcgcccgcgccggggcccaggtccaccaggtggtcggccgcgcgcatgacgtcgaggtcgtgctcgatgaccagcacggtgttgcccaggtcgcgcaggttccgcaggatgtccacgaggccctccgtgtcgcggggatgcaggccggcggtgggctcgtccaggatgtagacgacgccggagagctccgagtccaagacggcagacaggcgcagccgctgcagctcgccgcccgagagcgtgacggtagcgcggtcgagcgtcaggtagtccaagcccacggcgccgatgcgcgcgagcttcgtctccatgtccagcaggtagtctttcaccatcgcgcgacgcggcccgcccagctctgcgctcacccggcgcacccacgccgcgagctcgcgcagcgaccggttcgccagctggggcagctgggtgcccgccacggtagccccgcggccccgtggacccaggcgctctccgccgcaaacggggcaggcggcacgcacgaggtaagggcgcacgccctttgcgtccggcccccgctcgcccaagcggcgcatgagcagcggcaccacgccctcgaagcgcccgtcggccaccttacggggcggcgcgacgtgcggcagcgcctccttgagcgcgggcgcctcggcaccctcgtacaagagcgccttctgcagcgcatcgaacgcccccacgggcacgcgggcggggtcgggcaggccgaagtggcggcttgccgcgcggaacacgcctatctggtactcgcggtacttcgcctgccagaaggccacggccccgtcctcccgcgagagggactcgtccacggcggccgcgcggtcgacggagagcgcctcgcccatgccctcgcacgcggggcaggcgccctcgcgcgtgttgaacgagaactccgtgcgcgtgaccttgtccatgcgctcgccgcacgcggggcagaactggtacacgcggaagtcgtcgcccacgcgctccgtctcctccacgcagtcggccgcgcagagcatctcgccgcagtgcgggcaggggtactcccccagcttctcgaacaccatgcgcagcgccgtgtacacgtcggtcgccgtgcccacggtggagcgcgggttgcggttcgcgccgtcctgcaggatggcgatggcgggggaggcgccccgcacgcgctccaccgcgggcttggggatgccctgcatcgagagggcctccaggtgcaggcgctggcactcggttgccagcacgtccacgagcagggtggacttgcccgaccccgacacgcccgcgaacacggtgatcttgttcttggggatggcgagcgtgacgtcgcgcaggttgccctcgcgcgcgccgacgatggtgagggtgctcacaaggggaacctttcgccgagggggaatcgggggagccctacgccttgccgcagctggggcacaggtcgcaaaggaagcactcgccgcacttcgggttgcgcgcgatgcacgtctggcggccgaacagcacccactggtggttgatgggcccccaccacgcgcgcgggtagagcttgagcagcgccgtctcggtcttggccggcgtgtcggcggagggcccggcgaacttcagccggtgcgcgatgcggaacacgtgcgtgtcaaccgcgatgccctccacgatgccgaacgcctcgttgagcacgacgttcgccgtcttgcggcccacgcccggcagcttctgcagctcgtcgatgtcgcgcgggatctcgccgccgtagtcggccaccaccatgcgggcggccttgatgacgttcgcggccttcgtgtggtagaaccctatggtgcggatgatgtcctccacgtcgcgcacgtcggcggaggcgaggtcggccggcgcggggtagcgctcccagagcctgggagtgaccttgttcacgcccttgtcggtggtctgcgcggacagcagcacggcgatggtcaggcggaacgggtctccgccgtacacgagcgcgcactcggcggccggatagtgctcgttcattcggcgcgccacctcgagcgcgcgctcccgcttggcggccatggtctcacgcggcataggatctccttcggtcgttgcggtggtggcactggccagtatagcgaacttcgcggactcgttgccgctatactgggaggcgacggcacgttgtcgcgaggaaaggcaggtccatgggcgcgacgttggtggtgggcgacacgcatttgaagcacgagctgatcctgccgtgggtcgacgcggcgatcgagcgttgcgacgccgaccgcgtcgtgttcctgggcgactactgcgacgagtggggatcgacgggccggcagctgctcgcggcgctcgagctgttcgccggctgggtggaggacacgcacgcggcgggtgttcgggtcgacctgctgctgggcaaccacgatttccagtacctgatgggcgaggaggggcccggcacccacgtcctgctcatggacgacgtcgcggaactcctcgggaccctcggcgcgacgatggccgagacggtggacggcttcctgctcacgcacgcgggcctcacggcgggctgggcgcgactgcatctggaggcgcccgcggacgcggaggaggcgaaggcgcagttgaacagcctgttcgcgcgcggcacatggagcgacctgcgcgccctctcgtcatgcggcacgggtcggggcggctgggacgagccggggcccctgtgggccgaccgctcggagctgtgggaggatgtctatccgggcatcagccagatcgtgggccacacgccggtcgccgcctgcgagcggatgccgccagcgtctcgctgggcgcgcgccgacggcggcgaggagctgtggctgtgcgacacgttctcgctcacgagccgcatgcgctccatcggcgacggcggcatgctgcttgtggaggacggccgcgcggaggccgtggccggcgggggcaatccggacttccagccgtgggacgaggtcgtggcggcggccggcgtgcggtagcggtggggcctgtgtcgtcctgggcgcagcacggtggcacggggcccgaggcgtcgaaccctccatcgtctcgatgcaacgccaaaaagcgtcccgaaagtcaccgtttcgaccgctgtgaagccttttcgcgcgctcggagccccatttcgacggcggatctgttgtcctctgcgcgtttgcgcaggtcgctaaccgcgccgagcttcttcttgccgccgaagcgcttcacagcggccgaaacggtgaccgggggcccttgaatccggaagggacctccggaacgtggccggatcccccgttctttcggtacatcggcttgccgcctgtggtttatccttcacgaggcggtttcggccctgcggcggccgtccgcggcgcggtatactgctccccggtcgtccgcgcgggcggcccgccgcgcaaccacgtgcacgaagccgccttcacgcggcttttcgtgctgcttgtatacggaaaaggacacgctatgctcatcgactcattgacgttcgccctggagaaatcgggttgcctcgacgcgttctggggcaagctcgacgaggggcatgacggcacgctcggcgtggcctcgtcggcgcggccgttcctcgtggcggcgcggttcgcgcacaagccgcagacgacgctcgtcgtggtggcgggcgaggacgcggccatcgcgttcgcgcgccaggtggcggcgtacctgggcgacgagcgcgtcatgcgcttccccgagcgcgccgactacccgtggggcggcaagccgggcgacccggcccaggcagcgcgccgcatggaggccgtgcatgcgctggcctccggccgcgaggccgtggtggtggcgagcgcccgcgcgctcgtgcgcgcgctgccgccggcggggtcgaacgtgcacctgccgcttgtgttcgaggccggccgcgagctggcggacatggagggcgcgaaggcggcgggcgtagccgagttcgggggcgtggcgcgggccctggaggagcgcggctaccagaacaccggagagctggacggccccggcacgttcgccgtgcgcggcggcaccctggacgtgttccccggcaacctggtgtacccggtgaggctcgacttcttcggcgacgagctggacgagatccgccgcatcgtgccaaccaccgggcagaccatcgccgcgctgccccgcgccgacgtgtaccccgtcgtggagttcgcggcctcgagggccgcgctcgcccgcgcgcgtcagaagcttgagcggcccgccgagacgaacgccgcgctgcgcgacgtgctggagaggctggacggcggcctgcgcgagggcggctcggacgtgcttttgccctacctgtacaaaaccacctccacgctcggcgactacgtgcgccccggcgccctttcggtgctggtggagccgcgctcgctcttcgacgacatgacgcatgcctacgacgacctggcgggacggtcgaaggggatgggcatcgcgctcgagggcctctacgccgagcccgccggcgtgagcttcggcgacggccagcgggccacgtacgtgtccatcatgcgcgtgggcgggcagatagacgacgagctgccggtcaagcgcgtggaggtggcgggacaccccgacaagctgtacggccgcttgcggacgctcgtggacggcggctacacggtggtgttcagcgctccgaacttccgcgcccgccaggacatgaagctggccttcgtggaccagggcctgcccatccaggagacgttggattccgacgttctcccgaacgccggagctgccgacgccgcggaaaccctcgccgaccctgcgaacgaccgtcgggatggggaaaccgccggcgcggccaagcgccggctgcggcgaggcgtggtgaacgtggtggacgtggacgtgccgctcggcatgatcatcccgaaggcgaagctcgcgctcgtgagcgtgtcggacacgcagggggcgtccgcggcgcgcccgagccggcacatcgacgtcacggacatcacgttcccctacaagccgggcgactacgtggtgcatgccgcgcacggcgtggcgcacttcaaggagctcgtgcgccgcgacgtggacggcacggcccgcgactacctgctgctggagtacgccgagggcgacaagctctacgtgccggtggagcagctcgaccgcgtcacgcgctacgtgggccccgagggtgcttccccgcgcctcacgcgcctgaacacggccgactggtcgcgcgccatgaagaaggcccgcgcggccacgaagaagctggcgttcgacctggtggacgtgtacacgcgccgcgccaccgtgcagggctaccgcttcggtcccgacacgccggcccagcgcgagatggaggaggcgttcccctaccaggaaacgcccgaccagctctccgccatcaccgacgtgaaggccgacatgcagtccgccaagcccatggaccggctcgtgtgcggcgacgtgggcttcggcaagaccgaggtggccatccgtgccgcattcaaggccacgcaggactccaagcaggtcatggtgctctgtcccaccaccatcctcgcgcagcagcacttcacgaacttcaaggagcgctgcgagcccttcggcgtgcgcgtggaggtgctctcgcgcttccgcacacctgcccagcaggccgaggcgctgcgcgggttccaagagggcgacgtggacattctcgtgggcacgcaccggctgctgtcgcgtgacgtgaacccgcacgacctggggctcgtgatcatcgacgaggagcagcgcttcggcgtgggccacaaggagcagctgaagaacctgcgcgagtccatcgacgtgctcacgctctcggccacgcccataccgcgcaccatgcagatgagcctgtcgggcgtgcgcgacatgagcctcatcctcacgccgcccgacgagcgccgccccgtcgaggtgcacgtgggcgagtgggaccccgacctggtgagcgctgccatccgccgcgagctggcgcgcggcgggcaggtgtactacgtgtccaaccgcgtgcgcaccatggaggaggccgtgggtcgcgtggcggcggccgccggcgaggcgcgcgtgggcgtggcgcacgggcagatgtcgaaggaggagctcgagcgcgtgatggaggatttcagtgccggcgagctggatgtgctcgtggccaccaccatcatcgagagcggcatcgacaacccgcacacgaacacgctcatcatcgaggactcgcagcgctacggcctggcgcagatgtaccagctgaagggccgcgtgggccgctcgtccacgcaggcctacgcctacttcatgttccccgagcacgtgagcctgaccgaggaggcccaggcgcgcctcaccgcgctggacgagcacaccgacctgggcagcggcatgcgcatcgccatgcgcgacctggagatacgcggagccggcagcctcatgggcgccgagcagtcgggcaacatgtccgcggtgggcttcgacctgttcgcgcagatgctcgcgcaggctgtgagcgccacgcgcgaaggcgacctcaaggccatggaccagctgccgcccgcgctctccgacatcacggtgaacgtgccggggcacacctacctgcccgaggactatgtgcccgacgccgacgagcgggtgctgtggtaccgcaagatcgcaagcgcggccaccgggcaggcggtagaggacgtggccgctgacctggctggaaagcgccccgacatgccgcaggccgcgaagaacctgctggagaaggcgcgcatcaaggcctacgcgaacgagcggcatatccgcaccgtgtcggtgacgggcggccgcctggtggtggagcccatcgacgtgtcgcgcgaccagatgacgaagctgcgccgtgcgggcggccgctacttggccgacaagcgcaagctgcagctgccgctgcgctacttcaagctggacgaaggcgacaacctgctcgcgccggtgttcgcgttcctgaaggagctggcgggatgaggagacgaacgatgaacgggggcgagacggcagggcccgtccctggtgcgagcgtgcgcgcgggggaggccttcttccggcgacggttctggcgggggatcgcctgcgcgctcgtgggcgcggggctctggggcttctcgggggcgtgtgcgcagttcttgctgtcgaactacgacataacgcccccgttcgtcacggcggtgcgcatgctgggggcgggcctgctgttcctcgtcgtgctcgcggtgcgccaacgcgagcggctggccgcgatgctggccgaccggcgcacgctcgggcgcctcgcggtgttcggcgcggtgggcctgtacctctgccagatcacgtacgccatcgtcatcgactacacgaacgcgggcacggccacggtgctgcagtgcacgggcatcgcgttcgtcatgctgttcacgtgcgtcgtcgggcggaagctgccgcgggcgaaggagctcgtcggcctggttgcggccatgttcgccacctggctcatcgccacgcagggcgacccgtcggcgctctcgctgccgttgccggggcttgtgtggggcatcgcgaacgggctgtcggtggcgttctacatcatgtacccgaagaagctgttcgccgaatggggcagcttcgcggtcacgggaatcggcatgctcgtgggcggcgtcgcggctgcgctcgtgtggctggcgggcggggtcgcgggtggcgcggggctcgcgctgcccacgctcgacgcggcgggattccttgtgttcgggctgatcatcgtcgtgggtacgttcgccgcgttcgcgctgtacctacacggcgtgtccatcgtgggctcggtgaaggggagcctgctcggcgccatcgagccggtgagcgccacggcgttctcggccctgtggctgggaaccgcgttctcgggagccgactgggcgggcttcgtgctcatgatagccatgatcttcctggtcacgggcgagaagccgcagccgcaggcagaagcgccctgcgagggcgattcctcccccacatgacaaggggacatgacaaggggacaggtaccttgtcatgtttcaggaacagaagtcgaaggaagcgcgctggacggcgcagaaggggaggcgtaatgaaaaaggagcgccgacgatacctcgagtcgtgcgaggtgtcgcggctcgtccgctacgagctgggcggcgtggagcagaaggtgacgctggagggccggcgcgcggacgcgcccgtggtgatcttcctgcacggtgggcccggctcgccgttgcccgtctcggtgggcacgcgcggcatgttcccggacctcgcggaccgctacgtgctggcagcatgggaccagttggggtgcggcgcgaaccgctgccggctgggcgacgacgcgtgcatcgatcgctacgtggacatgacgctcgacctcgtgcgcgcggtgcggcgcgacttccccagcaacgaggtgaacctgctcggcgtgtcctggggctccatcctggcggcgcgcgcggccgcccgcgagccggggctcgtcgaccatgtggtcacgtacgggcaggtgctcaagcagctcggcttcaacgacgaggtgttcgaggcgctcgagcgctcggcgatgccggagaagctcaaaggcgagctgcgcgcgatcagagggtcgggcgcgcgcaacctcgagtcgggcatgcggctggccggctgggtgcggaagtacaccgagggctaccaggcgcagggcgacggcatgatgccggtgggagcgttcgtgcgcggcatgctggagagccccgactacacgctgcgcgacctcgtggcggccgtgtcgaacgacttctcgaaaagcgagcgcctgttcgcggagatcttcgccgtcgacctctccgacgagctcgcgaacatgcgcgtgccgtacctcatcgtgcagggagagacggacatcgtcacgtccacccgtaccatccgcgcgttcgtcacggaatgcggcaaccccaacctgcgctacgccgaggccccgcgcagcgggcacatgcccggcacgaccggcatgaacctcctgttcgagcatctgtccaacttcgtgacaaagggacaggttccttgtcataaatagagagggagtcgagatgcgtacaccgagaaaacaatgcgaatccaatgtgtaccatgtggtggcaaggggtacagcacgtcaattgatcttcgaaaacgaccccgaccgtacgttctttcttcggcttctatcggaaaaagcccatgagacgaattgtacgatctacgcgtggtgccttatgggaaaccatgttcatgtgcttgtgagagctcccatggaagatgtttcgcggttcttcaaattggtgtgcggaaactatgctcaggcgttcaatgtgcggaatgggcgcacggggcatctgttccaagagaggttcaaaagcgagcctgtttcggacgattcctattttcagacagtggtgcgatacattcacatgaatcccgagaaggccggtttggcttcgtgtgctcaatatcgctggagtagcttcagcgaatatatcgcttccaagcgttcgctggtgttgtgcgatacggactacgtcttggatatttttggcggcattgaagagttcatgcgtttccatcaggtaaaagatgacaatgcggtttgcttggacgcggacgcggcggggaagacgaggcccatgcgcgacgaagaggcgcttgcccttgtgcagcggatactcgaagaggtggatcttgctgattcgagacctgctgacttaaagacggtcgaaaagaagcgcagagacgatgcgattagaagaatgagcaaagctggcttgtcgataaggcagatagagcgtttaacggggatcggtcgcggtgcgattcaatatgtgcttcgataagtagcgtatttatgacaaggtacctgtccccttgtcaggttcgccgcggtacaatggcggggtgcctacacgggatggaaaggatgtgtcgatggggttcgacgctttgatcgtgatcgacatgcaggaggccctcgtagggcggcgaccttgcggggcggatgagacggtggacgcgatcgcgaggcttgtcggcgcgtgccgcgcgagcggcgtgccggtcttgcacgtgcgccatgacggcgggcccggcgacgagcttgaggcgggcacggacggctggcggatctgcgcgccgcttgcgccacaggaaggcgagcccgtgttcgacaagcgtttcaacagcgcgtttcgtcggacggggctgcaagcgcacctcgagcgccgcggcctgcgccgtttgctgatgtgcggcatgcagacggagttctgcttcgacgcgtcggtcaaggtggctttcgagctgggcttcgacgtgacggtgccgaggggtgcggtgacgacgttcgactccgcgttcgcgccgggaggagagctgacggcgtatttcgaggactgcatctgggacggccgctatgcgcgggtggttccgctggaagaggcgctgggcgcgatcgagcgcggcgcgtgagaggagggcggccgtggggctgttcatgacgttggaggacgcgtcggccgaggaggcggcgctgctgcgtgagggcgtgctgcccgaggcggcgccgggcgaggcggccgagggacgcctgcgggtgttcgacctgcactgcgacacgctcgataggctggcgttccatggcgacccgtcggtgccgggcgggttcgccgcgcacgacgcgcgcatcccggcggcgcgcatgtcctcgctcgccgacaacgacgcgcacgtctcgctcgagcgcacggctgggtacgcctggtgccagtgcttcgcggcgttcgtccccgacgaggcgcgcggcgatgcggcttgggcgctgttcgagcgcgtgcggcgcgtatgggagcgcgagctggagcgctgcagcgacaagctcgcgcgggctcgctccatggccgacgtggacgcggccctcgcggcgggcaagacggcggggctcttcacggtggagggcgcatccttcctggaggacgacgcggccgccgaagggcgcctcgacgcgctcgccgaggcgggcgtgcgcatggtcacgctcacgtggaacgggcgcaacgcgctcggcagcggcaacgagacggccgacgggctcaccggcttcggccgctcctgcgtgcgcgagctggagctgcgcggcatcgcggtggacgtgtcgcacctgaacgacgcgggcttcaaggacgtgtgcgcgaccgcgacgcggcccttcgccgcctcgcactccaacgcgcgcgccgtgtgcgggcacccgcgcaacctcgccgactggcagctgtgcgagctggccgacgcgggcggcgtcgcgggactcaacttctgccgcgacttcctgtccgagacgcacgccgacccgacccccgacgacgtgctgcgccacgtggaccgcatgctcgaggcggcgggcgaggacgtgctcgcgctcggcagcgactacgatggctgcgacgtgcccagctggctcgacccgtgcgaccaggcaggcggcctgcatgcgctcatcgcgagccggttcggcgaggctgtggccgacaaggcgttcttcggcaatgcccgcgcgttcttcgaacggctggaggggcaggtctaatacaagcaacgaggtcatggacaagattgcaccttgtggctggatattgtcggccttcgagcctgtacggcgaagaaatggttgggtactgtttataatgccttttcaaattaatgtgaaattgagaataatatagtggcggttacgcgatactgtgcataagctcgaatctcgtccatggtgctcggcgtgcgaggaggaggccggcgctgcagcgaagccgacgcaccgcagggaggggaggagcgggcgcttgagagtgcggagcgggagggcgaatcccaagggaacgagagcgggagaacatgcgctgcagaagagcgaggcctgcgtgagaacgggagctgtgcgcgaacaggagcccgaagggaacgatagcgcccgagagtgcgaaaaccccaaggaaaggggagctgcgggcgggtcgccctccgatacctcgtgggcgttctgtgagctctgttgacgtgaatccgatatcggacttaaatgccacaggtacgaaatcggacttgcgaatcgaacaacggagggcgaaccgacatggacgcacggacggcgcacgccaaccgcgaatacaacaacctttaccggctcggcaacgagctctaccataatgtggccgtgaggatggggctgtcggacagcgcgttcgacatcctgtacgccctcgacggcttaggcgacggctgcctccagaaggacgtgtgcaccgcatcgggcctgtcgaagcagacggtgaacacctcggtgcataagctcgagcgcgcaggttacgtggagctgcgcgtggagcacgggcgcggcacccacctccatctgaccgaggcgggacgcgttctggtgaccgagcgcatacgaccggtggcgagggccgaagaggccgctttcgccgccatggcccctggggagtgcgaggagcttctgcgcctgtcgcgcgtctacctcgagcacctgcgcgggctggtggacgccctaccgtatccggagaggaggtgagcggcgtggccatcaagctgtcggaccacttcacttacggccggctcgtgcgcttcgcgctgccgtctatcgccatgatgatattcacgtccatctacagcgtggtggacggcctgttcgtatcgaacttcgcgggcaaggaggcgctcgccgccgtgaacctggtgttcccattggccatggggctggggtcggtgggcttcatgctgggcacgggcggcgcggcgctcgtggcgaagaccatgggcgagggtgaggccgtgcgggcgaaccgcctgttcagcttcatcgcgctcgccgcagtggcgtccggcatccttctggccgccgtcggcgcggtcgtgctcgagtcggtgctcgcggcgctcggcgcgcagggctcgctcatggagcagggcctcgtgtacgggcgaatcctcgtggtggcgctgccgctgttcatcgtgcagaacgtgtttctgagcttcttcattgcggccgagaagccgcagatgggcctcgcggtgacggtggccggcggcgtgacgaacatcgtgctggactatatgttcatcgcggtgcttggctggggtattgtcggcgccgcgctcgccaccgcggcgggccagttcttggcggcggcggtgtcggctgtgttcttcgcccgcagcaagacgagccgcctgcgcttcacccgcccgctcgcggacttccgcgcgctcggcaagacctgcgtgaacggctcgtccgagctcatgaccgaggtggccgcgtcggtggtgagcatgctgtacaactaccagctcatgatgatagccggcgcggacggggtggcggcctacggcgtgatcatgtacgtgaacttcatcttcacggcggtgttcttcggtttcgccatgggcacggggccggtggtgagctaccattacggcgcaaagaaccaaccggagctcaagggcctgttcaagaagagcatgctgctggtgggcggcacaggtgcggccatgttcgccgcctcgcagctgctcgctgcgccgctcgtgggcgtgttcgtgggctacgacgccgaacttgccgccatgacgctgcacgggttccgcatctatgcggtggcgttcctcgtgtgcgggttcaacatctacggctcggcgttcttcacggcgctcaacaacggcaaggtgtcggcgctcatcagcttcatgcgcacgctcgtgttcgagacgtccacggtcatgctgctgcccatcgtgtggggcatagacggcgtgtggagcgccatcatcgtggcggaggcctgcgcgctcgtgctgacgaccgccttcctcgtggggctgcgcaagccctacggctacgcgtaagaggcgtgcgagccagggccggcaggtaggagcggggatgccgggtgcgtgcgcgtggcggcgcgggctcccgtgcggacttccgcgttgcctctccggttcggccctcggctgtattgacgggccgggttgaggccccggtagccaaggcggttgcccgagggcgcctgctgcccgccttccacagcagggaaaggcgatagacttggcaggcgcccggctgtgcagggcgccctttgcgtataatggcggcatggctgcatgctgcccctgacgtaccggaggtgcttgggcggcgcggatgcgcggccgtccggacgtgcctggcggtggggccgggcgcggaaggcgccttggggggccgaggcggcgggcgatgtcccgagcaggagaggggaatacggggatgaaggggttgacgggcggtttcccgctgcggtgctgcatcgcgctggccgcgcttgcgacgaacgcgctggtcctcaacctgttcgtggtgccttctacgggctcgtacccttcatacggcggcttcgccgcagccctcgccgccgtccttgcctacgccgcgctgctcgcagtcgcggcccggaggccgaacgccctgcggcatccgtcggtgccgtgggctgcgctcgccctcttctgcgcgggctcggcgcttgtggcggcggggtaccggggcgagtcgacgacggcctcgctcgcggggtggttgcttgcatcgctcgccacggcgtggctcgtggtcttgacggggctcgcgctcgcgcatttctcgccccggaccgccttcgcggcgattccggcggcgtacgccgccgtgtacgtggccgcatcggccttggtgccgttcgtggagtcgctgcgcgcggcccgcttggcgctgctcgcgctctacgtgctcaccttccttgccgcgtttgcctgcgccgtgcgcccggggcgtgccgcacttgccgtcttcgctgacgggggaggcggcgcggcggcccggcccgcggcatcggacggttacccgccggcctgctcgaaggccggcgggccgcccaaggcggtgctgttcgccgtgctgatcgcgcttggcctggtgagcggctacaccgccttcgtcgtgttcggctcgcgcgagagcgccggcgtgagcttcgtggcgatggcggccgcgatgctggccgtgatcgtggcgtcgcgtttctcgaaaagccgcacggacgtggtgtttcacttcgggctgctgctcgtgctggccgggctcttggtggtgccgttcgtggcgcaggcgtccagcggcgagcgcgtggccctgatccacgtgtcgaacacgctgctggcggccggatcggagtgcttcgccatgctcgtgtggatcgtgctggcggcgcgcgccgccagccgcccggccgaggcgctggccttgcaggcaggcgggcggatggccgtggccctcggcatgctgggcggcctggtgctggggacggtggcctcctcgttctctgcagtgagcccgctcgtgcccgacgtggtggccgtggggttcgcgttcgccctcgtggcctacgcgctggtggggttgcggcgcttcagcttcgaggatgcgctttcaggcggcgagggagccctgcccggttcggtgcccgggccggccccggctgtgggcgctccgggcaccgggagcttggcggccgcctcggaggccgctctccccggcgacgggacgcgcgccgccatcgagcggagctgcggggcgctggcccgcaaaggcggcctcaccggccgcgagaccgagatcctcgcaatgctcgcacgcggccgcagcgctcccttcatagcccaggagctggttatctcgccgaacacggtcaagacgcatgtgaagcacatctacgcgaagctcggcgcccactcccaacaggagatcatcgatcttgtggacggtcagtgcgccgccgagtagcggggcgctggcagcgtcctcggcctgcgccccggacgtgccccggtgttgccgagggggcggaaccgacagccacgggcgctagcggtagcaggtagcggtcatcctcgcgacgtccttgcccaggtcgtctttgacggtcacggtgtagaagcccagatgacggcccggcttgtcgcagacggacgtggcggtgagcttcgcgcccttcgtcgcgcgcaggaagctgatgttcgagtccacggacacggtgggctcctcgccgatattgcacgagatggccagcgcgaagtccgccagcgtgaagatggcgccgcccatgacgttgcccatggcgttgcggtggatgtcgcccagctccatctcgcacaccgcacggccccgcccgccctccacgacgcggcacccggccgcctgggtggcgaaccggtcgttggcgaacacggcctctatctggtcgcgggtggggttgtcgggcagcatgggcgggtcctttcgcatgggttccggtcgggcgctgagaaggcccctcgcagggccttggaaggcggaggggggactactgtgccgggacggcggtggcggcgtagagctccagccagtcgccgtccttcacggtgacggtttgcgagccgccgcgcaccacgtacttctcgtcggtgatggagccgctgccgaaggccaggtccctcatcacgaacgccccgcactcgttgtcggcctcggctgccgcctcgggctcgatggtgacggtgtaggttccggcggggatgtcctcgcccacgcggtagagcccgctgcggtagggtgcggcaggctcgaaggcggcgtcggaggcggggtacaggcgcaggccgtcgggagcgtcccaggcgaacaccgcgccctcctcgagctccacgaagtagttgccgaagtacgtgacgccgtagtccacctcgtagcgcgcgtccgaggtggggccgaacaccacgtagtcggcctcgtctgcaggatctccctccacgaagtagagcccaggctcgaggtccttgccggcgcccacctcgtagacgcccggcgtgtgcttgccgtcgacggtccggccgtccgacaggtcgagcatgtccttgatgtagtcgatgctgaagtcgacgtccgcgccgtcgtagccgtcggaatcgccgtagccgtaccggtaaccgtcgtcggacccgtacccgtagctgttgtggtagccgccgtagcggccgtcggccacttcggagacgatggcgcatgccgtgcagctcacgcacccgccgatacccagcacgaagacgagcaggcaccctgcgagcacccagggccatgccttgcgcttcggttgaccgggggatgccgcggggtaaggctgccccgggtacggtgggcagggcggctgctggccggcgccgtagggcgggtacggcggctgctggccgccgggctgctgcggcggtggcgggtacgccccgtagggctgtgcaggctgcttcggctgctgcggctgcccgtacggctgcgcgggcgggcacgtgccggcgggcgcgtagggctctgcggcggaacccggcagcggaggccgcttgtagggcgcgggcacgggcggcggcccggcaggctcggatgatccggcagagccgggctcgggcggatcgcaggggttctggcgctcgggatcggtcatgggaggctccttgtctgttgcggtcccgcctatcttagcacagccgcttgcggcggtttttcgcccgcacagagattacaggctggtttcgtcctcggcgggcagcagcgtctcggccgtcgtctccaccagctccaccgcaccttccgggcaggcgccgacgcacaggccgcagccgatgcagtagcgcgcgtcgtaggcgagcgtcccgtcggccgggtcggggcgacgcgcgcccgtggggcagaccgctgcgcaggagagcgtatccgtgcagagcgcgcagtcggtctctgacagcacaagcggcacgcgcgcggcgatgcccgggtcgcgctcgagcgcttccaacagcatctggcgcttcggctgcatcgtcctcttcgtgaggccctccggcacgaagtcgttgaactcggtgccgttgcccaggttcagccgtgccagcgcccgcgcgcgctcgcggcgctcgtagaactcctgcagcacctcggagttgcgcaggcggcgcttgccgctggcaatgtcgcccacctcgcccacgaggttcgaaaatgcgctgcgccggtcgacccctgacgggtccgccaggtcgcgcaataggttctccttctcggggatgacgtcggagaagcccacggaacgcccgctccactcctcggccgtctccacggcgtgggcgtacaagagctcgcccatctcgccggcgcgtgcgcagtcggtgcagtaggacaggtcggccgctatcgtcacgtcgatgccctcggccagcacgagcgtccagaactcgggcgacaggcacgccaggcagggcagcaccacgacgttcgccgccggctccaggccggggaacacgttctccttgcaggtgagcaccgcgcgctcgccgcgcagggctatgcggcggatgcgggcgtgcaggtcggccatcgtgacgcgcgtcgacgagaacgcgtcgcacacgcccaggcagatgccgcagcgcgtgcaggcatccccgtcgatgacgggggctccggcctcggcgaacgacacggccccgtgcgggcaggccagcgcgcaccgctcgcagtcggccccgtgcgcgcgcaggcagaagtccctcaacaccacgatgcgctgcggccgctcggagccgtccgcagcgccggacggctcctgctcgggcgggagccctgtttcctgcctgtcgggggcgtcagccaccgaacacctccgcggccaccttgtcgatgcgcgccagcacgtcctctcggggcagaagctcgatgctctcgaacaggggcggcgacaccatgttgccgcacacggccacgcgaagcggctggagcaggagcttcggcttgatctccaggcgctcgccctcggcgcggcacgcctcttccagcgcctcggcgtcccattccacgccctcgtcggccagcacgccgcggcaggcggccagcgcctcgtcggcgcgcgcgccctccttcttcagcaccttgctcacgctcttctcgtcgagctgcacgtttcggccccagaacatgaaggccagcttgtccacggcctcgtccaggcgcgtcaggcgctcggagacgagcgggtacaaatcgcagtaccacacggcgcgctcctgcacgtcggcgagcgcggactcgatggccgcgccgtcgaaggcggcctcgcgcgcctcgggatcgatgggcgtgccggcggccacggcgctgccgaggatgttcgcctgcgcgagccacagcagcgacgagcgcacccaggcgttcggccccatgtccttgatgtactggccgttcatccagtcgagcttcgtctcgtcgaacacggcgtccttcttggtcacgcgctccaggctgaacttctcgcacagcgtctcgcggtcgatgagggtggtctcgccgtcgagcgaccagcccagaagcgcgaggaagttcaccatggcgtcgggcaggtagccgcgctcgcagaactcctccacgctcgccgcgccgtggcgcttcgagagcttcttgccgtcggggcccaggatcatcgacaggtgcgcgaacacgggcacgtcgaatccgagcgcctcgtagatgaggatctggcgcggggtgttggacaggtggtcgtcgccgcggatgacgtgcgtgatgcccatgttcgcgtcgtcgcacaccacggcgaagttgtaggtggggcttccgtcggtgcgcacgacgatcatgtcgtccatcacctcggccgggaagctcacgtggccgtacacggcgtcgtcgaactcgatggcgccgcggccctcgggcacgcgcaggcgccacacgtggggctcgccggcctcgatgcgcgcggccgcctcggcggggtcgaggtcgcggcaggtgcggtcgtagcccgcgtagccgccctcgctctcctcggccgcggcgcgcttggcgtcgagctcctccttcgtgcagaagcaggggtagacgctcccgcgctcgcgcaggcgctcgagcgcctcggcgtaggtgtccgtgcgctgcgtttggaagtaggggcctgcctgcccgcccacctcggggccttcgtcccagtcgagccccagccatttcatggcgttcaagatgacctgcacgttctcctcggtggagcgctcggggtcggtgtcctcgatgcgcaggatgaagtcgcctcccatggcgcgcgcgaacgcccagttgtagatggccgtgcgggcgccgcccacgtgcaggcggccggtaggggaaggcgcgaagcgcacgcgcacgttcttcttctcttcactcatggttgcgatgatcctcacgttcggtcactggttgtctagtcgtcgatagacttgcgaaggcctgtctaaggggcgtgccgcgcgcagttccgcacgaaccgaagcatcctgcggatgcttcgtgcgagcccaggactgttcgagcacggcatgtcccttagacaggccggcggcggagcgtcgcgccgacgacgatagccagtatagacaagacgagggtagtcgcaaaccagataccggccatgcccatccaaaaatcaagcgggtacatgccaatgagaagcgaatcgtaggagaacgtccaattgccctgggggaacagcaccgcgtggaaggcggcgaacaggccgttgaagtcgagggcggcccacgcgccgagcgccgcgaacgccgcgatgaggacggcgggcgcaacgacgagcgcggtgcccgcgaggcgacgctcgcggcgcacgagcagataggcgagggcggctgcggtgagcgccgccacgccccagagcaggggaacggcggttcgcacgaggacgttgcagtcgtccaggtgggagagcgcgtcgccgtccagcgcgtaggcgtcgtccacggcggccagccgatcgagcgcggcttggggggaggagccgtccgcgtctgcggcgaccgccttgcgggcctcggccgaccagcgcccgcggacgggggagccctctgcgctcgcctcgcgcgcggcgtccaggatggcggcggctatgcggtcgcgcgcaccgtcctcgccatcggcgccgcggccgtagtcgtccacggtgaacccgcgggtctccacggcgagcgccgtcagctgcccgtcggcgtagggcgattccgcgtcgttcgcggtggcctgcgcgaggatctgggtggaggcgggcagcgtgcatgcgccgaaccccgccgcgaacagcgtcaccgccagcgccatggcggcaaccgccgccgctaccttgtcggccatcggccgtcctcctcgccctctcgcgtccccgcgcatcctcggcggcatcccgtgcccagcctgccgtgccgtcctgcccgcttgccgggccgcacccccgtgcggcccggcgccgataccgtcagcccctgtccacccagatggtggccgccgtcatgccctgcttgtccttcgagatcgtgggctgcggccccaggcggctgaacacgcccatgaactcgccgtcgtacaggtacaagccgttcaggttgttgtacggccgggggtcgaagggcacctcgtcgtccggcagcgcgtcgatgcccgtgtcgggcggcagcgtctcggtcttgaaggggcggatgtagcgctgcacgatgaacgggtggccggcgcggccgttcgcgaagcggtcgatgagccgctcccattcctcctgcgtcacggactcgccggcgtacacgtcgtcggcgccgtagtggtcggtgggcttgatgatccactcgcagcggttctcgcggatctgcggcaggttcacgtgctcgtcgtccaagaaggcggtcaggggcacggtctcctccacgaacgagatctcgtcggcgtccagaaacgcggtcgtgcgctcgtcgaacagcacgctgaacagctgcttgtcgtgcacgatgtgcccggcgaagctgccgatgagcgccaccttggccgcgcgcacggcgtcgatgagctgctgcgactcgtcccagtggtcgatgacgtcgttcgtcacgcagcgccgccagatggcgtcgatgcgccggccctccccgtcgcgcagcacctcgccgtcgaagcgcaggtcgcgcacgtcggccaccacgcaatccgcgccgcgccggcggaacaggtcggcgtagatgtggaactcgtccaccacgccgttctccaggtagtcgcagatggcgatgcgcgggctctccacccggcgctcgtaggttgcgtagatgtccaggaacttgtcgacccagctctcgaacagctcgcagccctccacgtggtggcggttcgcgaactcctcgaacgtcttcgactgcgccaccgacgtggtgatctcgcggttctcgttcatgcccgacgagccgtcggcgttgaactcgcagaactttacccgcccgtcgtcctcgttcaggaacgtgtccacgcgtgcgaacggaagcaccgcgtcgtagccgcgcggcaggcagatgagctcctcgaggcgcgggtcgaagtcgaaggcgcggcggtagtcggggtccgccaggtagtgctcgatgaccttgacgaggatgcggtgggcggtctcggccgtctccttcatgatgcggtacgttcccgcatcgaacaggcggggcacgaagctggcggccactacctggtggtgcacgatggccgtggagccctgcaggtactggtaggcggcgcggcggccgggcacgtcgccctgcagcgattccatgatggcgaagtactcgcgggtgtagtcggcgttgtacgacataggcgctcttttccgtcggttggaggcagtgaatcgcctgccatcttaccacgagcgccgcgtgccggcgacgctgcgcgcgcgggcgtagaatagtcgtgatttgccggatgactcggccttcacgacccgaggtgtgctaaccttggacggagataaaccaggcgcctcgcggggaagcggggcgccgtgtacgtatgaggagaatggggaaccatgtccgacacgcatgcatcgtatctgttcacgtccgagtccgtcaccgaggggcatcccgacaaggtgtgcgaccagatatcggacgccgtgctcgacgcgatcctggccaaggagatagagcttgcggcccagggctacgtggctcccaacggctgcccggccgacccggcgcaggtgcggtgcgcctgcgagaccttggccaccacgggcatggtcatggtcacgggcgagatacgcacgcaggcctacgtggacgtgcccggcatcgtgcgcgaggtgctctccgacatcggctacaaccgcgccaagttcggcttcgactgcgacacgtgcggcgtgctcaacgccatccacgagcagagccccgacatcgcgcagggcgtcgacgagagctgggaggcccagcacggcctggccggcgacgacccctacgagcgcatcggcgcgggcgaccagggcatgatgttcggctacgcctgcgacgagacgcccacgctcatgcccatgcccatctaccttgcgcaccgcctggccgagcgactgtcggccgtgcgcaaggacgccacgctgccctatctgcgccccgacggcaagacgcaggtgtccgtgcgctacgaagacggccgcccgatgtgcgtggagaaggtggtcgtgtccacgcagcatgccgagagcgtctcccacgacgagctgcgcgccgccatcgtggagcacgtggtgcgccccgtgctggaggccgagggggtggagcttgccgaggacgccgagatacacgtgaaccccaccggccgcttcgtcataggcgggcccatgggcgatgcgggcctcaccggccgcaagatcatcgttgactcctacggcggcatgggccgccacggcggcggcgcgttctccggcaaggactgcacgaaggtggaccgctcgggcgcctacgcggcgcgctgggtggcgaagaacgtggtggcggccgggctcgccgcgcgctgcgagatccagctcgcctacgccatcggcatggcgcggccggtgtcggtgatgatcgacacgttcggcacgaacaaggtggacgaggccgccatcgagcgcgcggtgggcgaggtgttcgacctgcgcccgggggccatcatcgacgagctggacctgcgccgccccatctaccgcaagacggccgcctacggccacttcggccgcgagctgcccgagttcacctgggagcgcaccgaccgcgccgacgcgctgcggaaggcctgcgggctggactagggtgcagctcgaacgtccccattttcggcaaacgcccgtcgctcgtgcttgcggcgggttttttcttacttttgtaaataagggaacaaacgttcctatatttatgctatgatctctctaccgaaaagagccagtgcggatgcttcccttcggccggcgaacggccttgtgcgggatgcccatagacggcggcggtctccgcgtcgcccgcaccacgtccgcaatatcctctgagcaaacggagctgccccacaggccgccaacgtgcggccgcggccgcgtacgctgcaagggcggaaaaggaggacgttcatggagctgcacgacatcgagaggcgtaagctgacgctggacgacctggcgcacatcgacgcggaaagcggcgtcgagttctggtatgcgcgcgacatcatggagtttctgggataccggcgctgggaaaacttcgcggttgcagtagagcgggcgaaagtgtcggggaatgcttcgagaaccgcaggtcaagatcattttcgtgaggccacgaaaatgatcgaggccggcaagggcgcccagcgcaaggtcaaggactacaagctcacgcgctatgcctgctacctcatcgcccagaacggcgacccgcgcaaagaggagatcgccttcgcgcagagctacttcgcgctgcaaacgcgcaagcaggagctcatcgaggagcggatgcgagcacttgcgcgcatcgctatccgcggacagctcaccgaggcggagaaggagctctcgcgcatcgcttacgagcggggcgtcgacggggcgggcttcgcacgcatccgctccaagggggatgcggcgctgttcggcggccatacgacggccgacatgaagaagcggctgggcgtcaaagggtcgaggccccttgcagaccacctgccgtcggtaaccctcgcggcgaagcagctggccaccgagatgacgaaccacaacgtcgagggcaaggacctgcacggcgagcgccctatcgccgaagagcacgtgcagaacaacgtcggcgtgcgcgacttgctcggccggcgcggcatcaggcccgaggagctgccgcccgaggaggacgtgagaaggctcgagcgccgcgtgaccgtcgagacgcgcaggctggagcaggaggcgcggggatttcccgcgtcaaagggctaggtcggtacggtccggttgcagacgtgggatatactggttgccatgagattcgcatcggtcatcctggacatacccacgcaggcgctcgacgcgccctacacgtactccgttcccgaggcgccggccgaggccggcggctacgacgtggaggtggggtgcgccgtgctcgtgccgttcgggcaccggcaggcggtggggttcgtcgtggggctgcaggagcttcccgacggcgaggcgccggccggtatcgacgtggcgaaggtcaagcccgtcgcgcgcgccgtgagccccgcctacttcgacgaggagggggcggcctgcgcgcagtggctctcggagcgctacctggcgccgctgtcgtcgtgcgtgcgcctgttcacgccgccgggcggcgtgccgcgcatggtgcgcgcgcaggaggggtactggcggctcgaggagccggccgtgggcgaggtggacgaccgctgggtggttccgggcgaagccttcgatgggttcgagccgcgaaagaacgccgtcaagcaggcatccatcgtggaggcgctgcgcgcgggcgagctgcgcgtggcggagctggcagcggagttcggcgcggtgtcgggcgcgctgaaggcgctcgaaaagcagggcgtcgtgcgcatagagcgccgccggcgcatgcggggcttccaagttccgacggcttgtcagccgccggaaccagccgacgctgcggccggccgcggcacccgatctcgtggggatgccggaggctcgcgtaccgaagtacgcttcgcctccgccatccccacgatctcgggcaccacggccgccctcgctgacttactacgccaacctgcgagttcggttcaacctgagggattgtctttcgttccttcccccaagccgccgctgacggcggggcaggcttcggcgcttgcggctatcgatgcggcgcgggagcgcggggcgggcgaggtggtggtcgtggacggcgtcaccgggtcgggcaagaccgaggtgtacctgcaggccatcgaggcggcgctcgccgcggggcgcacggcgtgcgtgctcgtgcccgagatatcgctcacgccgcagacggtggggcgcttccgcggacgcttcggcgacacggtggccgtcatgcactcgcgcatgggcgcgggcgagcgctacgaccagtgggacttcatccgctcgggcgcggcccgggtggtggtaggcgcccgcagcgcgctgttcaccccgctggcgaacgtgggactcatcgtcatcgacgaggagcacgagggctcctacaagcaggacagcgcgccgcgctatcatgcgcgcgacgtggccgtgtggatggcgcggcgcgccggcgcggccgtggtgctgggaagcgccacgccctccatcgaggccctgcacgcgtgtgcgaaggacccgcgctggcaccacgtggagctgcccgagcgcgccaacggccgcccgctgcccgccgtgcaggtggtggacatggcccgcgagttcggcggcgggtcgcgctccatgttctcgcgcgcgctctcgcgcgcgctcgccgaggagctcgcggccggccgcaaggcggtgctcctgctgaaccagcgcggcttcgcgaagttcctgctgtgccgcgaatgcggcttcgtgccggagtgcccgtcgtgctccacgtcgctcacgttccacgagaggggcaacttcctcatctgccaccactgcggctaccgcgtcacggcccctcccacctgccccgaatgcggcagcccttacctgcggaagttcggcgcaggcacgcagcgcgtggaggccgacctgcgggtgctcttggacgcgacgcccggcgtggggcccgacgtgcccatcgtgcgcatggacgcggacaccacgggcggcaagggcgcgcaccagcgattgctggaggagttcgccgccgccgacgccgcggtgctgctgggcacgcagatgattgcgaaggggctcgacttcgaggacgtcacgctcgtgggcgtcatcaacgccgacaccatgctgcggctgcccgactaccgcgccgccgagcgcacctttgcgctcgtggagcaggtggccggccgcgccgggcgcgccgagctgccgggccgcgtgctcgtgcagacctacgaggccgacgccgcgcccatccgcgccgccgcggcctacgatcgcgcgctgttcttgcgcgacgagctgccgaagcgccggatgctgcgctacccgccctacgtgcggatggcgaacgtgctggtgtggggcaaggacgaggaggcggtgcgcacctcggccgccgcgctctacgaggggctggccgcccaggtgcgcgacttcggcggcgagggctgggacgtgctgcccgccacgccgtgcgtgctggccaagctgcgcggcacgtaccgctggcacctggtggtgaagtgcccgctcgacggcgacctgtcgggcgtgctgctgccgtacttccgcgcccgcaagcccgagcgcgaggtgaacgtggccgtggacgtggatccggacgacctcctgtaggccgccggccgcgccgggcatggcgtcaggacacctccatggcgcccaggttcagcagcttgccctcggctgtggcgggcgttccggcgaagccgccgaggaagcgctcgacggcgatcccggcggcctcccaccaggaaggggccaacacgtcctcggcggccacgaggtcggcctcccataccacggcgccgtcgcggcgaaacgccaggtgccccacgacgtcgccgcgcgccacgttccccgtcacggcgtccagcgaggcctcctgctcgaggcgcccgccctcccgcggcaccgtggccgtggcgtccggctcgagcacggtggccgccacggtgcgccgcgtccaatcggcatgcgcgacctcggccaccacgggccaggcggcctgctcgccgcggatctccgcatgcacggagcgcggggcggacaccagctggtaggtggcctccgccggcgcggccggcacgtcgcactcggccgcggcgccgaccgcccgcgcggccgcctgcagctcgtcgcggtgggcgagcacccagtcgtagagcgccttggagtcctcgaagcgctgcggcttcgaggacgagcccagcaccaccgcgtagtactcgtgcccgtcgccgcggttcacggcggtggcgacgcaggggccggcggccagcgtgtagccggtcttggcggcgcacgtgccggggtagccctccagcatcgtgtccgtgttcgccagctccacggccgccgtgccaccgtcgcgcgtcaccgcgatggtcgcgtgcgcgtgcccgatgctcgagcgcacgaggccgttgcccatggcgtgccgcagcatgacggccacgtcgcgagcgcagctgtactgcccttgggcatatgcgtcgaagtcgagcccatgggggttcgcgaagcgcgtgccgtccatgcccagctcggccgccttcgcgttcatggcctccacgaacgcggcctcgcgggcagcggcgccgccgtcctgcccgcgccctcccaggatggcggcgcccgccgcctgcgccacggcgctcgcggcgtcgttgccggatgcggtgagcacggccttgagcgcgtcgccgaacgacatctcgtcgccggctgcgagccctgcgctcgactcgcccacggcggcggcctcgggcgtcacgacgatgcggtcgccggcatccaggtgctcggccgccacggcggccgtcatgatcttcgtgagcgaggcgatctgcgcccgctcgccggccgcccggccgtaccagagcgtgccctcctcgtccatgagcgccgcatgcgatgcgtcgatgccgggcagccgctcttcggagattcccaggtcggccgcgctgcagccgaggaccgcatcgcctccgtcggtgcgcgcgaacgccgcaaggggcaaacagcaggaaacgagcgcggccgcgagggcgcacgaagctgcgcggagcatgcggcgacggcgggcgtccatggctgcctcctcctcggccccgaagggcgctgctgacgattttcacccatataatagcaccggcccaggggccgtcgcgccaacccatggtatcctgagcgcttgcttgatgcacgcgtgggggccgaaggaggacggaatggggaagtgggctgcgcgtatcgtatgcttggtgcttgccgtggcgctgtccgttccggccgcatcctccgctctcgcccaggaggcgggcgcctccgctcctggcgaagcgcctgcggcggccggcgcagaaggagggccggccgccggcaccggggaggcctcgggcgccgctgcgggcgacgacggtcaagggcgacttgtgcgcgtggcgtttccccaggccgaaggcttgagcatggtcgacgagaacggacggcgcagcggcgtgctctacgattggctcgtggagatagccaagtacaccgggtggcgctacgagttcgtggaaggcagcgtggacgagctcgtcaagcagaccatggcgggcggcatcgacctgatgggcggcatgttctaccgcgagcagctcgacgagagcctcgactactccacgttcggcatgggctcgaaccgctccctcgtcatcggtcccagcgacgacgactccgtcgccggtttcgacctgcgcaccctgaacggcaagaccatcggaacctatgccaacgcgacggagaagatacgccggctggagaatttcctggagttcaacggcttggactgcacggtgctgcgcctcgacctggcttcgtacgagagctgcctggacgacggcaccgccgacctcatgctcggcagcgacgtggagatgaaggacggctgcaaggtggtggcggagttcgacggcgagcagcactacctggccgttcccgagggcagcgacctcatggcgggcatcgacgaggccatgaggcagatctacgcggccgaccccaacttctcccgctcgctctacgcccgctatttccccgacgactacgccagccccatcgcgttctccgaggccgaccgcgcctacgtggcccaggcgcgcgaggtgcgggtggccgtgacggcggggcagtacccgctgtactacgagcatgacggcttgtaccagggcattgcgaaggacgtgctcgaccgcatcgccgagcgcacgggcctctcgttccgcttcgtgcatgcggacagctaccaaggggcgctcgacctcgtggcggcgggcgaggccgatgtggcgggctgcttcatggacgacgagcagacggctggcgatcaggggcttgccttgaccaaggggtatgcgacgctcggcgaggtggtattccgcagcaagttctcggcgcagtcctccggcggccccgtgatagcccagctccagggccgcgccgcgcccgaagggcaggagggcgcggaggtggtgtggctccccacgtacgccgactgcctcgaggcggtgaacaccgggcgcgccgacctcacgagcatgcccgcctcgttcgccgagtgcctgtttaccgaacgctcctacggcaacgtggccccggccacggccgaccataccgagacctcgttctccctggcgctgccgcgcccggtggactcgggcctgtactcggtgctgagcaaggcggtgaacagcttcacggacgacgaactggaggccctgtactcccgcaacgccgtggccctgggcaaccgctccgctacggtggagtcgttcgtgtccgacaacccgctgctcgtggtggtgctgtcattggtgttcttcctgctggtgggcgccattgccatcatcgtcaccggctcgaaggtgcgcagccgcatgatggcgctcaagctggagaaggccgaggagacgggccaggcgaaggccgacttcctctcgcgcatgtcccacgagatacgcacgcccatgaacgccatcatcgggctgtcgaacgtggcgtcgctgtcgggcgaggccacgcccgccatccgctcggacctggagaggatcaacacgtcggcccagttcctgctctcgctcgtgaacgacatcctggacatgtccaagatacagaacgacaaggtgcacatagaggtggcgcccctgcgcctggcgtcgctcgcctcgcgcctcgagagcatgttcggcatccaggcgcaggagaagggcatctgcctgaaggtcgtgtgcgagaccgaggccgtggtggtgggcgacgacgtgcgcctgcagcaggttctggcgaacctgctgtccaatgccttcaagttcaccgacgcgggcggcaccatctccctgcgcatcgaggaggcgcagcttggcgggggcggggagggcccgacgtaccggttctccgtgtgcgacgacggagccggcatccgccccgaggacctcgagcgcatcttcgactcgttcgagcaggcggccgagaaccaccgcaacgcccagggaacggggctggggctggccatcagcagcaacctcgtgcgcctcatgggcggcaagctggaggtggagagccaggtgggcgcaggctccgagttccatttcacgctgcggctgcctttggggcgcccggaggacctggacgcgccgggcgcggacgaccccgcgccgcgctcgcttgccggcacgcgcgcgctcttggccgaggacaacgacctgaacgccgagatagccgccgccttgctggacatggagggggtggcggtcgaccgcgccgcgaacggccgcgaggcggtggacctgttcgcgtccgcggagccggggcgctacgacttcgtgctcatggacgtgaagatgcccgtgctggacggactgggcgccgccgccgagatccgcgcgcttccccgccacgatgcgcgcgacgtgcccatcgtggctttgacggccaacacgttccaagaggaccgcgacgatgcggccgctgccggcatggacggcttcatcccgaagcccttcgacgcccggcagctctacgaaacgctgcgctccttcctgcccccggaagggtagcccgccgccggtgattttccggccgctcctggcgggctttggcgaatcggagaagggggcgaaaagtgcgctgcgaaagcgcgtgatctatggtatactgctccactgtatctttgcgcccggcgcgcatgcttccgcatgcccgagcgcatccagttggaaaggaagatcacgtggcccaagcctctaagaaccaagctgtcgagcccgacaccgagcaaggtgcgaaagccccgatcgataccgaagagatactggacgatgacgacgcgctggacgtggaacccgacgtcggcgcttccgatacgctggacgacgacaagctggaagccggcctggacgaggacgaggacctgctcgagggcatccccgaggaggagctcaaggcgaccgtcgaggtgcagctgccgaaggtgacgaagagcaaggcgcgcacgacgcgcaagcgcaacgccgacgccggcgtgaccatgctcacgggcgaccccgtgcgcatgtacctgaaggagatcggcaaggtcccgctgctcaccgccgcggaggagatcgacctggccatgaagatagaggccggcgtggcggccaccgaggagctggaccgcgccgaggacgagggcatcgagctcgagcgccgcgagaagcgccgcctcgaccgcatcgagcaggtgggcatcgatgcgaagcagcagctcatcgaggcaaacctgcgcctggtggtgtccatcgccaagcgctacgtggggcgcggcatgctgttcctcgacctcatccaggaaggcaacctgggcctcatccgcgcggtggagaagttcgactacacgaagggcttcaagttctccacgtacgccacctggtggatccgccaggccatcacgcgcgccatcgccgatcaggcccgcaccatccgcatccccgtgcacatggtggagaccatcaacaagctcgtgcgcatccagcgccagctgctccaggagctcggccgcgagcccaaccccgaggagatcggcaaggagataggcctgcccgccgaacgcgtgcgcgagatccagaagatctcgcaggagcccgtgtcgctggaaacgcccatcggcgaggaggaggactcccagctgggcgacttcatcgaggacgacgccgccgtggtgccgcccgacgccgcctcgttcagcatgctgcaggagcagctgagcaaggtgctcgacggcctggccgagcgcgagcgcaaggtcatcagcctgcgtttcggcctggaggacggccatccgcgcacgctcgaggaggtcgggcgcgagttcggcgtcacgcgcgagcgcatccgccagatcgagagcaagacgctcgcgaagctgcgccaccccagccgctcgagcaagctgaaagattatctggaagactaaggttccgtcggcctgacggccgccggaacgaagccgatgctgcgaagggccctggcaccccgccttgccgcgatggcgaagactcgcgtactgaagtacgcttcgccttccccatcccgtcaattcggggcaccagggcccttctcgctgacttactacgccaacctgcgcggttgggcatacggacctgcgagctcctgttcgcgcttcgcgcgaatcggccgcaggtacgccgaggttgaggggattgcgccatgcaacaggataaactcgagttcttcgccagctgccttgccgggttggaggcgccgctcgccgacgagctgaagtcacttggcatcaggagcgtgcggccgcttggcggcggcgtggccttcttctgcgacgtgcgccatgcgctgaaggcgtgcctgtggtcgcggctggcgtctcgcatcatgctggtggtggggcgcgtggacgcgcgcatggccgacctgctgttcgaggacgcgctggagctgccctgggaggacgtggtagctcccggcgcgagcatcgcggtatcggcccatggcatgaacgacgagctgcgcaacacgcgattcaccgcgctcaaggtgaaggacgccgtgtgcgaccgcctgcgcgaggcgcggggcgagcgtcccgacgtggacgccgagtgccccgacgcggccatcgacgtgcgcgtgcgcgagaagcgcgccaccatctcgctcgacctttcgggtgcgtcgctctaccgccgcacctacctggcccccgacgacggcgccgaggcgccgctcgagtgcgcgctcgcggccggcctgctggcgctggccggatgggacggccgggcgcgcgcgggcgccgcctgcgtcgatgcggcctgcggcgacggcgctgtggtggtggaggctgctgcggtggcgtgcgatctggcgccgggcctcacgcgcgagcgctggggcttcttcgggtgggcgcaatccagtcccgccatctggaacgagctcatcgcccaggccgacgaccgcttcgaggcggggctggccgcggcatgcgcctccgacgcgctcgacgcgccggcgtccgcgcgtcccgacctcgacgtcgtgcgcttcgcgggcctgtcggcgtcctcgccggccatcgcgcgggcgcgcgggcgcgccaagcgcgcggggctgcggcaggccgtgagcatcgagccgggcggggcggaggaggcgggcgcgctcgtggagcgcgtgagcgccgctgccgccgccgcgcgggacacggcgggcgtaccggacggcgcggaggcctccggctgcctcgtggcgagcgtgctgggcgcccgcgagcgctcgtcggaggcgagcgcccaggccgacgccgccgcgttcgtggcggccgccacggcggccccggcgggctccgtgttcgcggtggcgggcagcgaggccgtggaagaccgcttcggcacggcgccgggcgcgcgcgtcgagttcgggcgcgaccgcgtggccacggaggcgctcgtgttctacgcgccgcccgccgaggcggccgtcgtcgtggtgcccgatcccgccggcggcgccgagcaccgcgtggaggtgctggaacccgcttccgagcagttctcgtcccgcctgttcaaggttgccaaggagcgccgcaagtgggcgcgccgcgaagggatctcgtgctaccgcgtctacgacgccgacctgcccgactacgccgtggcaatcgacgtgtacgtgggcgctggcgaggccgagggcaacacgtacctgcacatcgccgagtacgccgcgccctcctcggtcgaccctgcccgcgcgcgtcggcgcttcgacgacgttctggcgttggcgcccgtggcgctgggcatccgcccggaccatgtgttcgccaagacgcgccggcgcgacaagggcggctcgcagtaccgcgatgccggccggcgcagctacgtgacgcagatcgacgaggacggctacctcatggaggtggacctgtcgggctacctggacacgggcatcttcctggaccaccgcgccacgcgcgagctcgtaggcgcgaaggcggcgggcaagcgcttcctcaacctgttcgcctacacgggcacggcaaccgtgcatgcggccggaggcggggcggtggagacgacgacggtggacctctcgcagacctacctggactgggcgcggcgcaacatggccggcaacggcttctcggggcccgagcactccttcgagcgcgccgacgtcatggcctggatcaccgagacgcgccgcaagcccctgcgctacgacctgatcttcgtggacccgcccacgttctccaactcgaaggccatgggcagtcgcacgtgggacgtgcagcgagaccacgtggagctgctcatcggcgtgacgcgcctgctcaccgagggcggcgaggccgtgttctcgtgcaacctgcgcacgttcaggcccgatgtggaggcgctggctaagtacggcgtggccctgcaggacatcacggcgtccacgatcccccatgacttcgagcgcaaccccaagatccaccagtgctaccttgtgaggcgtgcctagccccctcgcgaaaaaaccgcccgtcgcgtctgcggcgggcggttttgcctgataggaccttcctactacgttttttccgatgccctcgcgcccctaatacgcgctttttcccgattacaccccctcgcccggctcctagagtcctcggcaagccgcggcccgcaagagggccgcaggacgaaccgaaggaaaacgggagaaggaggggtttatggaagcacgaaggccgtcatcggcgaggagctggatcgtcacgctcgtgggaatgctggctgcagtggccatcgccatcaacatgttcaaggtgccgcccaccatggggctgctcatggccgacctggggatcgggccggcgctgggaggctggctcatgacggtgcccaccgtcacgggtctcgtgctcgcgctgccgtcgggcgggctcaccgacaggttcggcccgaagaaggtgggcctgttcgccatcctctcggcggcggtgggcagcctgatagggtcgttcgcgccgaatatcgagctcttgctgttcagccgtttcgtggagggcctgagcttcgcgctgatcggcgtggccgtgccggctatcatcgccatgtggttcccgcccgagaagagcggcgcgcccatggccatctggtcggggtgggtgcccatcggcatgctcgccatcttcacgggggccaacctgttcatcgcggccgacgaccccggcacgtggacgaacgtgtggtggctctccacggcgctgctcgtggcggccgccgtgctgtacctggtattcgtgaaggcgcccgacggctacgcggcggaggatgcgccgaagatatcgctggtcgcgggcatgaagtcgccctccacgtggctgttggccgtggtgttcgccatgttcgcgttcatcatgtacgccgtgtccacgttcgcgcccacgtactgcatggaggagctgggctacagcctggaggattccaacctgtactcgagccttatcacggtgggcatgatcttgggcgtggtgctcatgacgcccgtgctcaacaaggtggtgaggctgaagagccgcatctggctgctcgtggccagcatggtgctcacggcgctcatcgccatcctggcctttaacgtgccgccgcaggccaccgtggccgtcatgatcgtcaccggcatcgtgctgcagctcgtgccggccgtcatctggcccatcgcgccgtcggctgccgtggcgcccgtctacatcggcacgacgttcggcgtcatcgcgctcggccgctccatcggcgggttcggcaacgcgtccatcggcacgctcatcgagacgtccggctggggcgcggccatcatgctgctcgtgggcatcggcatcgtgggcgtggcggcctgcctggcgctgctcaagttcctgaaggacccggccgaggcggcggcgtccgccgacgcgcccgcggatccggccgaggcggaaaccgccagtcgctagaaagaacgagaagaacgaggaaaggagaggactatggaggagcgagactaccggttcgtgaagcacgagaatccctacacgtaccgggacggcgacctgacggtcacgcgcgggagcgcttggtcgggaccggggtgccacctgggctgcggcgtgctgctctacaccaacgacgagggagagctcgtgaaggtggagggcgatccggagaacccgttcaacgaggggcgcctgtgcgtgcgctgcctggatttgcccgagatggtgaacaacccgaagcgcctcacgcatccgctgcgccgcgcgaaggccgaccgcggccgcgaccgctgggagcgcatcggctgggacgaggcgctcgacctcatcgcctgtgagctcaacaaggtgaaggaggagcacggtcccgagtccgttatcttctcgtgcggcaccgggcgcgacatcgcgccgtacatcacgcgtctgtgctggtcgttcggctcgccgaacttcgtgaacatcttctccggcaacgcgtgctacctgccgcgcgtggccggctgcatcgccaccacgggcgcgttctgggtggccgactgcgcccagcagttccccgaccgctacgacaaccccgcatggcggatgcccgagaccatgttcgtgtggggcaactacccgctcatcgcgaactccgacggcttcttcggccactgggtggtggacctcatgaagcgcggcatgaagatcgttatgatcgaccccaaggtcacgtggctctccgccaaggccgaggtgcacctgccggtgcgcccgggcaccgacgcggcgctggcgctcgccatgatgaacgtgatcatcggcgaggacctgtacgaccacgacttcgtcgaccgctggtgctacggtttcgaggagctgcgcgagcatgtgcagccgttcacgcccgagtacgccgagaccaccacgtgggtcccggccgagcgcatccgcaaagccgcgcgcatcctggcggcgagcaagcccgcgacgctgcagtggggcgtggcggtggacatgacgaaggaggcgctgccggccgggcaggccatcatggcgctcttccaggtgacgggcaacgtggaggtgcccggcggcatcatcgtgccgcccgagatcctgaactacggcggcggctggggcttcgagcttctgggcgacgagcagaacgagaagcgcctcggcctggacaagtactcgctgttccgcctgggcttccaggcggcgcaccccaacaccaccgtcgaggccatgaagacgggcgagccgtaccccatcaaggccgcctgggtgcagacgtcgaacttcctggcctgcatgtccgcgaactccacggaggtggcggagtgcttccgcaagctggacttcgtggccggcgccgacctgttcatgacgcccactatcatggcgttctacgacgtggtgctgccggcggccatgttccccgagcgcgacggggtgcgcctgggagacggcgcgcagcgcgccgaggccatcaacaaggtgtgccaggtgggcgagtgcaagtccgacatggagatgaacctggagctgggccgtcgcctggcccccgaggcgtggccgtgggacaacgtgcaggacatgttcaccgagatgatcgccacctccggcatcacgttccccgagctgcgcgaggcggcgcccgtgtaccttcctttcgagtacaagaagcacgagaaggggcttttgcgccccgacggcagccccgggttctacacggccacgggccgcatcgagctctggtcgacgtactaccagaacgccgggctcgacccgctgcccgtgttcgacgagccttctcctggccccctggccacgccggagcttctggacgagtacccgctcgtgctgtgcacgggcgcgcgccgctggccgttcttccattcggagcatcgccaggccaagcgccttctggccatgcaccccgacccgtggatcgagatccatcccgagacgtgcgcgcgcttgggcgtggcggacggcgactgggtgtgggtggagaacatgctcgggcgcgcgaagcgccgcgtgaaggagacgcccatcttcgacccgcgcatcgtggcggccgaccacggctggtggaaccccgagggcgaccccgagaacctctacgacatcggggacctgtgcatcaacaacctcataccctggggcaacggcaagagcggcttcggcggaaactacaagacgaacctgtgcaaggtgtacaagatgaaggagggcgagtgacatggcggaatacgggctgctggtggattacgagtggtgcacgggatgccattcgtgcgagatggcgtgcgcggtggagcatgggttcccgcagggccaatgcggcgtggcggtgtgcgaggtggggccgtggagctacgggcccgagaacgaccgctggcaggtgggctaccagccggcgttcaccgaccagtgcgacctgtgcgccgcgcgcacggcggcgggcggcgtgcccacgtgcgtgaagcactgccaggcgaagtgcctggagtacggcccgctcgacgagctggcgggcaggctgggcgccaaggcgaagcaggcgctcgtggcgctgggctgacgcggcgcggcgttccgtcccgacccgcgtccgaaacggcgcaggccggggctccgggtgcccggagagggctgctgcggcgcgaggcggcagggcgatgggacggcgaaggaggttggcgatgcgggatgggaaggaagacggcccgtccgtcgacgcgacaacgggggcgaccgtgtgcggggcccttcaggaggcggggcgccgcgttctcggggaacggggcgcccctcgggcggtccctccgggagcgacgtcggaagaactgttagaatatgcttgtgatcaggtaaaacaatgaggtagcgactcaggttagcccgtcgctcgcgccttgcgccgcctcggcggcgctcggtgcggcggccttgcagaagggggtgcgaggtgaaggagcggaaaccgaaggggcgcgtctcgcgcgcgttgcacggtcttgccggcggccggggagcgtctgccgactcgctcgtgcatgaatggcaggtgcttccgaccgttgcggtgtcgtgctattggatatggctgtacctcgcctactcgctcgacgtgttcgtggtctcctcggacgcgttcgtgcgtttcgacatcctgcagaaggggttcggcttcctgggggccgcgctcttcatggcggccgtgtcgctgctgcgcacggcctcgttcttcgagcgcacgccgttcctggcgcttttctccgcggcctccggtgcgtcgatcgtcgtcgcgtcagcgctcgcgcgcgccggcgtgcccgtggcgttcccggtggtgctggccgtgtggctgctcatgggcgccggcacggcggcggcgttcctgcgcctcttcagcggtttgcaggatgcggggcaggggaggttctgcgccgtgaacgcgcttgcgctcttcctctcggggttcttctacctgcttctgctgggcctgcaggacggcatccggctcgtgctgacggtgttcgtggtgtgcatcgcggccttcgcgccgctgcgcccgcccggggaggccccgggcgccgctcgcgccccttccgcgcgcggggacgtgccgtcgccggaggccggcaacgcggcggtggcggcgctcctgagcttccgcggcgagctgttcctgttgagcgtggtgttcggcctggcgtactgcctgggcatatcgctcagcatcatgtcgaacagcttggagttcatctggctgtcgctgtgcgtgcccggcatcttcctcgtgctgtacagcgtgctcctgaaggaccgcgtgtccgtgcgcgtgctcctgacgctcctgttccccattgcggcgttcttactgctcctgctcccgttcagcaaccctttcgggctcgtgctgtgctgcagcctgctggtcatgtgcttcaccacctacgacgtgctcaacgtggtgcggttgcgcgagatcatcgcggtcaaccggctgccggaggcgaagtcgtgggcgacggggcgctacccgcagcttgcgggcctcgtgctgggatgggccgcgggctacggcatgctgatgaccgacgacgcgctcagggtgctgctgccggccgtgtgcgtagggctggtggtggccatcgtggccatgctcacgcgctatgtgtggaggtacagcgacgcggcgggcgggtctgcccatgtgccggaggagacggtggggcgcgtgcacgacgccatcgtgctgcgttacggcctgtcgccgcgcgagcgcgaggtcatggagctcttggtacgcggctacagcaccgatcgcatcggcaaggacctgcacatctcgtaccacacggtcaagacgcacgtgtaccacatctaccagaaggtgggcgtgcacgcccagcaggagctcatcgacctggtggaggagcgcttgcgcctcatgcgctgaaagcctgcagcaacggctacagcaagagctcgaggccctcccggtcgagcacttccagccggcagccgtccatgcggaagtagccctgcttctccatgcgcttggcctcctggttgagcgacgggcgggagacgcgcagctcgttcgcccagatcgtctgggacgagggcagctccacgaagccgtcctgcgcgatgtcgtccatccacagcacccagaaggctatgcgctcccgtatggtctggtagcgcaggcagcacagaagcatctggttcttcagccccctcctcgacaggtagagcatgaagcggtacagcatctggctgtccgtcctcaacatcagctcgaagaacgacgtgtccagccacatgaccgtggtcttcctcacggccagcaggttgtaggtatacaccttctcgccggtgaagtagagcagctcggggaacacgtcgtccttctcgaagtacccgttgcacagctcgtggccgtcaacggtgtagcgtgccgttttcaggcacccctcggtcacgatgccgaactccctgatgggcgtcccctgcgcgtggaccgtctcggccgtcttgtacgtttggcgccgcaggaggtcgccgtacacgggatgcgccaggcaggagctggcgaacgagggcagtcctgctgcgtctcgctccaaggagccccagccccctgcagaagggggtgcaggggcgaagggcttcccaagctcgttccggatcaacgtcagacccctctcgttgggcgggccgccggcagcttgccgccttgcgacggggacggcggccttgcggcggcccgcgggtgcgaggccgccgcttcgcattcaggccttcttacgcgagcgcgcggtccagcagctcgcagacgtcatcataatctctttcgccggcgaaccgcaacacctccttgccctggttgaacacggccaccaccggaatgccgagggcctggcagcccttcgcgatctcggggctcttgtccacgtcaacgtagcggatccggaacatgccctcgtactcttcgcccaaggcctcctccagcacggggtggagcgccttgcagtgcacacagcgctcggcgccgaacagcacgagcaccggcttcccctcggccttcagcacctcgtcgttccaggcgcccatggtatcgacgggcacgaacacgtcggtgtccacggagaacaccttctcgcgcaggctcaggtcggcctcgtcgtccgtggccacgcagagggccacgtccgggtagtagggcagtgtgccctccacgtccaccaccgtcttggcgccgaatgcgccggcgttgggcaggcgccatgtggcgttgtcgatgcgctccacgggcacctcctgcggcaccggctcctgcggcacgtagctgtaggggtagcggtaggcgcggtagaccatgttgttgcgcggcccctcgtcgttgtggctgtagtaggggcagatccattcccacacgatctcgtggtcgggcgtgacctcgatcaagcggccgtcgctgccctcgtccaccagcgtgttgccgttcggcaggcgctgggcgctcgacacgtaggggctgtagaacttgctcgcatcggtgggtatggcgtggcccagctccttcggcgtgagcttccacacgatctcgagcgtggtggggtcgaactcgatgatgcggctgtagtcgcgcagggcgttcttggagccgtcgcgcgagccggggttcggcacgccgtagccgccccagccgccgttgtcgaacacgagcaggttgccctcgcccggcaggcccttcggaatcatgtgcaggtggtgctggccgatgatccagccgagcttcctcagctcgggggtggcgttgaagtcggggccgatcttccacacgatcttgcccgtctccttgtcgatgatggccaggatgttggcctcgcgcgagtcgaagatgatgttgtcgggcttgaagcgcatgtcgccctggtcgtgccacttgttcggccccaggtagctcatgcagttcacgtgcaggtagtcgcccacgccgccgtccgaggtgcgcatgttcgggtcgcgggccagcacgttcttcgccgcctcgtcgaagcccagctcgtcgaagtgatcggtgatggaccacttccacacgatgttgccctcccagtcaacctcgtacatgcagtcgtcgagcagcttcttgtcggagacgttggggttgtgcagcgtctggtgggcgaggatgagcgtgttgccctcgagcggcttggcgtccatgcccggcacgtagtagcccacggggttgccctcgcgctggaagtcgtggtgctggcgcgccatccagcggtggtcgcggccggggtcgtcgatgttctcgaagcggtcgaactgccacacgatgttgccgtcgtagtcgatctcctgcaggttcacgccgtcctgcatgccgtagtcgggatgccgggtgcctgcatagcccatgacgtagccgcccggcagcagcttcggcggcatggcctgcatgttccagcgccgcacctcgttgccgttcatgtcgaacagcagcacgccgtcgttgatgaggggcacgatggtgtacccgttccagcacttctcggggttgtagatggtggtgccgtgagggaatacgctcggttgacccatggttcgttcctccgttttcgtcgcttctggttgccttggtcgttttcatcgttcggttcgtcccgatcaccccgagggggcgtaaagcctgcccgcgaggcgatcggcgctcctgctggttgccgggcctacacctccgttcccatcagcttgccgccgaagtagaaggcggttgcgggggaggcgtgcagtcccaggcggccgtacagcagcgactgccgggtgatgtcctggcgctcgacgcgccattcgccgcgcagtttctcctccagcgcggacacctgctctatctgctcgctgtcgtaggggtcgtagaagacgaacgccaccttgcccgcgtcgggcgtgagcagggagtcgatctgcttcttctccttcacgtagcgctcgctggccgtcgccgcgatggcgccgtcggctgccgcggtgaccacctggcgcaggaaggtctgcgtgcagtcgcccacggcgtagatgccgggcacgctggtctccttcttctcgttgaccgcgatgtagcccttgtcgtcgcattccaccaggtcgcgaatcagctcggtctgcggtatcatgcccacgaagaagaagatgccgtccgtctccacctcgttcgacgtgcccgtcaccacgttcttgatgacgagcccctccacctcgtcgcgtcctttgatctcctctagggtcgagttccacacgaagtcgatcttcgggttgcggaacgccgttgcggcggccacctcgttgcagtcgagatgcccctcctcgtgcagcacgatcaccgtcaccttcgacgcgaagcccgtgaggtagtcggcctcctcgatggcctggtcgcctgcgcccagcacgtagatctccttgcccttgaacatctcggcgtcgcaggtggcgcagtaggccacgccgtggccggcgaactcctgctcgccgggtatgcccagcacgcgcggtttcgtgcccaggtccagcaggacgcagcgcgtctcgaagtcgccgcgccgcttcgtctgcacgaggaagttcccgtcgtccagctgcttgatgccggtgaccgtggtgcgcttgagctcgttggtggggaaggcgagcgcgtgggccttgaacttctccatgagcccgatcccggtgtcgccgatcgtacccgggtagttgcgtatctcgcgcgtctcgttgatgcgcccgccgtagctccccttctcgatgaggagcgccttgcgctcggcccgcccggcgtagacggcggccgaaagccctccggcgcccccgcctacgataatcatgtcgtacgtctcagccattgttcgccaccaggtccttcttctcgattgcgggtttgcatgccgtggccttccgtccccaaccgaacacgacccagccgaagcagaccgcggccagcatcaggggatagaagcaacaggtgaatatcgggacgggcgccacgaggggcagcgccgggttggcgccggccaggcccgccacgagggtgatggagcccatgatgaagatggagttcacgggcacgatggccgggatgttcgtggccatggcggtgagcaggatgctccggcggttcgccgagatgcccgacctctggcctatgttctccaccacgtccttgaacatgatgacggtgggcagctcggaccccgaaagcaggcagcagatgacgccggtgcccagcgcgacgatgccctcggcgcccgccggcctcttggccatcttgaggcccatgaggaagtcgcagcacttctccaagatgccgccctcgacggcgatctggatcatgccgaacaggaggatgctggcgaacacgaggttcaccgagctggtcacgccgtccatgaacacgccgtgcatctgctgcttggcgaagtcgaaggaggcgagcgctgcgggctccatgaggccgctcgcaagcccgaggacaacgcctgcgaggatggcccagctcacgcccatgagcaggttgcgggtctttacgcagatggccagcagaagcgcgatggggacgaacatgaacaggccgcgggcatccgccatgccggccagctcctgcggcgagacggttgccgcgccggcgccgccgaggaggaagaaaagcgctgcggagacgagggcgatggccacgaggtagggcgaccgggccttcatcacctccacgaggtcggccggcctgcccgttcccgggtcgtgttgcgagttgatggtcacatggatgacctgggagctgggggagagcgcgtcgccgaagaacacgccgctgatcatggctcccacgagcacggtcgggtccgcccccagcatgacgccggacgggtagaagatgggcacgagcgccagcaaggcgggaaacggggcgcccgatcccgtggcgaagacggcgcagccgacgaacaccagaacgacgaaggcccctccctgcagcccgcagttcaggcctatccagagaaggccgccgccgatgtcgccggcgacgagcaccttgccgaacacggcgatgatgatgaagatgaagatgaggttcgcattgccgaactgggtgaggccgcgcacgcacgaggcccagtactccagcttgttccggcaaaggaagaatccggcaagcaagccgatgaccgaggcgaagatgagcgcctccatgccgtagtagcgtatgccgatggagatgatcgctgcaatgatcatgtagagaaggatcggaagagccgcgaatccctgcgtgccgtagaactgcaaagcgaaccgcttgtctttgccgtcaacccgctgatgagccaaggcaaacaccgcctttctattcaattgctcgcttcggggccccgttcctatgcctcctattaagccatgcgcgctccggcaaagcctgttggcgtggcaacacttttcctgcctgccatcgcgatttctcatggccggctgatggcgaacggcatgacaaggaggacgcatggcggtcgccttgttccgagaggctgataatcggacactcctcggccgagcgtccatgtcgaaaaggtttctgccgagcataatgatgctatcgaagcttcgagccaaaaccgaaagcagcaaaggaggaaatgatgatcttcaaagggccgggtgggttcggacgtgttctcaatatcgtgatgtgcatggtcatgtgcgttgttctgagcgtgattattctttcaaccgtacagggcattccgggtaatgagtctttgccaatcttcaccctgttgggcttcggcgtctcgtttctcatgagcttctgcgcgggctatgtggtgggcgaccttttccctgcgctctcctgggggcgcaagctgtgcgctgtcctgcatatcgagaacaaggtcgtcacccatatcgtgagcagcctcgtcctcgccttcaccctcatcaccttggtgagcgtctcgtgcgtctggatgacgaacgcgcaatccctgggcctgggtgcctgtgtggggatctggatgatggtgtacccgccgctgctgggcgcgggctacctcgtcatcttggtgacgctgcccttggcgatgaggctcgcctctgcgataagcgggttcgatccgagcgggccttccccgcagaagccggcggaaggcgccgtggagggcgcgctttcttgaggttggcgaggccgagaacactgttacgtgcgactagatgggagatgctatgatgccgatggaaagagagcggttcaccctcgaaaccaccatcaagggcgagaggatcgagaggatttaccagaaggagctgaggcccgtcacgttcgaggagtgggaggtcctgtccgacgaggaaaagcagctggccaagccctgcgcgttcaaccagcgcacgtacgaggcggcgcccggcatcgtgtgcgagcaggatgtggcggtcaagatgcgcgacggaataacgctctactgcgacgtcttcaggccgcaggactcggacgcgaaggtgccggcgatcctggcctggtcgaattacgggaagcgcccgaacgatttccgcacgggcgaggacgtgggctacacgccgggcgtgccgttcggggccgtctcgcccagcgcgaagttcgaggcggccgacccgctctactggtgtcccaacgggtacgcggtcgtcaacgtcgacccccgcggcatcggctactcggagggcctccacgaccagttctgcgaggaggaggccagagatggctacgacgtagtcgagtgggccgcgcagcagccctggtgcaacgggcgcgtgaccatggccggctcctccgcgctggccattacccagtggcacatcgccgcgcagcagccgccccacctcgcctgcatcgcgccgtgggagggcatgagcgacatgtaccgggagtcgctctacgaggggggcataccctgcgtccgcttcaccagcttcgccaccgcgggcgcctgcggactcaagggcatcgacgaccaggcggccatggccctgcgctaccccctgatgaacgcctactgggagaacaagatccccgatttcggcaaggtcaccgtgcccgcctacgtggcggccgggtggaaccatttccacctccgcggctctatcaacgggtaccgcaagatttcctcggagaagaagtggctccgggtgcaccgcgagttcgagtggcccgatttctacacgcgtcagaatatggaggagctcaaggcgttcttcgaccgctactgcaaggacgtccacaacgggtgggagctcaccccgaaggtgcgcatcgacgtgatggacgcctacgacgaggactatgtaacgaggcgtccggagcgcgagtttcccctggcgaggaccgagtaccggaagctctacctgaacgccggggccatgagccttgaagaggagagcccggccgcgcccgcctccgtctcctatgacggcgacgagggcaacgcggagttcgactaccggttcgaggaggacaccgagctcacggggtatatgaagctccacgccttcgtcgaggcggacgggcacgatgacatggacctgttcgtcaccgtgaagaagatccacgagaacgggaccgagattccggtgacggtattcgacggcacggcgccccatccgggcgcctggggaaagatgcgggtctcgcaccgcgagttggacgaggtgctctcgagcgacttccagcccgtgcaggcgcaccgcagggagctgaagctctccgccggcgagatcgtccccatagacgtggagatcaaccccacgagccgcctgtggcgcaaaggcgagatcctccgcgtgcaggttgcggggcgctacctccgcgacgagcattggatcgagcccctcatgtgggagacggacaaccgggggagccatatcatccatacgggcggcgaatacgagtcctacttgcaggtgcccgtcatagggccgcgctacgaccgttctaagccgttcgtcgtggacgaggggaggcacccgggccatcctatcttctagccagggcccgcggcaagctataaggcgaggcggcggcgcctgcctttgcagggaggcgccgcctgatctagaatcggggaacgatcgcggggcagggaaggcggtgcggatatggattcgggctcgagggcctcggcggcgaggcgggctgtcgtcgagacgtacatcgacctcatggaggagaagccctacgactccatccgggtgaaggagctggtcgagcggtcaaacgttgccaggtcgaccttctacgtgcatttccgggacaccatcgacgtgctggagggcatagagggcacgctcctcggcctgttgagcctctaccggtccgacggggacgcctacaagggcgacatagcgggcatgccgttcgagtgcatggagaactggttcgaggtctgcatcgagcacgagcgggtcttgagggcgctgatcggcccccacggcgacccgtacttcaccgtacgcctgcagaaccagatcaggcaggaactcaaccagatgatggacgacgaccgcgccccgcgcgacaggctgcgaccctactacgtcgagctgctcaccgcgtcctacatcgggctcatgagctacatcgtcaaggagaagaacaagagcgagtacctggaggcgcacgagctggcgagcatcgcgaactcgacgcgcgccgcctactacaagctgagcgacaaggctccgcggctctctgaagagcgcctgttcggagctaaagcgccggcaggggaggacggaggcgacgatcgtccggaaacggcccgataggcggagccgtttccggacgcggcgctagcccagaccggctgtggagaagtagccggcgacagctacgagtgcgatgccggcagcgcctacgagcacgtctcttgccgagggggacggcggggtctgctcgggccgctcaggtgcgggctcggctggcgcttcggctgcttcgatcgcctttgccgtggcggtgctcgtccggcgggcggcggctttctgggcgggggtcattttcttcttgcggcccatggctgaatctcctttctcggccacggcgcggcggatctacgccgctagcccttcttcgctggcacggggtcccgctcggcctcccattgctcgagtatcacgctgccgcggtacttgtacacgccgtagatgccggcgaagtcgtagccggcgcaggagaacgtgccgccgatcgacgtgacgaactcggccgcctccacgttgaacgcgccgcgttcgaacacgtagaggttcgcgatgctgtcgcggctgccggtaggggccaggaacaggcccgtgccgaactgcaccggcagcccgtcgcccttgaggcgcaggttctccacggccaggacgggttcgaagcggccgatccagctcttgcgtttgagcgccgcccactccgcccataccgacgtgcccttctgggcgtcgtcggcgtagatggcgttgaaaaagtcctggtaggatgccgagccttccaggtacggcgcgtagtcgggcgatacgtccgggcctgccgacacgtacagcagcaggcgttccagtgcggggcgcgaggcgagcggtgccttctcgatgccctcttcaagcttttggtagtccacagccggtctccttttcaaccgaggttctccccaagatgccggccgtcgctcggggctgccggcatcttggggagagctgggacggctcggcggccgtcccagctcaaggcgctacgcgcagggcggcacccacaggtactgctgcggcttggcgtccaagcgcttcgcgagctcgtccaccgggccgaactccatgcacttggcctggcagtggaacacgcaggaggggagcttgcccttctcctggcggtcggcgcacaaatcgcagatcttcgtgaacgccgggatgaagtcgtagacgtagttgtccgtctcgttgccttcggcgtccttcaccggccacgggccgttctgcatgaccttcacgccccactgctcgagcggtagctcgtgctcggcctggcaggccacctcgcacgagtagcaccccgtgcagtactggtagtcgacgagaattccgttgagagccattacagttcctcctccttgcagcggtacaccttgcagagcgtgcacttcaggtcggcaccgaagccagtcgtgccgggcttgttggccagaagctggttgatgttggactggcggaagccgtacaggttgggttcggcgccgtcctgttcggggaaccaccagccgtgctgcgcggcgatctccttctcgtgcacctcgaacgtgaggcgggcacgctggcggcagcggccgcggtggttctcgatccagacccagtcgccctcggagatgttcaggtccttggccgtgcgcgggtggatctgcacccacggatcgggtgtgagctggcgcaggtaggggatctggcggtgcttcgagtggaagaacgacgtggtgcgggcgcccgtgatcatgatgagcgggtactcctcgtacaggtcgggcgtggtgacgggcccgatgcccggctcctcgatgtagggcagcgggtcgtagccgaacttctcgaacagcgtggagtagaactcgatgcggcccgtgggggtgttgaagccgggctggccgtcggggcgcatgaggcccttctcgtacttcttgtacacgtacttctggtagaccgggccgtgctccatgagctcgtggaacgtgaagccggaggggctcacgatctcgtcgtacacctcgtcctcggtcgcccacggccaggtgtgctgcttgccctcggggcggccgatggcctggttgaactcgtcgtcgttgtcgaagtactgggcaagctcgcggttgatctcgcagtccgacttcgcctcgccctcggccgcgcagccgcccgtgatagcggacaggaagtagtagtgggcgcgtacggagtgcttctcggcccacgtctgcaccggcatgacgatgtcggcgcacgactggatggtaggcgtcatgaagatgtccacggcggcgatgaactccggcttcttcatggcctggtaccagcgctcggtctcgcagctcatgcaggcaatgccgttggatgtctggatccacacgcccttgaccttgccctcctccatatactccaggcacatgtcgggcatggcctgggtgaggccgtagcggtacatggggaattctttccagcccacgcgcttcttctgcatctcctcgttgatgaggtcgtagatgccccatgcgccggcggacggctggtcgacgcccatgggggaggcggtgtagcacatgccgcccggcacgtcgaggttgccggtgatggtccacagcgcggcgatggcggcggcgcagggcgtgccctggctctgcatgtccacggcgaggccccacacgacgttggccggcttggacgtggcgaacaggcgcgcagcggcgatgatcttctccttggggacccacgtcatggcctccacctggtccagcgacagctcgcgggcgcgctcggccagctcgtcgaagccgtaggtccagcgctccacgaagtcatggtcgtagaggtcctcgtcgatgatgaccttgatcatgccgagagcgaggcccgtgtcggtgccggggcgcagctgcagatggatgtcggcgtgcgcggcgagccaggtgacgcgcggctcgacggagatgagcttgcagccgagcttcatggcgtcggtgacccagtgtcccatgaagaagtcggggttggagatggtggggttgcagccccaaacgatggtgcactcggggcacacccactcggggtcgtcgtagcgcagcgccgagaactgcgagaagtcggcgatgagcatgccgccgtaggtcatgatcatgagcgacaggcggggcaggtagcaggcggtgccggacaggaagccgtactcgttggggctgccgaacgtgttcgccatgcggccgacctgccactggttgtcgcgtgcggtgccgcgcaggcagtggatggagtcgccgccgtaggtcatggagatgcgacggaattccttgtagcaggtttccagcgcctcgtcccacgtgatgcgctcccactggccgctcccgcgctcgccggcacgcttcatggggtgcaggatgcggtcggggtggaactccacctgcttgaaggccaggcacctcgggcacagcgcgccgcggttgtacgggtcgtccgggtcgccctcgcacttgatgaacttgccggtctccttgtcggagtacaccagcacgccacagccctcgtggcagcccggcgcgctccacaccgaggtgcgggtgaccaccatgccgtcctcctcgtactggaagggcttcggatgcttccagcgaggatccacttcctgcctcttgccggcgccgaagttgaactggttctcctccttggacgtgccgatctcgtcgcggtccttctccgcgacagcgttctctaccatcgcaactcctctcggtctccgggcctgtcgggtgtccgccccaatcggccctcccctctggggttgccagcgagtaaagcacgcgataggtatgagcctatcgcgtgatgagtatgcagattgggaatcagtacgttggtatgacgcgatgaacagggacgatggaaaaggggtaggcgaggctccttggtatgaagacgaggttccttgacgtacgtaattgcgtacgctactatagagcaaaagaaacgaggtaaggagacaggccatgacttcgatcactgcaacggctttgcggcagaatatctaccagaccatcgcccaggtgaacgagaactgcacgcccatcgccatcacgaacagcaaggggaagggggcagtgcttatcggcgaatccgattgggcggctatcgaggaaacgcttttcctcaacggcattcccggcatgagcgaatcgctgcgggccggcatggcggaaaaacccgaggactgcctttctgaagaccgacttgagtggtagttatgtatgcagtgaagttcacgaagcaggctgcaaaggatgcaaagaagcttaaagccgctggtctcgacaagaaggcgaaagcacttgtcgaggtgcttaagaatgatccctttcaagaggctcctgcctacgaaacgcttgtggggaacctctcgggcctctattcgcggcgcatcaacctgcagcatcggctcgtttatcaggtatatgcagagccctttgccgagggtggcgaggaattcgatggcacggtcaaagtcgtgcgcatgtggacccattacgagggactctagccttccggcgcattgccgctttcccgcgccgtcccgctagtcctccaccgggaactcctccacgaagtccatgagcttctgctgggagtggatgtcgagcttgcggtagatgctgtagatgtggctcttcaccgtgtggggcgatatggtgagcttgccctggatgtaggcggcgttgcgccccttcgccaggaacttcaagatatcggtctcgcgcggggagagctggtagagctcggccacggcggcgcagcggcgctcgaagagctccttctcgctaaggttggacggcacgggagcggcgggttcgcgggcgccgatcgtcccgccgtctggcgcatggtgctctttcgaggggaagaacagcatgaccaccgcaacgagcacgaacgccatgcataggcgcacgatcatgaacgcgtcggaatgggcaccgtaggccatggtcatgcccgtggccacgccccagcccacgaggaagcccagcgcgctgaacacgaggcgcgctggcgcctggcggaacaccggcgtgtcccagcgttcgacgctcttcttcacgatgaacgcgtagttcaccgatacgaacgccgcccacgacgccacgaccaggcacgagcatgccagctggatggcctcggtggcgaagggcatggagaggcatgccagcacggtgatgcacagcaacacgcgctggatgacggtgatgcccacggctttgcccgaaagcgcgagcacggcgatcaagccggcaccgggtatcacgaacagaaggcccacgagcacgtcttgctggcctgagttgaacaggtacacgaacgtcaggccgaacacgatgccgaacgccacgagcgagggttctatctcccaggtgaactcccaggtgttcttgcacgagccggcggggggcgcatcggcgttgccttcggctcgctcgccggcgaaacggaggaggccgacgctaagcagcgcatagacgatgcagaacacgggctgtacggcctcgggaacgatggcggcgaggacgaacagcgccccgccgcccacgagcgacaggctcgtgaagcgaggaaagctcttcaccctgatacggctgctcgcatcgagccagctcaccgtcagcgatgcgccgcccaggcccgcgcaaaggttcacgacgcacagcactggggagggtacgtccacgccgaggcccagaaacagggcggcgatgggcaagagcagcgccagcgcagcatcggtcgcaagcgcggacagcctgaacggatcgaaccgggagttcttggcaagaaggtgcagggacaaatatcccagtgccagacctgcgaaaacgaataactggatggcgtcgcgctcggctacgggggtgtcctggatgaactcggcgaaaagccaatagtacgatacgagcatccacccgaaaaagcaggagaacccgccgatccccagcagctccatggcgccgatgcggcgcatgtccacggtcttgccgtcgtccatctgattccccccgcagtgcccggcttgaacgtcgttggagaaactgagcacgatcggcgcggcctgccggacaccgattcaggacgcggaccccaacatctccggaacctcagtatacatcaaaaggagagcgagagggccgttccggcgcaggcggagagccgctccctatagtttgccgacggtcggaagcagggcaagctccatcagatgcgcatgcgtgcccgtcggcacagggagccgtccgccgccctcaggctacccccggcggcttgatcccgcgttcgcgaacgacgctgtccaccgacgacatgcccagctcgcggcatgcgctggcaacgccgggggtggcgccggtgacggcgtcggcatcgcaggtgcccggaggcgggcaggggggaggcgccgccggagcgcctccgtgctggccggggtcgagggcggccgccgcatcggccaggctcgtggcgcccgtgacggcgtcgggctgttcccccggttggtcgttcatgcgcttctcgtacatggtttccttctctacctcgtcttgcttggcggtggccgatgttcttcggcgcggcctacggccatgcgcaggaggggtgcccttcgcacccctcctgcggctccgaaggcttatgcggccgccgggcgtccttcgcccatcggaccgtccgagcgtgctgtatcctgcgcggcgtcctcgtcttcctcgaacaccggcggcttcatggccacgtagacgatccacagcagcgtgcccacggccgccgtggccgcgcagagcggcgccacgttggtccatacctgggcctcgcctatgatatagcccaccaccggcgtgcacagaaggttcgagatgccctggaagaagatgatgatggccatgcccaccggcatggtcacgcgcttgggcatggtcacgggcaccatcgaccacaccacgccgctcgtccagccgctctcgaggcccaagagcaccagataggcgggcaggtactcgtagggaaccaggaacgcgcccacgtagaaaaacgcgcagaaccccgcgatgatcaccatgacgttgcgcgccttaagcgtctggaacttccccagcaggaaagccgtgaccagcgccatggggatggaggccgcgaagccgagcgaggccatggatccgccggacacgccggcctgtgcctgagcggcggcaaggtccatgccttctgccagcatgcgttccagctccacgccctgcacgtaggtgggcacccaggtgagcaccgagagcgaggtgaacatgaggaagcagaaccccaggccgaacagccacatgcgcttcaccttgaatccctcgagcaggatggcggcggggcggtgctgcttctcgcccgtctcccgctcgcgcttggcggccacgccgcgcccggcatgcggcacgctcacgaacagcgcgaacaccacgaaggacacgagggcgagcacgtcggagaaccaccaccaggcatgccagttggtcgggtctcccgtgagcgcgagcgccaccggcacgccgatgttgtaggcgagcgtggaacccacgacgtaccacaggttccagatgcccatgggaagccccgccttctcgcgggggaagtacatggagatgacggtggtggccaccacgcccatcatggccacgccgatgccctcgagcacgcgtcctgcgatgagctgcgcgaacgagtatgacagcgcgcccacggcgcatccggccaccatgaaggccaggcccacgaggcccacgcgcttcgggccgaagcggttgagcaggaacgccgaggggaacgcggtgataatgccggccacggcgatgaccgacatgagccagccggtggtgcccggatcggtcccgaagtcgtgcatgagggcgcccatgaacgtgggcaccttgaactggttcataatgacgatgatgccgcagaacagcaaggcgaagagcacgatccagcccttgcgctggcggttgcgggccacgtcgttttgatggttgttgctcatgattagtcccttctctccgcgaacgcggggatacaggcttgagggaaggggcgctgctcgccgcagtcgccccgtgaaattggtttttccgtaggcaaggactctgcccttatgctgactggagctgctccgcaagcggcaaagcgttgaattgaattccgctccgccgctttgaagttgggtgtaaggtcttagtgctgtgcggctgcctcgtctgcgggtttgccggcgggagcgctcgcggcctgcttcttagagggcttcacgccgaaggcgagtaggatgcccacgatgctcacgggcacgagcgcatacacggcaagcatagggtcgacgtggataccagcggcggcggcctcctgggccgcttgtgcgatggcggggccgaagtcggccggggtgccgccggaagcgagcacggcctgcttggcctcgatggccacattggaggcggcggtcagcgtgtcgctgaacggatgcatgacgtagctcgtgaacatctggcccgcgtactggcccagcgtcaggaacgacaagccgaaggccacggccgtggcgccgcccttgaacacgaacgtcggcacgagcgggcggcagcaggcattgagcagcatgttgccggcgcagaagaacacgacgtaggggaggaagaacgtgacctgcgagaacgtggcggatgcgagcgccaggaacaggatgcccaccacgacgcagaggtacttcttatccctgggcgtcttgtcgaggatcaagccgccgatgggggccagcgcgccgcacgcgcagatcaggccgccccacaggccggcggccgccgcatcccagcccaggccgcccagcagctcgggggtttgcatccaggtcttcaggtactggctgaagccgtagttgacgtagttgtagatggcgaacatgaggatcaggcaccacagctggcggctcttgaagaacggaaggacctctttgaaggacttgcgctcgggagacacctgcgaccgctcgttctcgcgcggctcgcggaacacgatggcgaagatcacggcgaacacgacgatgacagcgacccagatccactggaacgccaccatgtcgctgcccgccatctcgaacacgttgttgccgatgaagttgatgacgaagatgcccacgggcgcccagatggaccagatggccatggcgcgcccgcgcgtggcatcggggaaccacaccgacacgcaggtggggcctgcgacgatggtggtggccagggccacgcccagaatgaagcgccccacgaggaacgcgtagaagttgtcgcccacgaagacggcgctcacggccgtgccgacggcgccgagcgcgaggccggcgacggtcgcggctttcgggccgatcttgcgcaccaggtacgaggcgggcagggccatgatcagcgcgccgataggcacgaggcccatgacgttcgacatcagctcgaagttggccgggttggcgaacagcgcgttgttctcggccagccagttcttgaacaccgggaacgtgatgcccggcagccactgccaggcgaagaccagcgcgatgccggccaggaccgacgtgatgaggcatggccaggcgtacgacggcgtcttctcaacaggtttggcttcccttgccgctacggcggcattcggattgctcatgatggtttcccctctttcatcggacgcctccttgcgcggcgtcgacggatctgccgggaaggggctccgcccctcccgtctttccctacaggttgaacagcttcgccgcgttgccgcccagcatgaggtccttctcctcctgcgtgacgtcgagggccttcaccgagcccaccgagcgggccatccactcgtagaacacggggaacgaagagcccagaagcaggtggtcggcgccgcacgtcttcacggcgagctcgagctggtccttgctccagctcatggggtgcgtcatgtcgaagtagatgttgttggctaggtagcggtcgtacgcctcgcggtcgacgttggtggccaggcggttcatagcctccttcttcttcaccgacacgtgcggggcgagcaggtccttgagcgcgaaccagttgccgccgaacatcgtgtggatgaacttgaggtcggggaactcgtcgaacatgcccgagtacacctcgcggcccactgcggtggcctgcacgtggatacggccgagctcgcgtcgcaggggcgtgtagtcggcgaagttgccgaacgagttctgtccgggcgtatggtggatggcgcagggcaccttcttgtcgttgagcaccttcaggtagggcttgaacagctcgtcgtcgaggaacttgtcgccgtagcagcaggcgaattgcacgcccaccatgccgaggtcgcccaggcagcgctccagctcgtagatatcctccttgcggccccacggcggcagcacggcgttggcgtacaggcgcccttccgactgacggcacatctcggcggcctggtcgttcacgatcttgcacatgtcgagcggcagccattcctgccacaccggcatgcgcagaagcgcgatgtcaacgcccacctcgtccatggcgcggagcttcgtctccagcgtgtagtcgccctccacgtagttcaggatgtccttgccgtcctcggtggcaagcacgatctggtccttggcgccgtcgggcgtcttgccgcggtaggccttgagccccatggtgatgggggcggagtacagaaagccgttgagcacctcctcgttcgtgaacaggtcggtgggcaggaagtgcatgttgatgtcgatgaccttgttgtctgccatgttctctcctttttctctcgacgggcgcccgccccgcgccgcttggccgcagggcggcgaggcgcggggcgggcagcccgcccgggttaccggtagatcggtgtaacttcgcgctccgcgatcttcttcatgttggcgccgcagcggtccttccagtcgatgcggccctgctcgcgttcgagctcggtgaccgagcggctgaagtcgcgcgtcaggtgaacgtcgacgttcatcagcttctcggcgatcctcccgccgaaatcgtcctcgaatctctgggccatgtccgtcctccttcctggttcccttttccgcgggcgccccgccttggcacggcgcccgcggcccgacagatctacgcctcgttgatggcgacgatcatctgcttctcgcggtcgaccttcttcgcgaggtcctccacgtctccccagtccaggcactgggcctggcagtgctgcacgcacgtgggctgcttgccctcgcccacgcgctcggcgcacaggtcgcaccacttggtgaactgggggatgaagtcgtactggtagtccttcttggcctcgtcgatgtgcagcgggcccagcttcgtgatcttcaggccgaactgcgcctcggtgtagccgtgttcctgctggcaggccagcacgcacgcctcgcagccggtgcagtagtcgacgtcgaccaaaattccctggtaagccatgtctctcatcctttccgtcgcgcggctgctagtcggccttgcggatcttgcacatcatggccttgtagttcgagccgaagcccgatacgccggcgtcgaagggcacgaggttgttgatgttggactccagcacgccgaacaggccctcttgctcgttctccacgttctcctcggccgcgtccttgcgctcggggaaccaccagccgtgctcggcctgcatgacgcgcgggtcgtaggtgtcgttgaaggcggccttgtacttgcacttgccgtgcttgttctccagccacacccagtcgccctcctcgattccgttggcggctgcggtgtcggggtgcaggtacacgagcgggtcggggtgcagggcgcgcagcttcttgacctggcgctgctcggagtggaagaagtgcggaacgcgcgcgccggacgtgacgatgtaggggtactcctccacgtcctcgggggcgctgtaggggctctccaccggctcgacgtagctcggcagcgggtcgaggcccgaccacgacgtgtggtggaacaccatggagtagatctccgcgcggcccgtctcggtgcggaagcccggctggccgtcggggcgcaggtctcccgtctcgtacttgcggtacttgaactcggggtacttccacgtggactcgcgcagctcgtcccaggtgaagccgccgtcctcaagggcgtagtcccacatctcctgcacgtcgtcccaaggccaggcgatgtcctggttctcgggcttgatggccgccgtcaggcgcttgcccagctccaggaagatggtgttgtcgggcttggagtcgcccacgggctcgatggccttgttgatgcagctgatgcggtaggcgttgagcccgccgaagccgtcgcgctcctcgtaggtggcggcgggcagcaccacgtcggccagcgccatcatggtgggggtcatgaacaggtcggacaccacgatgaagtcgatctgcttgtaccattccagctgctgggcggcctgggcgcccatggtggccaggaagttgttcgtcacgatgtaggccgcgcggatgggtatctcgccgcgctgccacgcctcgatggtggcgttggaggacaggttcttgaagcccacggcgaacatggggtagcgctccacgccgatgcgcttggactgctcctcctcggtcatgagctcgtcccagccccaggtgccggtccagttcggctgctcgatgccccagcaggcgtcgcccatcacgttgccgccgggcacgtcgaggttgccggtgatgcaccacagggccgtgatggcgtgcgctgcctgctggccgcccgtctgctggtcgagcgccacgccccattggatggcggcgggcttcgatgcggcgtaggtgcgcgccacgcgctgcacgtcctccttggccacccaggccctctcgcacaggtcgtccaggtccatctccgccacgcgctcgcacacggcttccaggccgtacacccacttgtcgcagaagtcctggtcgtagagcttctcgtcgcagacgaccttcagcatggccatggccagcgcgccgtcgccgccgggacgcacgcgcagccagtcctcgccggcgcgggccgcgagccacgtgagctgcgggtccaccacggccaccttcatgccgcgcttcatgaggtcggtgatccaatggccgtagaagccgtctgcgttgctgtagaagggttggtggccccacacgatgcagtactcgggcaccgtgtagcggggatcatcgtagcgctgggggaggaactgcgagcagtccatgacgcacgcgccgcccagcatgcaggccatcgacgcgatgcggggcaggtagcacgagttgccggcgaagtagggcacgccctcgttcggggagcccacgcaggcgttcaggcgcgttacctggtggatatcgcggcccgtgccctggcacatggcgatcttgtcggcgccgtacgtgtcgacgacgcgcttgaactcgcgcacgatgatgtcgtaggcctcgtcccagctgatctccacgaacttgtccttgccgcggtcggcgcggtcgcgcttcatcggtttggtcaggcggtcctcatggtagacgtagtcggggatgcagaggcagcggctgcacaggcgtccctggttgtaggggtcctccgggtcgccctccactttcaccagcttgccgtccttcacgtaggacaggatgccgcacacgttgtggcatccaggcgcgctgcgcgcggtgccgcggatgacggtcatgccgtcctcctcccacgtccaaggcactttcggcgtctcggcagcaggcacgggcgggcgcgtgtcggtcttcttcggcaggcgcgagccgcggcggtacttcttcccgttggtctcgctccagtgctcctgcacgggggcctgggctgaatcggccatacgttcctccttctcgttgcttctcatcggttctcgtctcgcatcggggtcgtctccggcccggttccgtcgcggcttgcgcgcgcggtgggcgggcacgattccgaacggggccagaataaggaggattcgtggagcggcgtcccccgcagatgatgaggaagcccttttcattattccaacccgagcgttttcggcgataatcctcttggtatgagactcccaactgggaatacgctatgaattaagaagcaagcccaggaaggggcgccggtgcgaagggcgtgctaaaagggtagggatggagaggaggcggctgctaggccgccacggggcagttgcgatcgagccggcgtacccgcttcgcgtgtttgatgatgtgggagatcccgccagggctgcgtaatgatgccgaagctgcatgtcgcatccgatattggaacgaactgcccaacgcggctccgttgcgtcgagcattgcaggtgctgaatctgccgccgaatttgagggtaagtgaatttacgcaaattcggtcttgcgcaaaggctgcgttccggtataatcttcacttgcgcgcgaccgagacgggaagcgccaaggctcattcctcggtagctcaacggcagagcatccggctgttaaccggagggttgtaggttcgaatcctacccggggagccatgaaaccacaggccagaagcaacgcgcttctggcctttttcttttcggagctgcgaaggcggaatgcgatcccgaaaccggcttggcgacgtgcggcgcaggggccaggagccgacaggagccggcgagtgggacaaacagggggtcgggggactcatgggcgtttcggacaggggagcggcgcgcaggagcgcacgccgtagctcgatgttgatgggcgtgctggccattgcggcgggcattgtcatcgtcatgaacctcttcaaggtgtcggcttcgttgagcttgcttacggcagacctggggatcggtgcgagcgcggggagctggctcgtcacggtgtgcaccgtggtggctgtggtcctggtgctgccggcgggcggtctggccgaccggttcgggccgaagcgggtgggactgttcggcctggcgtgcgcggcgctcggcagcgcggtgggcgccctctgcaccgatatcggcccccttctggcgtcgcgtgcgctcgagggcgtgggctacgggctcaccggcgtcgtctcgccggccatcatcgcggaggccttcccgcccgagaggcgcggcatccctatggccgtctggtcgtgctggatggatttgggcatgcttgccgtgctcaacgtggcgaacctcgtcatcgacccggccgtggcgtccagctggaagggcctctggtggctgtgcgcggcgctgaccgcggctctggcggcggtctatgcacttgcggtgcgtgaggggccgcggccggaggcgggagcgggcgcgggaggaagcgtcctgctgacctcgctcgccggtgcgctgaagtcgcccgccacctgggtggtgtcgtccgtgttcctcctgtacaacgtcggcgtgctgtcgcttctgacgctggcgccgctctactgccagacgcagctcggcctgggcgccgccgaggccaactcatatacgagcctgctcaccatcggtatgatctcgggggcgttcgccacagggctcgtgctcgtgcgagtgcgcacgttgcgcggtcgcatcatgctgctggcggcgagcatggcgctggcagctgcggtgctgggcggggcctacgtgtacacggtcgaccagatcgtccccttcatgctgctgggcgggctggccctctccatcatgccggcggtggggttcaccatcgtgcccgagacgcccgcatcgcccgccttcgccggcgcggccatcgggctgttcatgctcatgggcaacctggctggcatcggcacgccgcttatcggcggcctcatggaaagcgcgccagcggtcctctcggctatcctcgtggcggtgagcctgaccggcgcggcgctgtccttgctgctgctgaggctcatgggaggatctgccccggcccagggtgcctaagctccttcgctcgacgcgcggttgtcgttgccttgcggggtttttcgctcgggcgcgacgttctcttggcaagggggccgattttgatatagaatggcgaggcgctgttcgagggcctatagctcaatggcggagcaggggactcataatcccttggttgcaggttcgagtcctgctgggcccaccagagatgacaaggccggatgcttcctgcacccggccttttttctatatgctgttcttaggtgccgcctagtacaccatgcccatggtctcgcgcacctcgtcgagcgtggcgtccgcgatctcgttggcgcggcggttgccctcgtgcagcacgtcctcgatatagtccaggtcgcccagcagctcctcgcggcgcgcgcggatgggggccaggtaggcgttcacgctctcggtgacgtacttcttgagcgtgcccgacccgccgtcgcctatctcggcggcgatgtcggcctccgtgcggcccgtgcagagcgctgccgtggtgagcagcgccgacacgccggggcggccttcggggtcgtaggtgatgttccggtcggcgtcggtctgcgacttcttgatgagcttcgccgtctcggcgtcggtcgccgacaggctgatggcgttgccgtagctcttcgacatcttgcggccgtccaggccggggatggccggcgcgtcgttcagcaggccgtcgggctcggggaacacgtggccgtagcgctcgttgaagcggcgggctatctggcgcgtctgctcgatgtggggcatctggtccttgcccacgggcacgatgttgcccttgcagaacaggatgtcgcacgcctggtgcacggggtaggtgagcagaaggcccgtgagcgcgtggcccgaggcgtcctgctcggccttcaccgtggggttgcgcagaagctcggactcggtgacgagcgacaggaacggcagcatgagctggttcagggccggcaccgccgaatgcgtgaagatgatggtcttttcgggatcgatgccgcaagccaggtagtccaccaccatgttgcgcacgttgtcggcgatgttcgccgtggtgtcgcggtcggtgatcacctggtagtcggcgatgatgatgcgcgtggcgatgcccaggtcctgcagcgccacgcgctcgcggatagtgccgaagtagtggccaaggtgcagacgcccggtggggcggtcgccggtcaacatggtgtacttctcggggtgctcgggcaggtccgcgcggatctcgtcggagcgcttgcggctggcttcgtagctgtcgatgctcatgggttcaagtctctttcatgtatcatgcgggcaaaacgttgccgtccagtatagcggttcttccgcgcggccgctcgcggttcctcttgccgcttgcggtttcatccgttgcacagcgtgggacgatcatctatatttagtaatgctaagtaacagaaacgaggagcgtcgatgcagcagaggttcgcccagcagatgaagaagggcgcgctggacatgctcgtgctgaaactgctcgagcacgaggagaagtacggctaccagcttatcggcgagctgtgcgagcgctcggacggcaccgtgtcgctgaaggagggcacgctgtaccccattctgtaccggatggaggacaacggcctggtggcgagccgcctagcggccaaaacggcgaaagagcccgcgcgcaagtactacgccatcacggagcagggccgagaggcgctggacgagatgtacgcggtatggaacgagttcgacggatgcgtgcggtcgatcatggaggaggagcgatgaacgagaaggcctatgcgaaagcggtggcgaagcgcctggcgtgctcgaaggcgcgccgcgacgagttcgtgcacgacctggagtccgacatctcctctgcgctcgccgcgggcgaggcgtgggagcaggtggaggcccgtatgggcgacccgcgcgaggtcgcccgcgagttcaacgagggcttgtccgagggcgagctcgccgccggcaggaagcgccgtcgtctaagggcggccggcgtcgcggccgtcgcggtggtcgtggtggtggcggtgctcgcggcggccgcctggtgggtgttcccgaaggcgacgtcgcccggcgctgcaaccgggctcgacgagcaggctgccgtggagcgtgcgcaggaggttgtgacgctgctcgacgcggacgatttcgacgccctgcgcgcgctgtcggacgaaaccatggcgaaggtcctgtccaaggagggtatcgaccaggcccgtgccgccgtcggcgagaactggggcgcgttcgtgtcgttcggtaaagcgtacgtgtccgatctcacccaagggggcgtgaccggaaccgtggtgcgcatggctgccgtatacgagaacgccacggtcgtctaccagatatcgctcaactcggatgcgcagctcatcggcatctatttcggctaaggtctgccggggtgctggacggccgcaggtgaaggaggttctgctgtggagtggtcgatcgtggcagaggcggcatgcggcgtggccgtgtcagctgctctcactgtggggatctgacgaaaggggccttccatgaacgaagcgttggcgcatctgtcgcgggagcagttggagcagctagccgaggcatacgcaaaaaacgccatcgcgctcgacggggtgtggttccaggcgacggagcgcgacgttggcatggaggcggccatgcgctacgactgcgaggcgtgggagcgcttcgggctcaccgaggcgcggcggctcaaggcgctgctggggctgggggagcatcccggcctggacggcctggccgcagcgttgctgctgcgcttccagtcggtggcgaacgcgtgcaccgtgcgccgtgaggagggcgccgtagtgtaccgcatcgagacgtgccgcgtgcagcaggcgcgccatggaaaagggttgggctaccatccctgcaagcaagtgggagtcgtggagcatccggcgttcgcccgcggcatcgacgagcgtctgtcctgcacctgcctgagctgttatcctaacgtaaccgatgacacctgcagctgcgcttggcgtttcaccctgcgagtgccctagagaggagcggggatgttcgaatggctgggaatcgagttggatccgagcgggctggcgatcctcgcaaacccgataggctttttcctcgtgttctcgtttcctctcatgatcttcgcggccttcctggtctcggagcttgtcggcccgcttgagcgtttggtcagaaggagcgaaatgctggggcgcctcttggacaacgcgatagagaaggggccgcgggagggctggtcgggctatatactcgcagccgtcacggtgatatccctcttcggcctcgccttttgggcgttctgctatacaggtggtgcatgaggcaggacaaacctggaaactcccattatcgaggtcaggatagcctgccgatattcatttgcgtatgatttgcggacgggccgtcgtctgttgggaaatgaaaaggccagaagcaagatatgcttctggcctgcaagtttctggtggtcgctacaggatttgaacctgtgacccccgccgtgtgaaggcgatgctctcccgctgagccaagcgaccgttttcgctgcgttgtcgcaacgtgcttggatattctaacggtagttccgtcattgtgcaagggctgatttcgagctcttgccgggaatcttcaaaacttgccgacaactgggtgctccgccgtgggcgagggctctcatgcgtcgccgcggatcacgcgctcggcggccagcatctcctcgtagttctctatcttggcgttcaggcgatcgaggccggcctgcatgtcggcgatgcgcttctccaccagctcgcgctgttcctccagcagcgtcttgcgcgcagttgccgtttgctcgccctgctcgaacagctgcatgtactcgatgagcgcctcgatggacacgccggcaccgcgcatgcacttgacgaactgcacgcgtgcgcaatcctgctcgctgtagtcgcgtatgccgctcgcattgcgcgtgactcctggcaagaggccgatgcgctcgtaatagcgcagggtgtcggcgctcaacccgtactgcttgctcacttccgcgatcttcatcttgtggctcctttcccgctccgccccgcattgaagcacatggagcacactccaagtcaaggggttgcgcgaaaacgccccgacgaggctgcggcggcgctactggtagaagtgccggacgatgaacgacaccatgatgatgaaccccgcggccagaagcgagccgagtgtgcgatgatccgccttcgaggcggtgcgggctgcgtctgccggatggaggtcggcgatgttggtgttcggattcctggtcatgcgaagtgcctcccatcgtgctcgttcgtggttgctttctgggatcggcgaagccgttagccgcacgcggcctcttccgctatcatagacaagttgcgccccctggccgaccgcgcatcgccgggcgggcgggcaaaggcgctgccggctcctccggcgccgcgatgaaacctgcgacagaaagcacgcacgcaccatgatcatgcagctcgaacatatagcgaagtcgttcggagggcgccagctcttccacgacgtgacgttccgccttgaggagtacgagcgcctggcgctcgtgggccccaacggcgccggcaagaccaccatgctcaacatcatatccggccaggaggacgccgacgagggccgcgtgctgttcgccaagggcgcgcgcgtgggctacctggagcaggaggccatcgagatggccgaccagcccatcttcgaggaggtcatgtcctcccaggtagaggtgctggaagccgagcggcgcctctacaagctggagcacgagctgggtgaggacccgacgccgcagcagctggccgccgccgggcgcgcccgcgacgcctacgaggtgctggggggctacaccatcgaggcgaaggtgcgcagcgtcatgttcggcctcgggttcaaggaggccgacctgcgccgctccaccacggagttctcgggtggctggcagatgcgcatcgcgctggcgaagctgctcatccgcaaccccgaggtgctgctgctcgacgagcccacgaaccacctggacctggagagcgtgaagtggctcgagggcttcctgcgcggctacgccggcaccgtggtggtggtgagccacgaccgcgcgttcatggacaacatggtggaccgcgtggccgaggtggacaacggccaggtgaacctttacaagggcaactactcggactacctgcgcatccgcgaggagcgcctggagcgcctgcgcgccgaggccgccaagcaggccgaggagatcgcccatatggaggcgttcgtcgagaagttccgctataaggccacgaagtccaagcaggtgcaggatcgcgtgaagaagctggagaagatcaagcgcatcgagcttcccgaggagaagaagaccgtgcacttcaacttcaagcagcccccgcgcaccggcgacgaggtggtgcgcgcccgcggcctggtgaagcgtttcggcgagaagacggtgtacgacggcttcgacttcaccatgtaccgcggcgacaagatagcgctcgtgggccccaacggcgcgggaaagtccacgctgctgaagatggtggccggcgcgcttgcgcccgacgcgggcaccatcgagtacggcgtgcatgtgacgaagacgtactacgcgcagcaccagctggaggagctgcaccccggcaacaccgtgttcgaggagctggaccgcgtggcgcccggctggaccatctcccaggtgcgcacgctcctgggcgcgttcctgttcacgggcgacgcggtggacaagcgcgtgagcgtgctttccggcggcgagaagagccgcttggcgctggcgaagatgctcgtggcgccccggccgctgctgtgcctggacgagcccacgaaccacctggacattgcgagcgccgacatcctggagcaggcgctcaaggcgttcgagggcaccatactcttcatcacgcacgaccgccaccttatcaagggcgtggcgaaccgcatcgtggaggtggagccgggccgcgtgaccaactacgacggcgactacgactactacctgttcaagagcggccagctggacggccccgcgcccgaggagcgctcgctcgtggacgaggtcatgggggagggcggccctggcaagggcgaaggcggcaaggccgcgaaggggccaggcggatccggctccaagacggtggtgaacgtgaaccgccgcgatcgcccggcctcggcagcggtcgccgccgcgaaacccgccggccagcccgtcgagctcacggccccgcgtgagagcgcgcccaagaccaaggagcagaagcgccgcgaggccgaggcgcgcaaccgcgcctacgccgcgctgaagaaccaccgcaagcgcatcgccgagctggatcgccagatggagcgcgacaacgcgcgcatggcggagctcctggagctcatggccgacccggacttctacatcaacgaggatgcctcgtccgacgccgtggccgagcacgccaagatcaagcagcgcttggccgccgccgaggaggagtggttctcgctcaccgaggagttggaggaagagatggccaggcaggcggaggggctgtgagcgagccgttgaacatcgtcctcgtagagccggagattccgcagaacacgggcaacatcgcgcggacgtgcgcctgcacgggcacgcggctgcaccttgtggagccgatgggcttccgcctcacgagcaagcagctcgcgcgtgccggctgtgactactgggacgaggttgaacttgtacgctggccgtgcgccgaagcgttcttcgaggcgcacggcggctccgagctgtatctgttcaccggccaggcgcaccgctccttcgccgaggtctcctacgggccgggcgctttcctcgtgttcggccgcgagagccgcggcctgggcttggggatcatcgaggcgcatgcgaaccgctgcgtgcgcatccccatgcgagagggcctgcgcagcctcaacctctccaacgccgcggccgtggcggtctacgaggcccttcgccagcagggttactgcggtctcggagggtgcgccggcgcatgaggcgcccgcccgcggtggcgggttcccctgcctgctgctgacgcagaaaaggcccttctttgccaaaaacgagccggtttggcaaccttgtcggggatgtttgggtcttttcgaggcccagcggcccgcaaggagagcgtttgcccaggtcggttttctttctcttaaacctatctttcctgtatggattgccaaaccggcccgtttttggcaccggggtccttattttgcgtcaatggttctcaaagtgcgccttacctttggctgcaaacgtcgcgcgcaccatggcgtgccaacgcggaagggccgcgcttgatcatcgccttccttgcgccgcgacatgcgcctgtgcgagcaaggggcctgccgatgcggtgctgcgagcatcttcgccgtcggcgcacgccgagcaggttcgccctggtgccgtaccgcgcgcccgcgcgagggaacctagtacgcgctccagccgccgtcgatggtgagcgtctcgccgttgatgaacccggcctggtcggaggccaggaacaaggcggcggcggatatctcctcgggagtgccggagcgggtggcgccggcgtagcccgtcgtggccttcgccatgccgcgctcgctgggctggcgcatgcccacgccgatgttcgtctgcgtgttgccggggcagatggcgttgcagcggatgccggtgtcggcgtacatgaacgcgacgttcttcgtcaggcccacgacggcgaacttcgaggccgtataggcgcagccgccgcgcccggcgcacaggcccgacagcgacgcggtgttgatgatgacgccgccttcgccgcggtcgaggaaatagcgcacggccttgcgggtgccgtacatgacgctgttgaggttcaccctcatcaggcgctcccacacgtcgtcgtccatctcggcgatgggcagcaggttgtccatgatgccggcgttgttcacgatgacgtccatctggccgaacgtctgcacggcgcggtcgaccatgccctcaacggcgtcgcggtccgacacgtcgaccttgacgacgtccagcttgtcgccgtacgcggcgaactcctgcttgagcgcggcgagggcctcctcgttgaggtcggcggccaggcagttcgcgcccgcctccaggaaacgctggacgatgctcttgccgatgccggacgcgcctccggtgatgacggcggtctggcctgcgaggatagggctgggaaggatgtctggcatgctgggtgctccttttcggtagggcgggcgccgtaagagaggcgggatgcgaagcggccttgcatctgtcatgcggttgcgaaaccgcatccgcagggtaccatgcccgctgcttcatatcgggtcttcgatggcaggcggtgtttagggcgtctgctgcggatagccaccaacgcgagcggtgggaggcaggcctccagcggcaggcggagtgaaccatgatgcggctgacccgcattctgccgttggaacctgacgcttccgccgtgcgtcaactcctccggctccttgaatgcccgcaaactccgcctggttggatataatcgattgtttccgcctcggaacggcgctctgaatagtatcatgggataatgcgatggcgcgcagaagcctctggatgcgacgcctcggcaacggcgagcagatccgatagtgcgctttggggttgggccattatggagattcaacagttgcgttatttcctggcggcggcgaaccactcgagcttcgcgcgggcggcagggcagtgcttcacgtcgcgtcagaacatcgcccattcggttaatgctttggagcgcgagctgaacctccccctcttcgagcggcggggcaacagcgtggtcgtcacgcctgcaggccaagaggtcgcgggtcgtgtcgacgagatactgagtcgcgttgacgcgctgcaggcgctgtcggtcggccaagtgcctgcagaggcagggctgcgcgcggcggtgacgtacaaccttctggctcgggttccggaaaaggtcgagtcgtacctctaccagttcgatcggggcatcaaactgctcgaggttggctgcgaggactgctaccatgctatctgcaccgacgaagctgacgtgggcctggccctgtgcatgcagcgcgattttcccgaatgtggcttcgaggaggtcaaccgcctgaaggcgtacgtcctcgtaaacgaaatgtcccctctggctcgaagatcccagctctccgtcttcgacttgaaggatcagcgtatagcgcttatgtcggagtcgtcctttcaatacgagccgcttttctcccagctgggttccctgggctacgatttctccaacctgtccatcgcagcgaccgcctcggggctctatgggataaagcgcaacgaggcagtgggcatcgcgacgagctactttgtcgagagccttcccgagggcatgcgcgccgtcccgttcgacgatacccggtacgactggtgcatctacgccttgtatccgaagcggtcgaaccgcttggcaaccatcatgcggttcattcaagggcttaggaagagctacctcgacgcataggctcaaatttgcttggttgacaaacatggtttgtcgaccctcttcgaaaccacgttagcgacagatttcaggcatcttttccaacggatactcccaccgcacaatggactcaggtcgaaaaagcgtacgcagacccgaattgccaactattgcacgaggtgaggaggaaaacggtgactgagtggaaaagggaagagggggaggagacgatcttccgtacctgcgcatggtcgcctccggggtgccaccccgtagggtgcggactgcaggtccatgtgaagaacggcgtcgtggtggaggtggagggcgaccccgagcatcccatcaccaagggcgcgctgtgccctcgctgcctggccctgaccgagtacgtctaccatgaggatcgaatcgtccatcccatgaagcgcgcccgggaggaccgcgggctcgacaagtgggagagctgcagctgggaagaggccaccgacctggtggcggatgctgcgcgggagatcatcgagcagtacggcgccgagaccatctgcgtgttcggtggtaccggccgtgaggcgaactattggtacacgcagtgggcgaacctggtgttcggcaccccaaatgccgtttatgcccaggccggctggtcctgctacgggccgcgtatctccaacaccgcgttcatgctgggcggcggctatcccgagatcgactacgcccagaagttcgccgaccgttacgagcacgagggttgggtggcgcccgaggtcgtggtgtgctggggcaaggagccgctgcgctccaaccccgacggcatgtacggccatgccctcatcgagatgatgcgccagtttggcacgaaggtcatctgcgtcgacccgcgcatccactggctgggctcccgctccgagatcgtgctccaggtgaatcccggcaccgacacggccatggccatggcctggatctacgtcatggacaaggaaggcctggtcgaccgcgagtggatagatgcctggacctacggctatgacgagctcgtagagcgttgccagaccatgccgccttccaaggccgccgaaatatgcggtgtccccgaagacctcatctggaaggccgcccggatgtacggctccgcgcgcccttcggcgctcgcctggggccttgcagtcgacgagaacccgaacggcacccagctcggccagtgcctcatcgcgctcatgaccatcaccggcttcatcgacgcccctggtggcacgacgctcggcgtgggcgacgacggcggcaaccgcgtgcacgacggaggtggtatcgacgcaagccagcgcatcgaggacgagaacgactccacgcttatgctggcgctgaagaacggcatcatgacccaggagatgtgggacactaagcgtatcggcgtggacaagtaccctgcggtcggatccatcatgtggacggcgcaccccgacgagtttctgaaggcgctcgagaccgaacagccctacaaggtgcatatggccggcttcgtctcctccaacccggtcggcacggccatctccgccgagccgcagcgctggtacaaggcgctcaagcagctcgacttcaattacgcctgcgactgcttcatgaacccgactatcatgagctgctgcgacgtggtgttcccggtcgcctccaccatcgagcacgacggcatggtggtcacgcactatgcctccaacgcctcgttctacggtgcccagaacaagtgcgtgcaggtgggcgagtgcaagagcgacatcgagatcatgatgatggtgggaaagaagctccatcccgagttctggaaccgcttcgagacccaggaagactacgacaacttccatgtcatgcgcagctggctgcccttccgggagctgcgcgacaaggtggtcgtcatgtccgaggaaccctattacaagtacaagatcggcaagctgcgtcctgacgggcagcccgggtttcccaccaccaccggccgtgtcgagctctactcgctcatgtaccagaactggggcgaggatccgctgccgtattacgagcctccggtctacagccccggcgccttgccggagctcggccgggaatacccgctgatgatgatcaccggcgctcgccagcaggagttcttccactcagagcataagcaggttccgagcctgcgccagctcactccttggcctatggtcgacatcaacgtatacgatgccgagacctacggcatagaggagggcgactgggtggagatatcctccccctatgggagcatccgacagctcgcgcgcgtggttcccaccatgaagaagggcgttgtccactgcatgcacggcttctggtaccccgaggagaacggggaagtgcccaacctctacggaaactggaagtccaacgtcaacatgctgatgcccaatagcgtgaacggcaagctcggcttcggcaacacgttcaagcagatgatggtgagcatcaagagggtcgacggccgtggcggcccgaacgatccggatgccaacggcatcgttctcgagccaagtcgccaagaggagttcacggtccagcaaacatggcgccctgctgacgagtccactgcagtctacctgcagaaatagagaggaggagcaaaccatgacgcaaggtgctttgtacatcgacttcgagtattgctcgggctgccacagctgtgagatcgcctgccgcacgcatctggggctttccaagaccgagaacgggatcaaggttctcgaggatcgtccctaccagcatcccgacggttcctggcactgggacttcatagcctatccgacggagctgtgcgacctctgcgaggatcgcatcgccaagggcaagctgccttcctgcgtgcagtgctgccaggcgaaggtcctggaatacggcacgatcgaggagtgcggccggaagctcctggacaagccaaggaaggccgccgtgttcgttccttagcggtggtgcgcgttcgggcggacggaggggggcgcctactggcgccgcgtccgcccttttcgcctcggggcgtggaatggaagtctcagaggcgagtttttcgcgattcgtcttcacaacgacagggggaattatgaccgagattgctatcgattcctcgattcgggggaagttcggcaaggagtccatgaagcggctgatcgcaataatcgcagcagccgcagtgttctcgttcttccagttcgcctgccctgtgccggaaagcctctcccgcgaggccatgtctgctgtgggcatcctgctctgctgcattatcttgtgggtgacggaagcgcttccgttcatagtcacggttgtgctgatctacgtcctgctgcctatgaccggcgttttgccgtttgccaccaccacactggaaaacggggcggtcgtacagtccgtgttcaaccaatcgagcttgatggttccgatctactgcctgttcatctttgccgtcaccgcagcggtcatggccacgccgatcccgttccgcgttgcaaatgccgttttgaagtggtccaagggggattcgaggaagatcgttgtcggtctcatgatggttacgggcattttctccatgttcatcgccgaccttgcggcatctgccatcttcgtgggcatcagcctctccatcgtcgaggcgaacaacggcgtcaagaagctttccggccttggcaaggccctcacactcggcatcccggccgccgctctcataggcggcatcggcacccctcttggcaactcctccaacatgctggtcataagcatgttggagacggcaatcggttttcatgtgacgtttttgggctggtgcatcgccaacatacccctcgcgcttgcggtaacgttcctatccagcctgtggatagtgagggtcttcaagctcgaggatatcaaacaagacgcctacctggtggtagagtcgaagctcgaaggcatccagggaatcaccgtcaaggaaatcaagctcatcgtctggtatgtcattgccttcggcttgatgatagcaagcacgtggcttccgcagatcaattccatcatggtcgcgctgatcttctgcgttctcgccttcttgcccgggctgaacctgctgaccaaaaaggagttctacgaaagcataccctgggaggtcatcatgatggtcgtaggcatccaggtgctggccaccggcctcgtgggaaccggagtggccacgtggttcgtcaacacgctgctcgttggggtggaagcgtggccggccctgctcatcgtgctcgtcatgtgcttggtaaccttggttctccacctgttcatccccatcggccctcccgtcatctctgttgccattcccctgttggttgccgtggtgtccgctgtcaacatggctgccggcagcatggtcgtcaatcctggcatcgtggcatgcatcggcggcggcctgggtgtggtgagcacgttcttcccgttggattccatcatcctgatcggctacgacaaaggttggatctccatggccgagtatgtgaggaaatcctgggcgccgacggtcatcctcttggtcgcgagcgtcatctggcttcccatcatcagcggcgtcgcgttccctgcttaaggccgaggggcgcttgtcgccctggccttaagcagggacggccgggggagcggttgctcggcgccggagttaaaaactacccgaaaggaaagactatgtgctttagacctgcgggcgcttctgctggcaagacgtgtcccgaatgcggaaccgccaatgcgtccatcgataccgcctgcgtcaaatgcggggcggagttgcctagccccgaggggcctggcttgccgggcgccttgggagcacccggcacccttggagcgccgatgcctcccggagtcccgggagctccggtggcgccgagcgtccccggggtgtccacggctccttccactcctgggattccgggagcacccaagtccccaaaacctcgggcatgatgcggcgtgaaggagggcgggtgaaggaagggcgggctgaaaaaaaggggggcgtcgtggcaagtctatgcggagcgttctgctcgttctgcggaaggtgtggtaggaaatttgaaaaggagctgaagattgcaaagccgcaggatgtgcccgcccctggggtgccggacaaggcgaagggccttgtcaaagcgagcatgcgaaaccgccccgggcgcagcggctccgagaatggcggctaaggaaggcaggcgggcggctctggttctgcgccggctacgagcaggctgcattcgctccgactggcgcctccctgccttctctccctcctgccgggtccccctgcgggagtttgtgaagtttccccggctgggacggcgggtgcggccctttgcgctagactggtcgcatcatgatttcgataccttaccttatctgctccatactaagcttcgtgccggccatcgtgtgccacgaggcttgccacggcttcgccgcctacaagctgggcgatcccacggcccagcgtgccgggcgcctgtcgctgaacccgctcaagcacatcgatcccttcggcacggtcatcatgccgcttctgctcatggccatgaacatgcccgttttcggctacgcgaagcccgtgccctacaacccggcctacttcaaggacgcgcgcaagggcgaccttatcgtggggctggcgggcccggcggccaacctcgcgctggccatcttgggcgcgctcgtcttcacggcggtgtcgctgctgctgccggtgaacgtgctggcgcaaaacgacctgttctactacttctacactatgttcctccccatgttctcgctcatcaacctgtacctcatgttcttcaacctgctgcccatcccgccgctcgacggctcgtccattttcgcgttcttcctgccgaagaagtacctgccccagtattacaaggtgcagcgctatgcgatgccggtgttcctcgtcgtggtactcctcgtgccgtacgtgctgcacttcaaccccatcggcatctacctggacgtcacggcgggcaacgtgttcgacctgctgttctcgttcgccggatagcggggcgggcgtgtcgtacaaggttcgcatagacagcttcgaggggccgttcgacctcttgctctacctggtcagccgccagaaggtggacataggggccatctccatcacgcagatcgccgaccagtacctggccgaggtgggccgtatggacaatctcgacctcgacgtggcgagcgactttctgctggtggcgtccacgctgctggagatcaaggccgagagcctcatcccgcgtgaccgcgacgccgtggacgacgacatcgccgagctcgcgcccagcgaggcgcgcgatatgctggtggaccggctgctcgcgtacaagcagttcaagaacgcggcctccacgctgctcgcacgcttcttggccgagggccgcatgcacgcgcgcccgttcgggccggacgcgtgcttcctgaacctcatgcccgactacctgaaggacgtgacgttggacggcctggcgctcctggctgcccaggcctacgcgcgccgcgaggtgttcctgctggagtccgagcacatcgccgcgaagcccatcccggtggaggtgcacgtgcgggccatccaccagcgcatcgtgaacaagaagcgcctgcggttctcggagctcgtggacgagggcacgccgctgcccgtggtggtggtgacgtttttggcagtgctggagctgtacaagcgcgccatggtgaagatcgagcagcaggagcagttcggcgacatcgacatccgctacatcgagggctcgggcgagctcgtgctcaccggcgacgacgcgctgacctcggtaggggaagagtagggaaaggttggacccgtgttccagggattgcaggaaagccagctggcgggcgccctcgaggcgctcttgttcgtgaccgacgagccggttggcaccatcgcgctcgccgacatgctggaggttgagccggccgacgtggagcgcgcgctcgtgggcttgcgcacgcgcttcgagggcgaggagcgcggcgtgcagctgcgcgaggtggccggcggatggcgcctgtacacgcacccggtgtaccacgagctggtggagaagtacgtgctgtcgtgggatacgcggaagctctcgcaggccgccatggagacgctcgccatcgtggcgtactcgcagcccgtcacgcgcgccggcgtggccagcgtgcgcggcgtgaactcggacagctccatcaactcgctggtggagaagggcctcgtgcgcgaggcgggcacggccgacgcgccgggcagccccaccctctacgccacgacgcgcgccttcctggagaagttcggtttgcgcagcgtggccgacctgcccgacctggaccagttcgcgcccgacgacgacacgcgcgcgttcatccgcgagcgcctgagcgccacgcgcgagcccgtgcgcgtggcggaagacgtccgcattggcggcgcggaggcgaacgcttccgacgacggcttcgacggtgtggagttcgacttcgacggggagggggaggcggcggtgacgctgggcgagcagctgggcggctcggccggcgccggcgccggccaaacgctcttcgcccgcatggacgaggctgccgaggacgccgcgggcgaggcggcccaaagcctgctcgccgaggccatggcctcgagcctcgggcttgtggagaagatcgacttcgactgcctgacgttcgagacggaagatgaataatcggttccgccgttctgccgaacggcggaacgggccgacgctgcgggcttccgcggcacccggtctcgacgctttttcgcttgccctcgcgtgcggaagcacgctcggccgcgaaacgcgccgatctcgggcaccacgaaagccctcgctgactttggaggacctgtgagcgaagaaaacgacaacccccgcatcgttcccatgcgtctgcagaagttccttgcgcgcgccggggcggccagccgccggggctcggagaacctcatgacggccgggcgcgtcacggttaacggcgaggtggtcacggagctgggcagcaaggtggatccgctcgtcgacgaggtggcggtggacggtcgcgtcgtgcgcctggcggacggcccggtcacgctcatgctgcacaagccggccggttacgttaccaccatgtccgacccgcagggtcgccccaccgtggcggagctcgtgcccgcagccgagcatccgggcctgttccccatcgggcggctcgatcgcgacaccacgggtttgctgctgttctccaccgacggcgagctggggcatgcgctcttgcgcccgcgcggccatgtggagaaggtgtacacggcgctcgtggaaggtcggccgagtgcggcccagctcgagcacctgcgcgagggcatcgagttggacgacggccccacgctgccggcgcgggtagcgctcgtggagggcgaggcggccgcagcggcgctggcggtcctcgatgtgccgcctgccgcgccggagggggcgtcgcgccagtacgcccgcgcgtgctcggcgagggcacgcgaccgctcgatcgtgcgcataggcctgcacgaggggcgcaagcgccaggtgaggcgcatgctggccgccatcgggcacccggtgctcgcgctgcaccgcgatgcgttcggccccgtggagctgggcggcctgccgcgcggcgagcggcgcgtgctggagcctgccgaggtgcaggcgctcgagcgcgccgcgggccggtgacgggcggccgttggtcggtctataataatgttagaatggtcaggccgggggagcggcgccgtgccgtgccctggcctcacgacaggcaggaagggcggcatcgtcccatgatcgaacctcataccgaacaatccggccaagccgcgttcaggcatatcgtcatcgtgggcctcggcctggtgggcgcctcgttcgccgctgccgtgcgcgccgcgcagccggacatccggctctccggcgtggatgtggacgaccgcacgcgcgccgtcgcgctcgagcgcggttgggtcgacgccgcctgggagccggacgacccggcgttcgagcgctccgtgcgcgaaggctgcgacctcgtggtgctggccgcccccgtggatgtggtggagcagtacttcgagcggctggcggcctgggacttcggcggcatcgtcaccgacaccgcctccacgaaggcgcgcatcgcggcctgcgcctctcgtctgctgccgtatcccgagaactacgtgccgggccatcctatggcaggctccgagaggaacggtatcgacggtgcccgtgccgacctgttccagggcgcgcactggatactctgtcccgacgcggctacgccggccgagcacttcccgcgcctgcacgagctggtaacgtcgctcggcgcccgcgtgatcgccctgccgcgcgaggaccatgacgaggcggtggccgtggtgagccacgtgccgcatatcatggcctcgtcgcttgtgcagctggcctgccgccatgccgacgaccagcaggcgctcatgcgcctggcggccggcggcttcaaggataccacccgcatcgccgccggctcgccggagctgtggtgcggcatcgccttcgacaacgccgcggcgctcggggagggcctcgcggaggtgcagggcatcatcggatcgttcgccgaggcgcttgcctccggcgaccgcgcccgcatgaccgcactgctcgccgaggccgccgaggcacggcgggcgcttcccgcagcatgggtgccctcgaccgagaagctgctcgaggtgcgcatccccatggaggaccgcaccggcgtcgtggccgaggttaccaccatcgccagctccgtgggctgcaacatccagtccatcgagatcgaccatataacggccgacagcgccgtcttgagcctcgtgctcaccgacgagggcgatgtcggtcagctgtcagcccagctcatcaacgccggtttctcggtgtcgttcagtccgctttcggccaaggagcatacccatgtcgcatgagcccgtcgcatcagccgcatccgcaccgtctctgcagcccgaggtcggccgcacggtcatcgagcctttgcccgcgccgttgcgcggcgccgccaccgtgccgggcgacaagtccatctcgcaccgcgccgtgctgttcgcggccatggccgagggcacctcgcgcgtgtccggcgtgctggactccgaggacgtgcgctcgtccatcaaggcggtgagccagctcggtgcccgggtctcgctagaacggcagcctgacggcagcctggccggcggcatcacgggctggggtgcctccggcccgcgcaagccggacgctcccatcgactgcggcaactccgggaccacggcgcgcctgctcatgggcgtgctcgcgccgtgggacgtgcccgtggagatcacgggcgacgattcgctccagcgtcgccccatgcgccgcatcaccgcgccgctcatgaagatgggcgcgcgcttcgagcccggcggccgcgagacgctgcctataaccgaggtgggcacgcgtgacctgcgcgcggtcacctatgatgcacccatggcgtcggcccagctcaaaaccgcagtgctgctggcgggcgtctacgcgcgcggcacgaccaccttgaacgagcccgccccgtcgcgcaaccacaccgagctgatgctgcccgagttcggcgtgcccaccacggcagccgaccgcacggccagcgtgaccggcccccgcgtgctccaggcggccgaggtgcgcgttccaggcgacccgtcctcggccgcgttcctcgtgtgcgccgcggtgctcaagcccggcagctccctccaggtggagaacgtgagcctgaacacggcgcgcatcggcttcacccgcacgctcgagcgcatgggcgccgacgtggcggtgcgccacgcgggggcggcgggcaaggagccctacggcatgatagcggcgtgccacaccccgagcctccatggctgcgaggtgccggccgagaagatcgccgccatcgtcgacgaggttccggtgctcgcgctcgtggcggcgcacgcccgcggcgtgacggtgttccgcgaggtgggcgagctgcgcgtgaaggagaccgaccgcctcgcggccgtcgtggagggcctcggccagctgggcgtggaggcctacattgacggcaacgacctctatgtggagggccagcccggcctgcgcgcccctgcgggcctcgtgttcgactcgcacggcgaccaccgtctcgccatgacgtgggcgctcgtgggcctcacgggcggcgtccccgtagaagtggagaacttcgactccgttaagatcagctatccccggttcctggacgatatcgaaaggttggctcgatgatcatcgccatagacggccccagcggggccggaaagtccacggtcgcgaaggccgtggcgaagaagctcggcttctcctgcctcgacacgggcgccatgtaccgcgccgtggcgtggcgtgccctgcaggacggcgtgccgttcgacgacgatgcagcgctcggtcggctggcccgtacgcacgacatcgcgttcgggcacgagccgggagacccggcccccaaaagcgtgtccatcggcggcgaggacgtcacgcgcgccatccgcacggccgagatcgaccgcgccgtgagtcccgtgtcggccgcgccctccgtgcgcgaggcgctcgtggggcagcagcgccgcatcggccgcgcgggcgattacgtggttgagggccgcgacatcggcacggtggtgttccccgaggcggaggtgaaggtgttcctcaccgcatcggacgaggagcgtgcgcaccgccgcgtgcgccagaacgccgaccgctccatcggctccatcgacttcgacgaggtcctcgccgacctgcggcgccgcgacgagcacgactcctcgcgcgctgcctcgcccctcaagcccgccgaagatgccgtgcgcctcgactccacgagccgttacatcgaagacgtcatcgacgacatcgtggagcttgcgcgcgagagggccgtgcgatgagcctgattctcccgtacgagaagatatgggacatgccccttggcggcacgtccgacgagaagcaggctccccactgggcaggcaaccttatctggggattcctcgtgttcgtgttcaagatatgcttccgctaccgtgtggacaaccgcaagagcatccgcggtttcgacaaggagagcggcgtggtggtggtggcgaaccacacctcgtttcttgatgtggcgttcatgtacctggcaacgcgcccgcagcagtggctgcgcttcatgggccgtgagagcctgttcgacaatgcccacggcctggtggggcagatcctctcgcgtgtgggcgcgttccccgtcaagcgcgactccgccgaccgcactgccatcaagcgcgcaacgcgcatgctgaagaacgacgagatcgtgggcattctgcccgagggcacgcgccgcggcaagggcactaagacgcccgagatccattccggcgccgcattcgtcgcgaagatggggaaggcccccatcctgcccatgaccgtgcgcaacgccgagaacgtgaagaggaaaggcgagcgcctgcgcttccccaagatcaccatcgagtacggcaaccccctgctcgtggaggacttcgacttcctgccgaaggaggaccgcctggagggctgcacgtggtacgccatgcgcgagtgcttcgcgctgtcgatgcgcgtgccgcgcgagcaggtggacatgcccgcgctgttccccggagggcgcgacttcacggccgtgttcgaggaacatcccgtgcccgagcacaccacggccgaggtcgtggtgggcatccgcgcgaagcgcgccgccaaggccggggtttccgccgtgccggccggggagcgctcgtgaaggtggtgcgcgccgcgtacgccggcgcctgctacggcgtgcagcgcgcgctcgacctggcgctcaaggctgtcgaagacggggggtgcgcctacacgctgggcccgctcatccacaacccgcaggtggtggcgcagctggcggagtgcggcgtgcgggccgtcgacagcgtggaggacgtggcgggcgccggcacggtggtcatccgcagccacggcgtgacgcccgaggtgaagcggtcggtggcggcgtgcggtctgccgctcgtggacgccacgtgcccgcacgtggcgcgtgcccagcgtgcggcggccgaccttgccgagcagggccgccacgtggtggtggtgggagaggagggccaccccgaggtggaagggcttgtggcgtgcgcgcgcgaggccggcgcgccggtgagcgtggtggccggcccagatgatctgccggagacgctcgaaggccccgtgggcgtcgtcgtgcagacaacccagacgcgcgaagccctggacgccgtcgtggctgcgctcgaggagcgcggagtccagctgctcgtgaagaacaccatctgctttgccacgcgccagcgccaggaagccgccgccgccctcgccggcgaggtggatgccatggtggtcatcggcggccgcaactcgtcgaacaccacgcgccttgccgacatctgcgccgccgcctgcccccgcacccaccatgtggagtcgcccgacgagatcgaccccgcctggctcgccggctgcgccgccgtcggcgtcactgccggcgcctcgacccccgaagagcagatagaggctgtgacgacgttgctggaggcgttgtagcgggctcccggcaggtcccgccttcccgcgtcctccactgaaacccgctccgcccccgcccgagctccgcctccccgggcctgcgccctctcgaaaagaggcaggcgagaatattttacctccccccgcctgcgcaaacgccctcccggagcccccgccccgaagattttccgaaacaccccttgccaggccgcggcggggagcgtattatattcgggctgcgttttcgaggagggcgcggccccggggcctcccggacggactcggaacgaaagttcctgaaaaaagtccttgacaggatggcaacgggaaggtaaagtatctccttgcgccgctcgcccggaagggaggcggcgaggccccccggaaggggaggcgggaaccttgaaaaccggatattgcgagatgaatcgaatcgagagatgcccgccaggcgagcccagcccaccgaagggccgggggagccggcgaaaaccaagatcgaacagatgcggcagcgatgccgctctcttcaaacggagagtttgatcctggctcaggatgaacgctggcggcgtgcctaacacatgcaagtcgaacgattaaggcgccttcgggcgcgaatagagtggcgaacgggtgagtaacacgtgaccaacctgcccccctccccgggataacgcgaggaaacccgcgctaataccggatactccgcccctcccgcatgggaggggcgggaaagccccgacggagggggatggggtcgcggcccattaggtagacggcggggcaacggcccaccgtgcctgcgatgggtagccgggttgagagaccgaccggccacattgggactgagatacggcccagactcctacgggaggcagcagtggggaattttgcgcaatggggggaaccctgacgcagcaacgccgcgtgcgggacgaaggccttcgggttgtaaaccgctttcagcagggaagaagttgacggtacctgcagaagaagccccggctaactacgtgccagcagccgcggtaatacgtagggggcgagcgttatccggattcattgggcgtaaagcgcgcgtaggcgggcttctaagcggaacctctaacccgagggctcaacccccggccgggttccgaactggaagcctcgagtctggtagaggaagatggaattcccggtgtagcggtggaatgcgcagatatcgggaagaacaccgatggcgaaggcagtcttctgggccgcgactgacgctgaggcgcgaaagctgggggagcgaacaggattagataccctggtagtcccagccgtaaacgatgggcgctaggtgtggggggatcatccctccgtgccgcagccaacgcattaagcgccccgcctggggagtacggccgcaaggctaaaactcaaaggaattgacgggggcccgcacaagcagcggagcatgtggcttaattcgaagcaacgcgaagaaccttaccagggcttgacatgctggtgaagccggggaaacccggtggccgagaggagccagcgcaggtggtgcatggctgtcgtcagctcgtgtcgtgagatgttgggttaagtcccgcaacgagcgcaacccctgccatatgttgccagcattcagttggggactcatatgggactgccggcgtcaagccggaggaaggtggggacgacgtcaagtcatcatgccctttatgccctgggctgcacacgtgctacaatggccggtacaacgggccgcgacctggcgacaggaagcgaatccctcaaagccggccccagttcggatcggaggctgcaacccgcctccgtgaagtcggagttgctagtaatcgcggatcagcatgccgcggtgaatacgttcccgggccttgtacacaccgcccgtcacaccacccgagtcgtctgcacccgaagccgccggccgaacccgcaaggggcggaggcgtcgaaggtgtggagggtaaggggggtgaagtcgtaacaaggtagccgtaccggaaggtgcggctggatcacctcctttctagggagacacgcaagtgtccggacatggtcgagcttcagctcccatggcctggaagaagattttaaaacctattgattcaagggccctttcggtcgtcgctcgcaatacccggtttcgagggctcccgccctcgaggcgcccgagggcgcccgcgcaccttgacagttgcatagcgaaagcatcgaaatttgagaatcatcgattagtcgaatgattcgcatctgaacgatcgcgaacaagaacgatatggatacctgaattaccttgtaagaagaagatgtcaagggcgcacggcggatgccttggcacaggaagccgatgaaggacgcggcaagccgcgatagtctgcggggaggggcaaacacccttcgatccgcaggtttccgaatgggggaacccagcaggggtcatgccctgctaccccgagctgaatcaaataggctcggaggaggcaacccggggaactgaaacatctaagtacccggaggaacagaaatcaaccgagattgcgcgagtagcggcgagcgaaagcgcaccagcccaaacccatgcacgtgcaagcttgagggcgttgctgcatgcggtgttgtgggaccttcccctcccagggcctcagacctgggacggagttacaaagcgtcgcggtagcggaacggcatggaaaggccggccgcagcgggtaagagccccgtacgcgaaaccccgacgcctccgaggaaggcacccgagtagtgccgggcacgtgaaatccggtgcgaatccggggggaccaccctccaaggctgaatactctcctgtgaccgatagcgaaccagtaccgtgagggaaaggtgaaaagcaccccgagaggggagtgaaacagtacctgaaaccgtgcgcctacaagcagtcggagcactcctgcagtgtgacggcgtgccttttgtagaatgagccagcgagttgcggtaagcggcgaggttaaggttggaaccgagccgcagtgaaagcgagcctttaagatggcgatagagtcgcttgccgcagacgcgaagccgggtgagctatccatgggcaggctgaagcgggggtaagaccccgtggagggccgaacccacttcggttgaaaacggaggggatgacccgtggataggggtgaaaggccaatcaaacccggagatatctcgttctccccgaaatagctttagggctagcctcggtcgttcagtcgcggaggtagagcactggatcttctagggggcttcaccgcctaccgaaaagaaccaaactccgaataccgcgacttaagagaccgggagtcagagcatgtgggctaagctgtgtgctcgagagggaaacagcccagaccgcccgctaaggtccccaagttcatgctgagtggcaaaggatgtgcgtttgcctagacaaccaggatgttggcttagaagcagccatgcatttaaagagtgcgtaacagctcactggtcaagtggacatgcgccgacaattcacggggctaagcatgacaccgaagcggcggactgatctatcagtggtaggggagcttcccatggggggcgaagccgaggggcgaccctcggtggaccgcatgggagtgagaatgctggcatgagtaacgagagaggggcgagaaacccctccgccgtaagcctaagggttcctgggcaaggctaatcctcccagggtcagtcgggagctaaggcgaggccggaaggcgtagccgatgcacaacgggtcgacattcccgtaccgctgacgagcgtttgaccgacggggtgacggagaagggtagccgggcggggttctggacgtccccgtgaaagcgcgtaggggggctcgcatggaaatcagcgagccacatgccccgagacgcgagacgaagccatcaggcgaagtcggcgagcccatgcttccgagaaaaacctctagggagctttgtcggcgcccgtaccaaaaccgacacaggtaggcgggtagaacataccgaggcgatcgggagaaccatggttaaggaactcggcatactggctccgtaacttcgggagaaggagcgccctttccggtgaaggccctcgcggccggagcggggaggggccgcagcgaaacggcccaagcgactgtttatcaaaaacacaggactctgctaagccgcaaggcgacgtatagggtctgacgcctgcccggtgccggaaggttacgcggatgggttagcggaaacgcgaagctctgaagccaagccccggtaaacggcggccgtaactataacggtcctaaggtagcgaaattccttgtcgggtaagttccgacctgcacgaatggcgtaacgatttgggcgctgtctcaaccatggacccggtgaaattgtattattcgtgaagatgcgaattacctgcggaaggacggaaagaccccgtgaacctttactgcagcttgacattggtcgttggctcggcgcgtagaggataggcaggaggcttcgaagcggggacgccagttcccgtggagccggccttggaatactgccctcgtcgtgtcggcgacctaacccgtggccgtgatccggcacggggaccgtgtcaggcgggtagtttgactggggcggtcgcctcccaaaatgtaacggaggcgcgcaaaggtccgctcaggacggtcggcaaccgtcccgagagcgcaagagtgcaagcgggcttgactgcgagggccacaacccgagcaggtgcgaaagcaggttctagtgatccggcggcccagagtggaatggccgtcgctcaacggataaaaggtactccggggataacaggctgatcttgcccaagagtccacatcgacggcaaggtttggcacctcgatgtcggctcatcgcatcctggggctgaagtcggtcccaagggtacggctgttcgccgtttaaagcggtacgcgagctgggttcagaacgtcgtgagacagttcggtccctatcctccgcaggcgcaagaagattgaggagatctgcccctagtacgagaggaccggggtggacggacctctggtggagcggttgtcgaccaacggcaccgccgcctagctacgtccggcacggataaccgctgaaagcatctaagtgggaagccgcctccaagatgagtcttctcttcggtaagggcccaggtagaccacctggtcgatagggcgcaggtgcaagcacggcaacgtgctcagccgagcgctactaatagcccgagctcttcttcacaacaggcaggaacgtccgcgttccgcgatcacttcgatgctgcgctatgcgaccgccagggtggcgcggtgccgcctgggcggggcagacaatgcccgcgggagcatcccccgcgagcgcgaccatggaggcggggatcacccgatcccattccgaactcggaagttaagcccgccatcgccgaaagtactgcggagtcagtccgtgggaggatagggcgtcgcgctcgcggaggatgcttttgcattctgcaggcccccggaccgacacggcccgggggcctgtttgcgtgctgggggtcctctcgggggatgcccggtgcttggcaacctgttgcttcggttgttgcattacggtaatgcatatgctaagatgcctgggacggcgaaggaggagcatgcaggcgacgctcaacatacgtatcgatgcgacgctcaaggagcgcggcgaccgtgtgctgcgcgacaacggagtgagcacctcgacggcagtgcgatccttgtgggcgcatatggcgagcacaagggagctccctgattttcttcgcgctgaactcgatcgccaggatggacgcgatcgaaagaaagcctccctcaaggcgtttgcgggcatcgcggagggagcgtgctcgaacatgacagacgcggagatgcgcgcgatgtataggagccgatatgaatagcgtgctcgtggatacgaacgtgtgggtggatatcgcgctcaagcggccggacttcttcgaggactccctcggctccgttatggcgtgcgtcgaggagggtgcgcagatattcgtcgtgggcacgtcggtgaaagacgtgttctattgggctgagaggtcggccggtgccgaggcgggctatcgagccctgagcatgctgttcgatatagccgacgtggcagttgtcgacggtccggtgtgcaagaacgcggtttcgctcgaacgccccgattacgaggaagggatcatctccgcgtgcgctcgggctgagcaggtggaagtcatcgtctcgcgcgacgagacggcgttcaaagacgcctgcgcgcccaagttcacgccgcgcgagttgctctcgcacctcggatacgagatggtcgacttttgattgtattgacgaaagacatggctgcatttttgcacggcgtcgggtttggattgagtttcaatgaggcataatgcggagaatctcctcgatagagcgaaggccctttcatgagcacctatccctccaaggacattgaacgcgcagcatgcacggcggccggtgaggacgtaccaccgcgggcgctcgtgcgcgcggttgcgcccctaagccccgccgacgatgcggggttcgagccggactgctccgtgaccagcgtggacggccgtcccgtgcgcgacctcatcgactggcggtggctcgcgtcggacgatgtgatcgagcttggctacatcgacctcgatggcgaggcgggcgtcgtggagctcgagcgcgagcccggcgaggactggggcctcgagttcgagggcgtcgtgttcgacggtgtcagacaatgccgcaacgcctgcacgttctgcttcatgcgccagctgccgggcgacgtgcggccctcgctcacgctgcgcgacgacgacttccgcctgagcttcctctcgggcacgttcgtcacgttcacgaacctctcggccgccgacgaggcgcgcatcctcgagcagcgcatctcgcctttgcgcgtgtcgctgcacgcctcgaaccccgaggtgcgccgccgcatcatcggccgccacgcggcccacgggctggacgcgctcgaccggctgctggccgcgggcatcgagttccacgcgcagatcgtgctcatgcccgacgagaacgacggcgacgtgctggccgagacgctcgagtgggcctacgcgcggccgggcgttctggacgtgtgcatcgtgccgcttgggttcacgaagcaccagacccgcttcagccgcagcttcaacgacccggccgccgcccgcgcggcgatggagcgcatcgtgcccttccaagagcgcgcgctcgccgagcgcggcacgatgtgggccttcgcggccgacgagttctaccacaatgcctacggccctgcgctgctggagaacctgccaccggcagagcactacggcgacttcggcatgttcgaggacggcgtgggcatcatccgctcgttcgtggacgactgggggcaggccgcagccgcgggcctgcccgcgcgcgctgcggacgcgctgcgtgcggccgggatacgggcgcgctatgtggtcggctgcgccacgcggcacttcctggggccgctcgtggcggcgagccccctcgccggcgtgctcggacccctctacgtgaaaaacgagttcttcggcggcaacgtcgacgtgacggggctcctctgcggctgcgacatagcggcggccgtgcgcggggccgcgcgccaggacgacgaaacgcgcaccctgttcctcctgccgagcgtcatattcaacgacgattcggtgacgctcgatgacatgagtttggaggatatggaaaaggacgcgggcgctccccttgccgtggtatcctgtaacgcgtccgatttcctgcgggagatcgtcgacttggccgggcgcgagagcccggcccctgatcgaaccaacctgtgaggtgccatcatgcccctgccactcgtcgcggtggtcggacggccgaacgtcggcaagtccaccttcgtgaaccgcatagcccaggccgacgaggccatcgtccacgagatgcgcggcgtcacgcgcgaccgctcgtaccatgaggccgactggaacggcgtcgagttcaagctcgtcgacaccggcggtatcgagatgggcgacgacgacgccttccaaggctccatccgcgcgcaggccatcgccggcgcgaacgaggccgacgtcgtcatattcatcgtggacggcaagacggggatcaacgccgacgacgaggccgtcgcgcgcatcctccgcaaggcgggcaagccggtgttcctggtggtgaacaagatggacaccccgaaccgcaccgacgagctgtgggagttctaccagctgggggtgggcgatccctggccggtgtcctccacgcacggccacggcacgggagacctgctcgatgccgtggtggatgagctgcgccgcgcggaggtgcctgccgacgaggaggaggaaccctccatcaacgtggccatcatcggtcgcccgaacgccggcaagtcatcgctcacgaacaagatgacgaagggcgaccgctccatcgtgtccgacgtggcgggcaccacgcgcgacgccatcgacacggccgtcgagcacgacggcaccctctacaccatcgtggacacggcgggcctgcgccgcaagagccagatcgaccaggacgttgagtactacggcttcgtgcgcgccatgcgcgccatcgaccgtgccgacgtggcgctgctcgtcatagactccacgctcggcctgaccgaccaggaccagcgcgtggcgggctatgcggccgagcgcggctgcgccatggtcatcgtgctgaacaagtgggacctggtggagggcccagaggccaaggccgacatccgcgagcgcattgccgatcgcatgacgttcgtgggctatgcgccggtggtggccatctcggcgctcacgggcaagaaagtcgaccgcatctgggaggccatcgacaaggcgtacgagaacttcagccagaccatccccacgaacaagctgaacacgtggctctcgggcatccgcgagacggggcacacggtaagcaacggcaaggccgtgctgcgcatgaagtacgtgacgcagacgggcacgtgcccgccgtacttcacgttcttcgtgaaccggcccgacctggtcacggacaactacgagcgctttttggagaatcgcctgcgcgaggggttcgacctcgtgggcacgccggtgaagctgaagttcaagaagaaggactaaggggtacgatgcaggatctgctagttgcggccgcgctgttcgtcgcggcattcctcctgggctccgtcccgtggggcctcatcatctcgaaggtgttctaccataccgatttgcgcgagcatggctcgggcaacatcggcaccacgaacgccatccgcacgatgggcaaggtgggcggctacgccgtgttcgtgctcgacttcggcaagggcctgctctcgggcgtgctggcctggtggttcagctggcagttcctgccgggcggggggctggtgcccggcgcgctcgtcagctacgacaccatgctggctgtcgcgttcctcggctgcgtgtgggggcatatcttcagtccctggctgggcttcaagggcggcaagggcatcgcggtggccgtgggctgcctgttcgtcacgttcggctgggtgggcgcctgcctggaactgctcatattcatcgtgctggtggtggccacgaagcgcgtgtccatcggctcgatagctgcggcgctgtcctgcccattcttctcgctgtactacttctggggcgactggatcgccgtcgccctgtgcacgctggcggggctgacggtggtgtgggcgcaccgtgggaacatcaagcgattgcgcgacggcaccgagagcaggataggcgacaagaagaaagcgtaggcgcaggatgaagatcgcggttatcggggcggggtcatggggaacggcgctggcgcaggtgctggccggcaacgggcacgacgtgggactgtgggcgcgcaagcccgaagtggcatcggcgatcaacgccgaccaccgcaacccgcgctacctgggcgatgtcacgctgtccgggcgcatcgcggccgcttccgcgtatgaggacgtgctggagggcgcaagcgccgccgtgatcgtcacgccttcgagcatcatgcgcgacgtggcggaccggctggccggcctcgcgggcgaagactttccggtgatagtctgctcgaagggcgtcgaggagggcagcggccttctgccggttgaggtgttcgaggcggagatgggcaacgcggctcgcctggccgttctctccggtcctaacttcgcagccgaggtgatacgcggcatcccgtcgggcaccgtggtagccagccccgacgcggggacggcggcattcttccaggagctgttcgcctccgagaccttccgcacgtacgcgagcgacgacgtggtaggcgtggagctgtgcgccgccttcaagaacgtcatcgccatcgcggtgggcgtgtcctacggaatagggttcggcgacaacacggccgccatgctcatgacacgcgggatcgccgagatgagccgcctcgttgtgcgctgcggcggccaggcgctcacctgcatggggctggcgggcacgggcgacctcgtggccacctgcacctccgagcactcgcgcaaccgccgcttcggcaggcttttggccgagggcgacacgctcgaggggttcacggggcgcacgcacatggtggtggagggcgcgctggcctgccggacgctcaagaccctggccgacgcaacctgtgtggagctgcccatcaccgatgtcgtgcgcagcgtggtgtgggagggtgccgatcctcgcgacgtggccaagacgctcacgagccggcccctcaccaccgagttctacgggctttagggttccgtcggcctgccggccgacggaacgcagccatcgccgcgatctcgggccccacggccggcctcgctgacttgctacgccaaccagggagttcgagagtcgtcgggtctttacgagccaagaacgctcaactgggccatgccgccggcgccgcggacggagcggaccttgcgggcggtgaagcgcagcaggcggtagtcggcgacccagcagccggccccatcatcccagaggtcgtcctcgcaggcctgctccagatcgtcgaggatggcggcgcgctcgtcctcgcggtacaggttcaggctcttcgcgaagaattgctcggcgaaccgccgcaggccctccctcccgccggggagcggggtggggcggtcgaacgcctccatcagctcgacctcgaagccggcgatgcccagcaggcggcggtatgccccctcccttgggaagcagaaccgtcccgagtaatcgccgctgtgcttgcgcagggcttgggtgtagccctcctcgatgcgcgcgatgttgccgtgggcgcccatctcggccacgagcaggccgccgtcgtcgagcacgcccgccacgctcttgaggagcgccacctggtcgggcacccagtggaacacggcgttggagaacgccacgtcgaatgcgccctcgaacggcaaggcgcaggcatcggcctcgacgagggtgacgtcgggatggccgccgcgcgccttctccagcatctcgggcgaggagtcgacgccggtgacggggccgatctcggcgagcgcgtccaggtgcgcccccgtgccgcagcccacgtcgaggatgcgcaggcgctccgcaccctcgccgcgccgggcggcctcgtcgcgcacgagctgcacgagcgccgcgccgtacgcccccacgtagccgtgctgcccgtcgtagagttccgcatcccattccatgttcgtcccgccctctcgattcggttgcattgccgtcaagtatagcgcaggcggggcggtttccttgcctcgtgcagctgggggcattctcctgggcgcggggctcgcggtgggcgcgaggttcgccagccggttgcatgccgcttccttttcgaggcggcgcggcgtgcgccgcctgccctcgagcgtgcctctcaccttgcggaaagggcgcgccctgcgttgcacgccgtcctgcccgggcagggcatgcgggatccccgcccctgctccgccttttctatgagcgcgagggtgcgctttatctaacggggcggtgacaacgcgatgaccgggggcttaccgtcgggggaatcgcgttgcgggacgtgccgtggtggcttaaggtacctcttgtccgaaacgacgaccccctccgctccggaaacggcagcggaccgcatcgagaaggagcacgccatgcccgagctagcaaacccgttcgtcgcgaacgttccgcgcacgatgacgaagcaggagctcgtgcaggctgtgcgcgtggagctgaccggcgagctggaggcccagatgctctacgaggcgcatgcggcggccaccgatgacgaggtggcgcgcaaggtgttcctggacatcgccgacgaggagaaggagcacatgggcgagctgctcgcactgctccagtacctcgacccggccgaggccgggcacctggcggaaggcgtgggcgaagttgagggcatgatggccgagctgggcatcgacaaaagcgtggccgacgatctcatgggatcgtccatacgcaacgacaccggtacccaagaggagctggagtcgggcaggaacagcaagtagaagacaacctattcgagtgacccgtcgtctcgtctctcgtgtgaacccccccctctctctcaaaccttcgacgggcacgtgaagcatgcgcaccttccccttctcctcagtgcgtactgcatggccctcctccggaccccccatccagaggagggtctttttgcgcagacgggatgcgtttctgatatcctttgggtaagatcgggcggataacgtggatggcgggaatggccggggtttccggctgggctcggagggagagggatgctccatgaggaaaaggcttctgattgtcgccttgctggcagccgtgacgctgatgctcggcctggcgggctgcggctcgggggatacggagggccgggaggcccagcaggatgtcgaggggctgccggcgtgggcggacgaggccgccgtcaccgcgcaggcgcgcgacgcgatagacctgttcgttgcaggtgactacgagggcttggcgttgctgttcggcgatcctgcgccggctgcctcggatttcgagaaggctgcccgggcggccgaggacgtcggcggcttcgaatcgtacggcgacgtgtccttcgcgcactacgacggaggtgcggacggcatggcggccatcgtggtccagcaggcgcattgcgagaacgacgacctggtctactccgtcggcatcgccgaggacggcaggctcgtcggattccgcctcagctaggtgccttgtcgtggaaggagcgactttatgaagaagaggatgctggcagcggcggcgctcatggctgcgctggccgtgctgtgcttggcgggctgcgggtcgagcgcctcggacgagaactaccgggaggggctgccggcgtgggcggacgaggctgccgtcaccgagcaggcgcgcgaggtcatcgagctggtgaatgcgcgcgatttcgacgaggtggctgcccgttgggacgacgggaacgcgaccgccgagaagctggagcaaggcctgggcggcgccctcgaccagttcggctcgttcgagggcttcgcagacgtgaggtacggccagagcgagccaggcggccggtcggccgccaccgtcgtccagcgtgccgattacgagaaccagaaagcccagttcaatgtgagcttctacgaagatggctccctggctgggctctacgtgtacaaggtggagggctaggcctccgcatcggctcccgccccgtcgccggccgcgctgcggcgcagctcgtcccgcagggcgggtacgtccgtgccgagcttcgccagcttcacggcgccggtccagggcgcggcgacaggctctaccaagccgggtttgaacgcgagcatggtcacggtcaggtcggcggcgaacgtcggccgggccgcggtgccggtttgggccgcaaggccgctcggcacgtccacggccacggcgaagggcgcccccttcgccttcgcgggcagcgagcgccggggccgttcgtgctccccgcgctcgtgcgtgcgcttgcggtggcggccgcgtcccttgccgcgcgtgccctcgaagcgacggcggttggcggcgcgtatccagcttgcatacggctcgcgcatctcgtcgccgctgaagccggtgcccaagagcgcgtccaccacggcctcggcccggtcgacggcatctgccagcacgtcggcgtcgggtgcgatgagcaccgagagcggcaggtcgcgcgccgccgcgtcggagaacgccgcgagcgccgtcgtgcgcgccggctcggcatgcaggcgctcggccaaatcgggcgccacgagggtcacggggtaacccgcctcggccagcgagcgggcgcacacccagccgtcgccgccgttgtttcccgaaccggcgagcaccacgacgggggaggggtcgggcacccaggcgcgcacctcgtcggccacggcggctcccgcgcgctccatgagcgtggcgagcggcgtgccgtcctcggcgatgcggcgctcgagagcggccacctcggccacgtccatcacggcccggcgctcccgtgcgacctcgacgccggccacggtcatgacccgcgtgttcgacagcacgccgttgagcatgacgaacggacgcttcagcgccgccgcgcgcacggcgcgcacgccgagcgacgcggcccaggcggccatgaacgcgagccagatccagatgagggctgcccggttctgcgcgacgaacgccagcactgcgttcgtcgcgcccgcttgcgacgcgtcgaggcccatcgtgccgaccaggagcttgaaaggcatagtggcgaacaggaagagcagcccgtagcgggcgacgatctggtaccagcgcgccggcgaagcatcggagcgcacgatgcgcagcttcagcagcttctggccgagcgtctggccgtgcaggagcacggggatcagcatgaacaccgccgcgaacgacagccacgccacccagccggggccgaaccagcctccggcgggaaggggcgcctgcgtgacgaccatcagccgaacggcgccggcgaccaccgtagcggcgcaggcgatcgcgaagtcgatgccgaacgacagcgcacgcttcgtgacgctcgcgcgtacgccagcctcgcgcgcctccatgttcacgagccgcatgtcgggcagcacgcgcatcgcgggccccaccgcccagaagcccaccatggcgccgagcgtgttcagcatgaggtcgtccacgtcgaacaggcggtacgggtgcacgtaaaggccccacaagcccgtgatctgcgacatctcgtagaacagcgtggtggcgaacccgatgagcagcgtctgccaccacgtgcgcctgaagtagtagcgcaggtacatgcccaggggcaccagtagcagcacgttgaagagggcctcgtagacgttggggttgcgcagcaggcccggccaggtggaggggtccgcgagcgaggccgtggagctgtccgcgatgagctggacgaagtggaacggcacgagctgcgggtgcgccgcatagggcaccacggccgagcggttctccggcagcggcaggatgaccatgtaataggccacgagcatatagaacacgaacgagtacacgacgagcgtgcgcagccaggggatggagccgaacttgcggtactggtagaccatgtagggcagcgtgatggcgaaggcgatcagcgggaaggtcacaaggccgaacacgatgttgccggtgtagacgctcatggaacaggctctccttgggagtcgggtgcgcaggggccgtgcgcagggtgtgtccgcacggcgcacgtgacgattataggcgatggcgcgcgagccggctcccgcgtcatcgcctcgacgcttcggttgcgcggcttctctgcaccgcggtccggctcatgcggttctgaacggtcctccgcctgggagcgggcgtcgggccccgcgccctcccccttaggcgcgcgccgtcggctccttcgcctgcgcctcggcccgtagggtgcgtcgttccaggtccagcaggtacgccttggccttcgcgtcgtcgccgtgccccgagggggccccgtttgcgccgatcacgcggtggctgggcacgatgacgggcagcgggttcttgttgcaggcgctgcccacggcccggcacgagcgagggctgccgatggctgccgctaggtcgctgtaggagcgcgcctcgccgtagggcacctcgcgcagggcctcccacacgcgccgctggaactccgtgccggcgggggcgagcggcaggtcgaacgcgcggcgcttgccggcgaggtattcctgcaactggttggcggcgcggttcgtgagctcggtggcgagcttgcggccctccagctctcgctcgccgaacgcgagggccgtgagcgcccgcccgtccgaggcgatggtcacgtgcccgagcggcgtgcggtaggcgaagtaggtgggggcggggccggtcatggcgcaccttctctcggtcgtggacggtctccattataatgcgcgcgcggtcctcgcggcgcgccggtggtcccttctgcatcaaggcgtcaccttcggggggcgtgcggcaacaggatgcgctccctcccgcgtccgcacggcgggaaatttccgtagctgcggtatacttggccttgacctgcgtttcgataccggaagttgtcaggagcgccgcaaaaaagaagccgcaagttggttgagcgggcaccggggcgcctgcatgataggttcatcgatcgcgcgaacgaaggacgggtctatgagctttcgcgaaaacatgcagcacctgcgcgccacgcgcaacatgacgcaggagcagcttgccatgctgctgggcgtcagccgccaatcggtgtcgaaatgggaggccgagcgcgcgtgcccggagatggacaagctgctgcgcatgtgcgccctgttcgaatgcacgctcgacgagctggtgtgcggcgacctgaccgggcgggcggccgccgaggcctccagcgtgccggcggggaagccccaggacgtgaccggctacgaccaggctatgcgcacgttcgcgtggaagctcccgctcggcatcgccgttgtcatcctgggcgccgcgctggcgttgctgctgtccgatcctgcgctcatgccgtcgcttgaggtgcggaacttcgcaaccgtgctcgtgttcgtcggcgcggccgccgggctcgcgctcatccttcccgcgtcgttcgagcgcagcgcgttccgcaaggcgcaccccttcgtcggagacttctacacggccgaccagaaaacacaagcccgagcgaccctttcgacgggcctcgtggcgggcatcgccctcatcttggcggggatggctgcgaccatcgtgctgcaggcggacgtgtggcttgcaagcgcggtgttcttcctgtgcgctgcggtcggcgtgttcgtcatcgtgcgcagctgcctgctgggctcgcgctgcaacctcacgcgctacaaccgcagatcgctcggaggtatgagcgaagagcagatcgaggccatgtgtgacgatggtcttgccgagcgcgcccgccgtgcgaagcgcgagagcggcacctacgctgccgtcatgtgcgcggcaacggcggtcggcctcgtgctggcgttcacgcctgcggcacctctcttcctgctggcatggcccgtcggcggcatcgtgtgcgccgcgatcaaggcgtttcgttcctcgcggagcagccgctaaggcgtctcgcacgccattccaaaccgctcgttcatatggttcaacccagggcgaaggctacttcgccctggtcgatgatgccaaaatccaaaggagaacgcatgaatgctgtaggagagcgcacgcgtgccaccgtagtagcacgcgaggtcaggaaatcgttcagcgcggggagggggagcaggcggcgggtcgtcgacgtgctgcgcggcgtcagcctgcgcgtcgagcccggcgagatggtcggcatcgtggggcccagcggctcggggaagtcgacgctgctgtactgcctgtcggggctggaatcggccgacgccggctccatagaggtgatgggccggcaggtcgtgcgcgcaagccgcaccgcgctgttcaagacgcgccgcgaccacgtgggcttcatcttccagtcgtacaacctcgtgccctcgctgagcgcgggggagaacgtgtcgctgcccgcgcgccttgcgggccgtccgctcacgacggagcagacggccgccgtgctcgcgagcgtggggctggaaggacgcgcgaagagccggcccgcggatatgtcgggcggcgagcagcagcgcgtggccatcgcccgcgcgctcgcgggcggggccgacgtgatcttcgccgacgagcccaccggcgcgctggactcgcgcaacggccgcgaggttctgggcatgctgcgcggcatcgccgacgacccgcagcgctcggtggtgatggtgacccacgacctggaggctgcttcgctggccgaccgcgttctcgtgctgaaggacggccaggtactgcgcgagctgggacgctccgccccggcggagatcctcgaggcgctggaggcggcacgatgatccggcttgtgctctgcgacctgcgcgaccatgccgccacgtggacgggcgcgtttctggtggccgtggcctgcggcttcatcggcggcttcgcggcgtcgctgatggccacggcgagaacgtacccgaacacggaatcgctcgcggcatcggtgctcgtgttctcagcggtcgcggcggtggcggtgctcgtgtcggcggcgggcctgacggtcgcggcgcagcgtcgaagctacgcgctctggcagttggcgaacgtgggtccgcgccgggtgaccgcggtggtgctagcgcagctggccgtggtggcgatgctgggcgcggtggccggcacgctcatcgaggccgtctcgttcgccccattgttcccgctcgtgttcagctcgccccagtaccagcctatcgaccacgtggttcccgacgcagggctgccgttcatgcccgcggtgtggcttgcggtggcgtgcgtgttcctcgtcgggggttcgaagggggcccgcagcgcggggaggacgccgccgctcgacgcgctgcgcgaaccggagccggcgcggaagggcatgacgtggctgcgcgtcctgctgttcgcggggttggctttcggcacagggcagcttgccgcctccctgctcgggaaagacccggacgctttgagcaattcgctgttccttccgcttttcatggcggccacgctcgttccggtggctcccgtggtcttctcctccctgctgggggtttggacctcgctcgttccgcagggtcgctcgtgcgcctggtgcctggcgcggcacaccgcgcgcttcggccttttggccagcacgtcggtggaaacgcccataatggtggggttcgggctggtggccgggatcttttcgcttagcagctcattgacggccgtcatacggcagcagggctcgaccctcaacgcttcgctcgatttcacctcggccatcctgctgctcggcggccccatcctcctgtgcgccgtgggcgcggcagtgagcgtggtcatgtcgtcgaagacgcgcactcgcgacgtggccctgctcgtcgcgagcggcgcacggccgggaacgctgctgggggccgccgtgtgcgaggcgctcatccacgccgtcaccgccacgttcgtgggggctgcggtcgtggtcgcgtccaacgccgttatcgcctacgcggtgggactgcccctgttcgcgaacctcgcgttcagcgaggggctcgtcgtctcgctcgcaggattcgccctcgtcttggcagcgaccctcgtacctacgtgcgctgctctcggccgagcgcctgcagccgtgctggcggcgggggagtgaggctctcgtgtctccctccggacagccggtcgaggcgggagcgcgggcgaagctgccccggcgcatacgggcggtctcggggattctcggttctccaggacggtgcggctgcggccggagagggccttgggcgttctggcgggaccttgccatctacttctgcgtgttcagcgtggcggggcactggatggagatcggctactgcacgctcatccgcttcgggctcgtccccggcacctatgatccgagctcccttatatggtcggattggctctacccgttctgcgtgtacggcttcggcgctgttgcctgcgtgctcgtgctgttccccgtcaagaaccgccttgagcggcatttcgggggccgtgtcgcgccgctgctcgcgagcttcgccgcgaacacgctcgcgtgcacgctcatcgagctggccatgggcctcgtgctgaaccggcccggtcccgacggcatgctgccgctgtgggactacagcgacatgttctgcaacttcatgggccaggtgtgcctgcagaacgccctcgcgttcggtgcggcagccacgctcatgacctgggtcgtccacccgaagcttgccgcttttctacggcaggtgcccgaaggtgccttgaacctcgtgtccgccggcatgggggccggtttctgcctcttgcttctgccatagccttgcgtcgcgccgcgggcactgcccgtcggcggcgcgggcgaccagggagacacgcaatcgccgattccttgcaggaggcaatgccggtgcgttcggtccttccaggtgctagccgtgccgcccacgtgtggttttcttcgcgtaccccctgccgggcatgcggtggcgcggggcgttgcgctagaatggggacggtcaaagagcctgcaacgcccggataaggagtccctcatgttcgaaccggtgaagatcgcaccgtccatcctgtcggccgacttcatgaacctcgggcgcgacatcgccctcatcgaggaggcgggcgcgggatacgtgcacgtcgacgtcatggacgggcacttcgtgccgaacctcaccatgggcgtgccgatagtgaagcagttgaagaaggccacgtcgctgccgctcgacgtgcatcttatgatagacaacccgttggagcagctgccatggttcctcgatgcgggcgccgaccttgtcaccgtgcatgccgaggtcctggacgccgacgggctcgcccgtgccgtggcctccatccatgcggccggggccaaggcggccgtcagcctgaagccgcgcacggcgcccggcgtgctggcgcccgtcatctccgacgtggacatggtgctggtcatgagcgtggagcctggtttctccgggcagagctacctcgagggaagcgaggacaaggtggcccgcgtggccgcgctcgcccgctccgtgggcgcctcgccgctcatccaagtggacggcggcatcggcgaggccacggcgccgctcgtggccggggccggggccgacgtgctcgtgtgcggcaacgccgtgttcgccgccgaggaccccgcacgcgccctcgccgaggtcgccgcggcggccgaggaagcgcgcctggccgcgctcgcggcacggaaggaggcgtaggcggcatgccttccttcgacgcgaacgactacgtctacctggactgggccgccacggcgccgctgtgcgaggaggccgcccgggccatggcgccctaccaggtgccgggccgcgccaacctggccgtggggggcaacgcgaactcgctgcacgcccccggccgcgccgcattcgccgccctcgaggacgcgcgccgctcgctcgcccgcgacctgggcgcctcgcggcccgacgagatcgtgctcatgtcgggtgccaccgaggccgacgatgcggcgctgctcggcattgcccgcgcggccgccgccgagcgccgccgcctcggcggcggcgacttcgtgccgcatgtcgtgaccacggccgtggagcacgacgccgtgctcgcccccgccaggcgcctcgaggccgagggcttccgcgtgacgcgcctggcgccgaaccgccagggcttcgtggagccggccgcgctcgaggccgtgctggacgaggacgccgtgctggtgagcgtgcaggccgcgaacagcgaggtgggaagcatccagcccatcgcggcgctggccagcgccgcgcacggcgcgggcgcgctcttccacaccgatgccgtgcaggcgctcgggaaggcgcccgtggacgtgggggcatggggcgtggacgccgcgtcgttctcggcccacaaggtaggcggccccaagggcgtgggcgcgctgtacctgagggcgcgcacccccttcgagccgcaggcgatcggcggcggccaggagtcggggcgccgcagcggcacgcagaacgtggcaggcgccgcgggcttcgccgctgcggtccacgcggcgtgcggcctgcaggagcgggaggcggcgcgcctgagcgcgctgcgcgaccggctctatgcgggattggccgcccacgacgccgtggaggccacggtggacgtggctccgggcagcgtggaattcctgccgaacatcgtgcacgtgctcgtgcgcgggctggagagcgagacgctcatcctgcgcttcgacctgcgcgggttcggcgtgtcgggcggatcggcctgctcgtcgcattcgctcgcgcccagccacgtgctgcatgcgctcggcatcgacgacgaccgcgcgcacggggcgctgcgcatatcgatgggacgctacacgacagagcgcgacgtcgacgccttcctcggagccgtcgctggcgtgctggattggagctagggaacatggagctggtgaccacgcacacgcatacctcgttctgcgggcacggcgagggcacggtggaggagctcgcaaccgcggccgaggcggccggcgtcacgaccctcgccgtgacggagcactacccgctctccaaggcgttcgacccgcgggactacctgtccatgccggccgcgcgcatgggggagtacctggcggcgatcggcgaggcgcgcgagcggcacccgggcctcgagatcatcgcgggctgcgagctggactggctcggagccgacgacgaccgcaccatcgcggccgacgacctggccccgttccagctcgtgctgggctcggtgcatttcgtggacgcctggcccttcgacgacccctcgcagcgcggccgctgggacgagccgggcgcgcccgacgccatctggcgccgctacttcgagctgtggtgcgacgccgtgtcctcggacgttccgttccacgtgatgtcgcatcccgacctggccaagaagttcgcctactatccgaccttcgacgtggcgccgctctacgagcaggccgccgaggcgtgcgcggccgcgggccgcatggtggaggtgaacacgtcggggtcgtactacgcctgcaaggagatgttccccgcgccggcgctcctgcgccagttctgccgcgcgggcgtgccgtgcaccgtgggcaccgacgcgcaccgtcccgaccatgtggcgcgcgacgtggaggcggcctaccgcctgatgtacgaatgcggttatcgaacggtaacggttcccaccgccacgggcgaccggcgcgagatcgacctcatactgtgaagcaaatggtcggcgacgtgcgggaaggaagatgatcgacatggctggatcgaagaaggacaaggtgcagaagggcctcgcccagcgggcttcggggccgctctcgaggaagacgtccaccgtgaccgtgggcgcgctggagcgcgcgctactcaaggagttcccggcggccgacgccgaggcgtgggaccgcaccggcatgacggtgggcgatccggcgcgcctcgtggagggcgtggccgtggcgctcgaccccacggtggacgccgtggaggaggccgcttcgatgggggcgaacgtgctcgtgacgcaccatcccgcctttttgcagccgcccgactcgttctcgccggcctcctcggtggcggcgaaccccggggcgctcgtatgggccgccgtggcgcgcggcgtggcgctgctgtcgtaccacacggcgctcgacgtgagcgcgcaggcccagcgcgtgctgcccggcatgctgaacctgcagttccgcagcgtggaggtgccgctggcctcctcgaagcgcaagggctacggccagcgctgcaccgtgaaggcgggcgacgggccgctcacgctcgggcagctggccgcacgctgcacctcggtgttcgcacgccagccgcgcgtgtggggcgacttctcccgcgagctggagcgcgtggtgaccacgacgggctcggcgggcgacgtggcggccacggcgctgcgcgaccaggtggactgcctggtgtgcggcgagataaagtaccatgaggccttggcgctctcccaggcggggctgaccatcgtggagctggggcacgatacgagcgagctgccgctggcggccgtgctggccgcggccgtggagggcgcgggggtgcccggcgagctcatcaccatcatcgaccagggagacaactggtcgtatccggagacgacgcgcgtctaggcgcgtcgggggattaggcgcgcgagcgccgaacgaagagaaggaagcacatgcaagcaacgaccgacgacctgaccaacttgctgcggatgcagcagatcgacctcgacctgatgaaggcgaagaagaagctcgaggagctgccccagcgcgcgaccatcctcgcggcgcgccagaagaagcgcaccatcgagcagaagcgcgaccaggtggccgagatgcgcgccagggccgagggcatggccgcgaagctcgaggccgaagatgccgagctggccgaaaagcagcgccgggtgcaggaggccatcgacggatcgctcggcaactaccgcaacgtggaggcgcacaccaaggagctcaacggcttcgcgaagcgccgcaacgcgctggaggtggagctcacgcgcctgggcgaggagctggcgaagatcgagggcgtgcagagtcaggtgtcccaagcgctcgccgaggtcgataagcaggaggccgccgccatcgtgtcgttccagcgggagggcggcgcgctgcaggccgagatcgcgcgcatgagcgccgatcgcgagggcatgtccgccgagctgtcccccgagctgcgcgatacctacaaccgcacggcttcccgcacgggcggcgtggccgtgggccttctgaccgaggggcgctgcggcgtgtgccgcaccgtcatcgacggcggccgcctcatcgacctgaaggcggaggcgccgctcggcacgtgcccgcactgcaagcgcctgctggtggtcatgtgatggaggggccgacggtggaaggcggagccatggagcccgaccgggatacggcgcaggaaacctgcgccgtgcagagaaatgccccctacgacggccctggcaagctttcgggcagcatgcacctgcacgtgggcgggggccactacgagctcacggtgaaggaccatttcgacgcggcccatgcgctgccgggctacgatggcccctgccagtatctccatggacatacctgggaggtggaggcgaccatcgcggggcagcatctcgacgaggtgggcatgctctacgacttcaaggacgtcaagcgcgacctgcatggcgtgctggagaacttcgaccaccgctgcctgaacgacgtgccgcccttcgacgagatcaaccccacggccgagcacctggcccgtgtggtgttctacgagctggagaagacgtttcccgcgcatatctcgcttgtggaagtggccgtctgggagagcccggcagcgaaggtggtctaccggccgtaggatgggcccctcttcagccgccccccgggagggggcggctgaaggcgagaaaaggcgtccaacgcaaaaaagcccgcggttgcgggctttcgcttgcagggcgggagacgaaccggttaggcgcgctcgaccttgccggccttcatgcagctcgtgcacacgttggccttgcggacgcggccttccttgtccttgatggtgatcttctgaatgttcggacggaacacgcggttcgtcacgcggtgcgagtggctgacgttgcgtcccgcaaccggatgcttaccgcaaacttcgcaaactttagacatcgttatcactccaggttcgtcttgtttccgcacggctaaaataccgttgatgacaaaaaagccttcatactatagcacataaaacgaatgccttacaagaatttttcgtgtagtatggacggcgcccagaacaggcccgacgcacagcgtttcgcccatgcggtatacttcgtccatagcctgcgtacgtccgcgcggattcgcgcccgcgcttcgaaaggaagagccatgagcactgtgatacccggcaacctgcacgttgccaacgacgtcttggccgacatggtcggcaacgctgcgctcgaatgctacggcgtcgtcggcatggccgccccgtccgcggccgacggcatcgcgaagatcctgcccacgtcccgcctgcgccgcggggttgtggtcaccacgaccgatgccggcgtccacgtggagctctacgtggtcatcgagtacggcacgaacatcaacaccgtgtcgcagaacctcgtggaccaggtgacgttcgccctgaaagagtacgcccgcgtgcccatcgacggcgtcgaggtgcacgtccagggcgtcaaggtgcgcaagtagccgcgcgaagagaagcgtatagagacgagccccgcgcctgcgggcggcccgccccgaggcggccgagggggcgcggggtttaccgccgagagagagacagacctaccatgccagaatcctataccgcgaacgacctgctcaacgccatagctgccgcgagcaagacgctgagcgagcgcaaggacgagatcaaccgcctgaacgtgttccccgtgcccgacggcgacacgggcacgaacatgtcgctgacgctggaaaccgtcgtcgagaacctggcgaacctgcccatcggcgccggcggcaccgagatccgcaaggccatcaccacgggcgccctcatgggcgcgcgcggcaactccggcgtcatcacgtcgcagatcctgcgcggcctgtgcgagggcagcgtcgggcacgaggccgtgaacgccgagagcatcgactccgcgttctcccatgccgtcgacgtggcgttccaggccgtgcgcaagccggtggagggcaccatcctcaccgtgctgcgcgacagcgcggcggccgccaagcgcgcccgcaagaagaagctctccaccgacgaggcgctggaggccgtggtggccgaggcctacgcgtcggtgcagcgcacgcccgacctgctgcccgttctcaaggacaacggcgtggtcgacgcgggcggctacggcctggccatcttcttcgacgcgttcgccgcggctctcaccggcaaggagggcccgctgggcgacgagctggccttcgcgcggggtacggccccgaaggtggagatcgagcagatcaacgactgggagggctcggcttaccgctactgcaccgagttcctggtgaactccgacacgctggacgcggaggagggcctggatttcctgggcaccatgggcgactgcgagctgctggtgggccagaaccccaacttcaaggtgcacgtgcacacgaacacgcccgacaaggtgctcgcctacatgctggagcgcggccagatcgccgaggtgcacatccacaacatgcagctgcagagcgccgctcgcaccgacgcgctggcggccgagggggaggccgcgcgcaagccgatcggcttcgtggccgtggccgcgggcgagggcaacgcgaagatcctcaagagcctgggcgtggacgtggtggtctcgggcggccagaccatgaacccctcgacgaaggatctgctggacgccgccaacgaggtgaatgcggacgccgtgatcatcctcccgaacaacaagaacatcatcatggccgctcagagcgcgtgcggcctgtccgacaaaccgtgcgccgtcgtgcccaccacgagcgtgccgcaggcgttctccgcgctgttcggcctggacgaggacgcgagcctcgaggagaacgtggaggccatgacggaggcgtacgccgacgtgcgcaccggcgaggtgacgcgcgccatcaaggacgccaaggatgctcacgacaaccccatccgcgaaggggacgtcatcggcatcgccgacggctccatcgaggccgtgggctcggccgtggaggacgtggtcatggaccttctggcccgcatggacgccgacgaggccgacacgctcacgctcctggccggcgaggacttggacgacgcggccttgggcgccctcgtggcgcgcatcgaggaggcgtacgacgagttggagatcgacgcgcaccgtggcgagcagccgctgtacccggtggtcatgtcggttgagtaaggagttccgccgttctgccgaacggcggaacgggccgacgctgcggggcgtcctcgtgccggatcccggcccttgtgcaccgcgcggcgcgtaccgaagtacgcttggcagtgcggcgggccgatctccggcacgaggacgcccctcgctgactttcgaacgacctggagacgcacatggacgcacctgaccgcttggcagccaccctcgcgctcgacgaatccgtcgggcgcgtccgtttggtgagcccggcgcgcgcccgtgcgctcgaggcgctgggcgtgcgcacggtgcgcgacttggtgacgcacttcccccggcgctacatcgacctctcgcggcgcgagacggtggcctcggccgccatcggggagcagtgcacggtggagggcacggtgcacgagataaagctgaagcgccccaagccgaagctgccgcttgtggagataacgctcgtggacggcacgggcacgctcatggtgacggcgtttcgccagccgtggctcatggaccaggtgcgtgccggcatgcgcatcgccgtggcgggaaagctggagttcaactacggcttcaagcgcatgacgaacccctacctcgaggcgctggaaggcgccgagggcgcggctgccggcatggtcatacccgtgcaccccgccaccgagaagctgtcggccgcctgggtgcgccggctcgtgggcaacgcgcttacgcaagtggcggggctgtacgacccgctgccgctggagctgcgcgcgaagtaccgcctcatgagccgcggcgcggcgctcgcggccatccacttcccccgcagcatggacgaggcttccgaggcgcgccggcgcctcgtgtacgaggagctgctgttcctggagctcatgctcatggaggagggccgggagcgcgccgaggggtgcgagcccgtgcgccacgtgacggacggcccgcgcctgacggcgctcgccgcagcgctgccctgggagctcaccgacgagcagaaggccgcgcgcgacgacatcctggccgcgctcgcggcgcccgccacggcgaaccacctgcttctgggcgacgtgggaacgggcaagaccgtcgtggccgcgcatgcgctggccgccgcggccgacacgggcggccaagcgctgctcatggcccccaccgaggtgctggcccgccagcatggcaagagcctggggccgctgttcgaccaggcgggcatctcatggggggtgctcaccggatccacgccccccgccgagcgcgaggcggtgctcgcgcgcgtggcggcgggagaggtggacgtgctcgtgggcacgcacgccctcttggaggacgacgtgcgcccgaggcggtgcacgctcgcggtcatcgacgagcagcagcgcttcggcgtggaccagcgggcgaagctgctggcgaagggcgaggcgcccgacgcgctctacctcacggccacgcccatcccgcgctcgctggcgctggcgctcttcggcaacctcacgctctcctacatcaggcaccgcccgcacgacgcgtcggcgcgcacgacgaaggttgtggcgaagcaggagcgcgggcgcgcctacgacgccgcgctcgccgcgctcgcgcgcggggagcaggtgtacgtggtgtgcccgctcgtgggggcgagcgccgaggagcgcgacgcgaaggccggcaagcgcgcggggcgcgagggcgacgaggacgagtacgcctacgccgccatcagcatcgaggacgacgccgatctggacggcggcaacgtggcggccgccgagcgcgaggccgccttcctgcagcagaagacgttcgtggactggaaggtggagcttctgcacgggcggctgcccgctgcggagaagcaggacgtcatggcccgcttccgggcaggcgagacgcaggtgctggtggccacgaccgtcatcgaggtgggcgtggacgtcccgaacgccacggtcatgatcgtggaggacgccgaccgcttcggcctgtcgcagctccaccagctgcgcggccgcgtggggcgcggggagaagcccggagaggtgtacctggtgagcgcgtcgcgcacggatgcggcgctgcgccgcctggcggccatggagaccaccgacgacggctacgagctggcggcctacgacctgtcgctgcgccgcgagggcgatatcctgggcaaccgccagcacggcgcctccgcgctcaagctggtgaacgtggtgcgggacggcaaggtgatcgaggcggcgcacgccgacgcgcgcgccctgctggaagaggacccgcggctcgaggcgcccgcgcaccgcgcgctcgggcgcgaggcgcggctcgcgttcaagcgcgccggagaggttcaggggggctgacatgcgcatcattgcaggagagttcaaagggcgtacgatcaaggcgccgaagggggacggcacgcgccccacgaccgaccgcgtgcgcgagtcgctcatgagcgccgtgaacagcgcctgcggcggcttcgagggcgcgacggtgctggacgcgttcgccgggtcgggtgcgctcgggttggaggcgctctcgcgcggcgccgcctgcgcgcacttcttcgagcgcgacggcgcggcgcagcgcgtgctgtgcggcaacgtgcgcgcgctcgggttggaggcgcgccgcgcgcgcatccaccgcggcgacgtgctgagggacccgcccgcccatgcgcgccccccgttcagcctcgtgttcctggacccgccctacgcgctcgccgcgcaggatgcgctcggcctggcggcaaccctcgcggccgacggcgccctcgcgccggacgcgctcgtggcgtacgagcacggggcgggcacctgcggcgaggccgacgcggccgccgccgcctgcgggctcgcccttgcatcgcgcaagaagtacggcgatactgtcgtggacctgttcagaccgaaggagctttgatctgttatgagacgagcactcacgcccggaacgttcgaccctatcaccagcgggcacctcgacgtcatcacgcgcgcggcacagctggtggacgaggtggtggtggccgtagccgcctcccctaagaagaacccgctgttctcgctcgaggagcgcgccgagctcgtgcgccaggccacgagccacctgcctaacgtgcgcgtggagcccttcgacgagctgctcgtggacttcgctgcccgcatggaggccaccgtggtggtgaagggcctgcgcgccatcacggacttcgagtacgagttccagatgacggcgctcaactaccagttgaaccaggagctggagacgctgttcatcatgtcgcccccgcagtacatgtacctgtcttcgtccatcgtgcgcgagattgccagcctgcacggcgacgtgaacggcttcgtgcccccgtgcgtgaagggcgccctcgaggccaagttcgcggagtaggcccaaggagggccgcgcgggttccggtatggcaacgagaatacaacaggggccttccgaccgggtaaaatgtgcacggtttgtgcagtgacgttgggttatgggttcaaacctgctagaatactttgacgcatgcgcgcaggaagactcaaaccccgtgcgccgacgcacttgaaacgcagcacgcttgggtggaaggacaatcatggacgaaacaggagtcttggggctgctcgaggagctctcgattcttctcgaggactcgaagccggtcttcggcaaaagcaacttgcgccaagtcgacatagccgcggcgttcgagatcatggacgagatccgcgacacgttcccgagcgagttcgcgcaggcgcgccagatcgttcgcgagcgccagagcctgctcgacgacgccgaggccgaggccaaccgcatgatcgaggacgcgcgcagccaggccatgaccatcgccagcgagcaggagatcgtgcgcatctcccagcagcaggccgaccagatcctcgcggacgcccgcgagctggagcgccagacgcgcgccggcgccgaggattacgccgacgaggtgttcgggcacgtggagcagagcctcgacacgctgctgaacaacgtgcgccgctgccgcgaccgcctcaacgccaactcgctcgccgcgggccgctgatggaaacgacgcgcatccccataccctcggagctcttcgcacctgcggagagctcgcattttgagggatcgtacacggtgcccgtcgtgaaggcggggcccgacctgtacgatttcgccgagccgctgtcctggcaggtggacgtgacgaacactggcgacgcgctgctcgtcaccggcaccgtggagggagaggcgaggacgtcgtgcgcgcgctgcgtcgacgacttctcgttccccgtgacgggcgaggtggagggctacttcctgctcggcgccgacaaggaggcgcccgaggacatggacgacgacgagttcgacgtgctgcccgaggacaacgtcatcgacctggagccgctgttgaacgccgcgctgctgctggagttcccgctcgtgccgctgtgcgacgaggaatgcaagggcctgtgccccacgtgcggcgcgaacctcaacgaggggccgtgcggctgcgcgcccgccgagggcgacgggggcgacgacgtgccgcccaacccgttcgccgtgctgaaggatttcccgttcgagcagaactgacctcctttccgccatcgtggaaggtctgtccctgctattttcgatgaacctgcccgcgccattttgaaacgcccgcccccggcgggcgtttccttttcccgacagagcaagaaaagtagagacgtgcgcctcgtcgttctggttcaatggagcatccgggccgaaagggaggaagggaggctggcatggagccggagcacctgcgcgcggtggagcgggcggtggcgtgtatcgaggcgcaccggggcgggcggctcgacctggacgccattgcgcgcgctgccggctactcgaagttccatctgcatcgcctgttcggcgaggcgacgggcatgaccgtgcatgcgtacgcatcgcgccgacggctcaccgaggccgcccgcgcgctcgtggagacggagcggcccgtagccgacatcgcccgcgacgccggctacgacagtcagcagacgttctcggcggcgttcgccgcgctgtacaagtcgccgcctgcgcgcttcagggcgtgcggtgcgttctaccccctgcagctgccgctgaagctggacgcacctgccgacgggctgagcggcccggcggcaggtgcggctgatggtcgggcaggcgaggcgggcggctgggccgacgggaccggcccctgggaggccagggccgcgacgcccgccgacgttccggcctggatggatctcatgcggcttgccgtggacggcttcccctgccttgacgagcgccggcacgaggcctggctgcgcgaggccgtggcccgtgggaaggcgctcgtcgcccgcggcgcgggaccggcggccctcgcgggcgcggcggccttcgaccccgggcgggcccgcatcgacgtgctggcggtgcatccgcggcagcggcggagcggaggcccggcccgtgcgctcgtcgcggccgtgcaggccgcggtgccggggcgcgacctggccatcgccacgtaccgcgcgggcgaccgcgccgacacggggtaccggcgcgacctcgcggctctcgggttcgaggaggcggagctgggcaccgagctcggctatcccgtgcaatggttcctgctgcgtgcggagccgcaggacgaaggcgggaacgggaggaggaatatcctatgagcgaagggcgcgacgccgtcagggcggaggaggaggcgcggcttgccgagacgctcggcctcgtgcgcgcggccctcggtgaggccgaggccctgcatgggcggatagaggacggctaccgcgaggccaagcgctaccaggtggcgtaccgcggagagatcgaccctgcggaggccttccagaacgagctggcgctggccgaggtcgaccggcgtgccgcacagtcgcacgaggcggccgcgcagctgcgcaagatgctcgacgcgccgtacttcgcgcgcgtggacttcgcggccggcggggaaggggggccggagacgttctacctagggcgtttctcgttcgcagcggaaggccgcaccgtggtgtcagactggcgctcgccggtggcgggcctgttctacgagcacgacgagacgggcccggcggcctacgacgcgccctcgggccgcgtggaaggcctgctttcgctcaagcgccagctgggggtggagcggggcgagctcgtgtacgcggcggacagcgcctcgagcgtgcgcgacgaggtgctggcgcgcgagctggggcgcgcctccgaccggaagatgcgcgccatcgtggcgtccatccaagccgagcagaaccgcatcatacgcgacgaggagccgggcacgctggtcctccagggcgcggcaggctcgggcaagacctccatcgcgctgcaccgcgtggcgtacctgctgtaccggcgccgtggcgagctttcgtcgcgccaggtggccctcctctcgccgaaccgcgtgttcgccgactacatcgccggtgtgctgccggagctcggcgaggagcccatcgaggcattcgacctgcgcggcgtcgtgaagcgggcgctcaacggctccgtgcgcgtcgcgcccgcgcgctcgagcgtggacgcggcggacgaggcatggcgcgagcgcgcccgcctgaaggggacggccgcgttcgccgacgcggtgctcgcgttcctcgaacgggttcccgaggcggcgttcgcggccgaggacctgacgttcggccgacgcgtcgtcgaagccgcgtggatcgatgcgcggttccgcgcgcatgggggcctcgccttggaggagcggctcgacctcgtggccgcgagcgtggtctacgagctggagtccacgagcgtcgggcgcgaccgccacgccgtgccgacgaagcgggaagcgcgtcggcgcctggccggcatgctgcgcgctaaggacgcgctttcgctctaccgcctgttcctcgccgaccagggctgggagggtgcgctcaaggttgggccgaagcgcacggtggagtgggaggacgccgcgccgctcgcgctcttcaagggcgcgttctcgggcttcgaggcctacgacggcgtcaagcacctcgtggtggacgagatgcaggacctgacgccggtgcagcatgcgctcgtggcgcggctgttccgttgcggcaagaccgtgctgggcgactgctgccaggtggtggacgagtgcggctctgccgcgctcgaggacgttgcccgggcctatggcgccgtgcgcgtcgtgcggctcacgcgcagctaccgttccacgagcgagatcgtggcgctcgcgaaccgcgtgaagcccgccgccggcctcgaggcggtggagcggcatggcgacgtgccgcgcatcatcgactgcgcggacacggccgaggtgctcgcgcggacgctcgaggccgcccaagccttccgcgcgagcgggcgcaagaccctcgggatcctgcacgcttccgaagagctggccgcgcgctacgccgagctgctctcccgcgacgtggacgtccacctgctgaccgagcgcacggagaccttcgaggaaggcgtgtcggtggcgtccgtcaagatggcgaagggcctcgagttcgacgaggtggtcgtgctcgacgccgacgagcgcttcttctccggcgagctcggacgctccctcctctacgtcgcggtcacgcgtgccctgcatcggctgaccgtcctgcaccggggaaggccgagcaggttcctggcggagtaggggcgtccgccgtcctgggggcagcgacgagggcgcgacgcgaggcgcgagggccgtccgagattcgcggacgagaactaaggccctggcaacgggagcggtgcccgaagtcgttcgcgcagcaaaacgttccgcatatcgccggctcgcgcgttgcggacgcttcccctgtggaacttatgctcccgcaggttccctattcgtccatgacgatgcaggcaagggaatcgagcggcacggtcgtggggcggtccctgcccgcgagggcgtgttgcgggcattctgggaaaccgcatgaacatcctatatgaaagaggctgaagcgattttgcgttcccacgcctcgagctcgctctccttgtgctactattgaattctaattcaatgaaaggaagttcaacaaatggtgtcgaggcaggagcagcgggagcggcggcgcgaggagatactccgggcggcgctgcgcctgttcgtgcgcaagggctacgcgggcacgaaggtgggcgacatcgccgaggcggtgggcatgagcacagggctcatgttccactacttcgagtcgaaggaggcgctctacgaggagctgataggcttgggcgtgggcgggccgatggcgatgatggacggcggtgccgggggcgacgcgatcgcgttcttcgaaggggccgccgcgagcatcctggcctttttgcgcgaagaccccttcatggccgacatgttcgtgctcatgggcaacgcgcttatggacgacgccatccccgagcgcgcgaaggagctgctcgcgggcttcgacatgaacacgcccacggccgagatggtgcgtcgcggccagcgcgagggcaccgtccgcgcgggcgacccgacggcgctctccatcgcgttctgggcggccatccagggcatcgccgaggagttggccgtgtatcccgatatgccgtgcccggaaccggaatggatcgtcgacatcgtgaggaagaggtaggggaatggatcagctgaagagcgagcacgcaaacgtgagcgcggccaagcgaacggatgtttcacgtgaaacatcggaggggcgatcgtcgctcgcgacgggctcggcggggacgggagcttcgtcgaagcgcgtcgccgtcgtgggcgccggcatcgcagggctcgcggccggggtgtacgcgcgccagagcggcttcgacgtcaccgtcttcgagtcgcacgccatccccggcggcgcatcgaccagttggagccgcaaggggtacctgttcgagggcggcatgcattggctcacgggatcgtcgccgaagacggcgctcaacgcggtgtggaacgagatcggcgcgctcgatgcggaggtgccgatatacgtgcgcgaccccttcctcgcctacgagttcgaggggaggaccgtctacctgtaccgcgacgtcgaccgcctcgaggagcacctgctcgacgtcgcgcccgaagacgcgcgccagatacggcgcctcgtcaaggacgtgcgcgcgttcatgaaggtgagcatgcccgtcttcgacctcaagggcgtgaaggcggccgtgccgcgcaaggcgggcatgggggaaatgcttgccatgctgccggcgatggcacgcatgcccgcctacgcgaaccagaccgcccgtgcgttcgcggatcgcttctccaacccgctgctgcgcaccctgttcgcgagcatggtcggcgaggacatgagcgcgatgggactcgcgttcacgctcgcgacgctcgctgcgggcgacggcgggtacccgctcggcggctcgctcgccatggcccggcgcgtcgcggagacgttggagcggctgggaggtcggatcgagtaccggagcctcgtcgagcaggttgccgtgcgggacgggcgagcggtgggcgtggtcgtggacggcgaagagcgggcgttcgatgccgtcatcgtgacgcaggatctgcgcatggccgtcgacgagctcttcgacccgccgatcgtcgagccttgggcggagcatttgcgggagcacgtgcatccgatcctcgacacgttcgtcagcctcggcatccgaagcgacctctcggacgtgccggaatgcgtcgggttccccctcgacgagcccgttttctgcggagggcagcgacacgacgcgctttccttcaacaactacgccgcctacgagggctacgcgcccgagggctgcacggccatgacgctgttcatgaacggcgacacgtacgactggtgggccgcgcgcaaggccgacggcacctacgtgcaggagaagcgcaagctcgccgaggcagtgatcgccgcggtgtcgaagaagtgcccgcaggtggagggcaaggtggaggtatgggacgtggccacgccgctgacctacgagcgctacctgcgctcgtacaagggctcgtggatgtcgaacatgctccccggcgagaaggcgcggagctacccggcgaagcccgagggcatcgcggacgtgtacttcgccggccagcgcctcgtcgcccccggcggcctgcccaccgcggtcgacaccgcccgcaccgccgtccagcacctctgccgcgacaccggcacggtgttccaaggggcgctctgacgggtcgccccgcggcggtcctcggatgtttcacgtgaaacatccgttcgtttcaatttgcggcgcgccgggtcatggacccgacgcgctctttcctcttgcgaggcgcattccgctcgggatgacgcaaggggctcgtcaaccggaggatgcacgccgggtggcgactcattgacgacgccgcctccggctccgtcgcccaacgcagtctcgcctaccatatgagggataggcaaggcgacgaggcggggaggcggacatggcgaagcgcgaagcggagggcggcggcgtggatccctcccaggtcgtgcgccacttcctgttcgcgctcgcggccggcggggccggcgcggcggcctccatcgcgctctcgctcgccgtcgacctcgcggcgcggctctccgggcgcttcccgtggctgctcctcgcgctgccggcgctcggcgcggcgtcggtcctgctctatcgcgtgctgaagctgcccgcgcacctggccaccgacacgctggtggaccgcctgcgccgcaacgaccgcgtgccgcccgccctcgcgccgggcatcctcgcgggcacgttcctcaccgtgctcggcggcgggtcggtgggcaaggaggccgcggcgctgcagatgggggcgtcgctcggcgcgctcgtcggccgccccttcaagctggcccccgtgcgccggggcgcgccggccatcccccagggctacgcggcggccaccggcatggcggcgtgcttcggggcgctcttcttcgcgccgctcggctcgacgatgttcgtgctcgagctcgcccgcttcgaccgggcggtcgcgcgccacgtgcccacgctgctgctcgcgtcgttcgcggcgttcggaatcgcgcgcatgacaggcatcggcgacgtgatcccgcgcgtcgccgtgcccgccttctcgtggccgctcgtcgcgcagtgcgtgctcgtgggcctggcgtgcggggcggcgggcaccgtgttcggcacggggctgcgcctcgcgcgccgcgtcgtgcgccggcgggtgggccggccgctggtggccgccgtcgcgggcggcctcctgttcgcgggcatcgtgctcgcgttcgggtggcagggcttcgagggcacgggcatgccgcttctgcgcggcgcgctcgcggggcatgcgggcggcgccgatttcgccgtcaaggcgggcctcacggtgctcgcgctcggcttcgggctcaagggcggcgagatcatgcccatgttcacggtgggcgcgcttttgggctgcgcgctcggcggcctcacgggggcggcggcgccgttctcggccgcgctcgggcttgcggcgttcttcggggccgcgagccgctgccccttggcggcactcctcatgggcgcggagatattcggcctggccgccgcgccgtacgtggcgcttgcggtggcggtggcctacgcgggcagccgcgacgtgggcgtgttcgggcacggcacggcgagcgagctcgcgcgcctgcgcgcacgggcccgcgatctcgcgcggcgccgggaagggcgctgaggcatggggcgcgcgacgggccgccttcccggccagctggctcgccacgccgcgttcgcgctcgcggccggaacggccggggcgctcgccgcgtcgctcgccaccctcgcgctcgacgcggcctcggcgctccccgcgcgcttcccctggctgctgttcgcgctgccgcttctaggggcggcctccatcgggctcttcaagctgctcggcctgccgctcggcgcgcagcccggatcggtggtggaggacgtgcgcgacgatggccgcgtgccgctcgccctggcgcccgcggcgctcgccggcacgctcttcacggtggcgggcggggggtcggcgggagcgacggcaacctcgctcgccatgtcgtcctcggcggcgtcggcgctcggcaggctcgcgcgggtcgagcccctggcggcgcccggcgcgcgggcgccccgccgcggctggacggcggcctgcgggatggcggcggcgttctcggccctgttcggcgcgccgcttgcgggcgccgcgttcgcgctcgagctcgtccggttcgacggcgccgtcgcgcgccatctgcccgccgtgctcacggcctccctcgccgcttggatcgtttcgctgccgctcgccggcggttacgcgctccctgcggcggctcccccggacgcgtcgtggcgcgcgggcgcgctctgcttgctggtgggcctcgcgagcgctgcggccggcaccgtgttcggctggtcgctgcgcgcgctcaggcgggccttcggccgggcccgcgcccatccggccctcgtggcggctgcgggaggcgcgctcatctgcgcgctcgtgctcgccttcggctggcagcgcttcgaggggtcgggcctcgcgcttctcgccgacgccttcgccggggacgccggccccttcgacttcgccgcgaaggcgctgctcaccgtggtcacgctcggcttcggcttcaagggcggcgaggtgatgcccgcgctttccgtgggcgcgcttttgggggcctcgtgcgcggggctcatcggcgccgcgccgccgttcgcagcggccatgggggccgcggccttcctcgcggccgccgcacgctgcccgctcgccgcggtgctcctggccggcgaggcgttcgggtgggccgccgcgccgtgggccgcgctcgccgtgctgcccgcttatctgggcagcgtggacgtgggcatgttcggccgcgggatcacggcgtggcggacgcgctcgcgcgctgcccgcgggcaacgagaggatcgacgacgcgggagaggacggtaagcgctacaatggcagccatggacaccaagaagaatcccccagcccccgcggtcgatcccgcggccccttcgggcgccgacgagccgcgcgtttccgcgcgccaggtgctcgcgcgcttcgtcgcctattacaagccctacaagttcctgttcttcttcgacctcgtgtgcgcctcggtgctcgcggcggtcgatctggccttcccgcagttcctgaacttcttcacgaggcagttcttcctggagccgcccgaggtcatcctctccacgctcgggtggatagcgctcgggttcgccgcgctgtacgccctgcgcacggcctgccagtacttcatcacggcgtggggccacatcatgggcgcgcgcatggaggccgacatgcgcatggacctgttcaggcagtaccagcgcctgtcgttcagctactacgaccgcaacaacaccggcgagatgatgagcaagctgctcaccgacctgttcgacatatcggagctggcgcaccacgggccggagaacctgttcatctgcattctgaagatcgcaggctcgttcgtgctgctgttcatgataaacgtgccgctcacggccatcatgctggcggccacggcggtcatggcggcctacgcgttctggcgcaactacaagaagcgcgtcatcttcacggagaaccgcaggaagatggccgacatcaacgcgcggctgcaggactcgctcggcggcatccgcgtggtgaagtcgttcggcaacgagggcgtggagatcggcaagttcagcggcacgaacaagcgcttcgtggacacgaaggagagctcgtataggttcatgggcgcgttccatgcggtgaactcggtgttcaccggcgttctgtacaccgtgaccatcgtgggcggcggctacttcgtggccacggggggcctggcgcccgccgagctcgccatctacgccctgtacatcggcatcttcctgtcgcctatcgagcagctcatcaacttcaccgagcagttccagaagggctacgcgggcttccgacgcttcatggaggtgctggccgtgaggcccgacgtgcgcaaccggcccggcgccctgccgcttgcggccgccgaggtggagcgcgggcgggcggacgggttcgtggccggagaagtgcgctaccgtggcgtgcggttcggctacgacggcgagcacgaggtgctgcgcggtctggacctggccataccggccggtacgaccgtggcgctcgtggggccgtcgggcggcggcaagaccaccacgtgctcgcttctgccccggttctacgacccgggcgcgggctcggtggagatcgacggcatcgacgtgcgcgacgtgacggtggagacgctgcgcgaggccatcggcatcgtgcagcaggacgtgtacctgttcggcggcaccgtgcgcgagaacatcgcctacgggcgccccgatgcctcggacgaccagatcgtggaggcggcgcggcgcgcgaacatccacgagttcgtcatgggcctgccggagggctacgacacgttcgtgggcgagcgcggggcgcggctgtcgggcgggcagaagcagcggatcgccatcgcgcgcgtgttcttgcgcaacccgcgcatcctcatcctggacgaggccacgagcgcgctcgacaacgagagcgagcgggccatccaggcgtcgctcgaggagctgtccgagggccgcaccacgctcgtcatcgcgcaccggctgtccaccatacgcggcgccgacctcatcgcggtggttgaggacggccgcgtggtggagcagggcacccacgacgagctgctggagctgggcggcacgtacgcgcgctattacgagatgcagttcggtcgcccgtcggaagggctctgagcggcccttcgcgccctcggggccccgccgtgtggagcacgtgtggcatgtcgaagaaaagcgcagatggggccttgcgcggcgcatgaacctttggtactataccgtttcgcatgtttactaagcgaggacgggcggcacgggttcgcccggcttacagaaggagcatagatcatggcagtacctaagcgcaagatgggccgtatccgcacccataaccgtcgcagcagcaacgataagatcggtgcgcccgcccgttccgtgtgcccgcagtgcggcgaagtgaagcttccgcaccgcgtgtgcccgaactgcggcttctacaagaaccgcgaggttatcgagacggaatagcgcatccgcgctttggcgcgcgctcttcggccgcgttgaaaagcctccccgcacgtcagcgctcgctgatgcatggggaggctttttcaggttggttgagcaagacgcgtgcggtcggggcccggcagggccgcggttcgcgcaggaggccggcctcgcgggaggccgtcggcaggaggaggcaatcaatgtccgaggaagtcacgatagcggtcgatgccatggggggcgacgatgccccgggcgtcgtgctcgacggcgtggcgcaggcgctcgaggccgacggggccctgcacgtggtgctgtgcggcccggccgaggtggtagagccgttcgcggcggcgcacgagcgctgcgaggcgcgcgcgacgaccgaggtcgtcggcatgggcgagcacccggccgaggccgtgcgcaagaagaaggactcgtctgtcgtggtgggctgccgcctggtgaaggagggcgccgcgcagggcttcttctccgccggctccacaggcgcctgcctggcggcggggacgctcgtcatgggccgcatcaagggcgtgtcgcggccggcgctggccacggtcatcccgtcgcccgtgcgcccggtggtcatgtgcgacatcggcgcgaacgccgactgcaagcccgcctacctcgtgcagttcgcccagatggccaccatctacgccgagcgtatcgtggggatagagaacccgcgcgcggcgctgctgaacatcggcgaggaggaggcgaagggctcccagttcgcccaggaggcctacgcgctgctgaaggagcagctgccgaacttcgccggcaacgccgagggcggcgacatcctccccgcgaagttcgacgtcatcgtgacggacggcttcacgggcaacgtgtgcctcaagaccatcgagggcacgtccaagacgctgttcaagacgctcaagggcgttatgatgaaaacccccgtcacgaagctgggggctcttgccatcaagggcggcctgaaggagctcatggcgcaggtgagcccggacacgtacggcggtgcgccgctcctgggcgtgaagggggcgctgctggtgggccacggctcgtcgaatgccttcgccgtgaagaacggcgtgctcaccacggccggcgtggtgcgcgcgggggtttctgaaataatcgcgcagaccgtggcgaagggcgcgtagtcggctacaatgaaccgaacggcaaggtggccccggcgcgtccgcgtccggggccttccttgcgcccggccccccgtcctgccgggggcgcggggcggcgccgacggaccggaacacacgagagaagcgaccagcagagggccgaaccttcatgatattgaccgaagagcaagaacagaagctcgccagagcgcaagagatactcgactaccgcttcgatagcgagcacctcctgctctctgccatcacccacccctcggcaaccgagggcaagtccgtcaagtactcctacgagcgcctggagttcctgggcgacagcatcctgggcgccatcgttgcggccatagcgtttcaccgcttccacgacctggacgagggcgggctcacgcgcatcaaggtggcgctcgtgtcgggcgcgagcctgtcggacgtggccgaccgcctgggcttcgcggacgtcatcgtgttcggctcgtcggagacgggcaccggcaagcgcggcctgcactccgcgctggagaacgtgtacgaggccgtggtggcggcgctctacctggacggcggcatcggcgccgcgcaggagttcgtggagcgcacgctcatcccgcgcatgtcgctggacatggcgcgcgagccggagaaccccaagagcgccctgcaggagaagctgcaggaggacggcataacgcccacgtacaagctcgtggagacgcaggggccgccgcacgaccgcacgttcgtggcgcaggtgttcgccggcacgcagggcctggcccgcggcaccggccgcacgaagaaggaggccgagagccaggctgccaagagcacgctcgcgcgcctcggcgagttcttcgggctgggcgtggacgaggagacgcgtgccgagaaggccgaggccgcgaagctggccaaggccgagaaggcggcggcgcgcgccgaggagaaggcgcgcaagaagagcgagcgcgcccaggccaagcagcgcaagcaggggtaggccgtgtacctgaagtcgctcgtcctcaagggtttcaagtcgttcgccgaccgcagcgcgctcgcgctcgagccgggtatcacggccgtggtgggcccgaacggctcgggcaagtcgaacatctcggacgcggtgctgtgggtgctgggcgagcgcaatgcgaagaacctgcgcggccaggccatggaggacgtcatcttcgcgggctcgtcggcgcgcaaggccacggggctggccgaggtggacctcgtgctggacaactcggacggcacgcttcccgtggatttcgccgaggtggccatcacgcgccgcatgtaccgctccggcgagagcgagtacctgataaacggggtggtggcgcgccgcatggacgtgctggacatcttgcacgacacggggctcggcacgggcacgcactccatcatcagccagggctcgctcgactccatcctgcagtccaagccggaggaccgccgcgcgctcatcgaggaggccgcgggcgtgctcaaacacaagcagcgcaaggccaagagcgagcggaagctggagcacatggaccagcacctcgcgcgcgtgaaggacgtggcggccgaggtggagcgccagctggggccgctcgagcgcaaggcgaagcgcgcgcgggcctaccaggggctgtccgccgagctctccgagctcacgctggcgctggccgtggacgacctgcgcgtgctgcagcgcgcctgggacgaggctgtggagcgcgagcgggccttggacgaggagctggcgcagaagaaggccgccatcgccgaggccgaggcgcgcgccgaagagctgcaggagcggatacgccgcgagagcgccgacgcgggcgagctggccaagacccatcgccgtgcgtcgtcggccgtggagcgcttcgacggcgccacgctgctgttgcatgagaagcgccgcgctgcgcaggcccgcgaggccgagctgcgcgtggcgctggaggcgggcaaggcgcgccgcgccgcggccgaggccgagcacgcgcaggcggcggctcaggtgggcgaggtgcgcgccgagcgcgagcgcgccgacgccgacgtggcgcgccttgccgaggagcacgcgtcgctcaccgagcgccaccgcgcgctcgaccgcgaggcggccgcgctcaccgaggcgcgccgaggtgccgagcgcgcgcaggagcaggcgcgccgcgagctcgcggccacgcaggagtcgctggccagccgcgaggcgcacgtgaagctcatcgagggcgacggaaaggagctggagctgcagctccagcgctcgcagaccgatgccgcagcgcttgccgaggcggccgcggccgccggcgcggcgctggaggcgctcgccgaccgcgaggcggcggcgcgcgaggcggtgagcacggcgttcgccgcacgcgaggccgcccgcaccgcgctcgaggaggcccgcgacgaggcgtcgcttttggcctcggagatcaaggggctcgaggaggtggagcgcgcgagcgccgccgcagggcccgcccgcgcctggctgctcgatcactccgacgagctgtcctgcgccttggcaccgctctcgcacgtgctgcgggccgaggcggggtcggaggcgctcgtggagcgcctgctgggcggcgacgtggcggcgctgctcgtggacgagaccgccggagcggccgccgtggcggccgcgctcgcatcctgcgacgagcagggcgaggtcgtgctcgtggcccgcgacgacgccgccgggcccggccacgccgccgacgagctgcctgcacgcgccgccgcggcggccgggctcgggcgcgcgctcgtggacgggctgtcgtacccgcccgaggccgctcgcgccgtggaggcgctgatgggcgacgtggtggtgtgcgacggcctggacgctgcgctcgccgcccatgcgcgcgacggcttcggcgcccgcttcgtcacggaggacggctgcgtggtgtggcccgggggcaaggtgacgctcggcgccgctgcagccgacgatgccgagggcgtgctcgcccgcgcccggcgcctcgacggtttgcgggcccgcctcgccgaggccgacgccgcccgcgactcggcccagcaggcgtcctccgcggccgaggaggcgctgcggcaggcccagggcgagagcctgcgcctgtcccaggagctggccgagctgcgcggcaagacggacgccgcccgcgccgacgcgcgccgcgccgaggagaagctggcggccgtgcggcgcgagttcgaggacatcgagcgccagcgcgccgaggccgagcgcaccgtggccgaggcgcggccgtcggtggaggctctggagcagcgtctggccggcctggcccagcagctggaggacgatacggcacgcctcgccgaggcgcaggacgccgtggtgccgctgcggaagcaggcggcccaggtgcgcgacgcgctggcagaggcgaagctcaaggcggccacgctcgccgagcgcgagacctacacgtcccgcgtggcggatgcgcgcgcccgcgagatcgagcaggcggccgcggccgacgccgatgcccgcgagggtttgctgcgcaaagtggtggcgcagcggcgcatcgagcccttgctcgcgatcatggaggagctctccgacagcgcccggcgccgcacgcgcgcgctcgaggaggctgcgaacgccgcccaggacgccgccgggggcatgcaccaggcggccaacgaggcccgtgccgccgcacgctccgcgcacgacgcgttcgacgaggccaacgcccgcatgggccaggcccgggtcgacaagggccgcctggaggtgcaggtggaaggggcggtgaacgccatcgtccacgactgcaaggtgccgctcgaccatgctctcgcgctgcccgcgctagacgaccggggctcggtggaggaccaggcgttcaagctgcgccgccgcatcgccaacatgggcaccatcaaccccgatgccgccgacgagtacgagcgcctcaaggagcgctacgactacctggccgcccagctggccgacctcgacggcgcgcgccgtgcgctcggcaagatcgtgcgcgtcatagatgcccgcatgaaggacgacttcgtccgcacgttcgacgcggtcagcaagaacttcagcgagatcttcgccgtgctgttcccgggcggctcggccgagctctcgctcgttgaccccgacgacctggagaacacgggcgtggaggtgacggcgcagccgcgcggcaagcgcatcacgaagatgatgctcatgtccggcggcgagaagtctctcacggcgctcgcgctcttattcgcggtgtaccgcatccgcacgacgccgttctacatcctcgacgaggtggaggccgcgctcgacgactcgaacctgcgccgcctcacgtcgtacctggaatcgctgcgcgacaccacgcagctcatcatgatcacgcaccagcggcgcaccatggagatggccgacgtgctgttcggcgtgtccatgcaggccgacggcgtgacgaaggtggtcagccagaagctcgagcacgccttgcgccacgcggaatagcgcagcggcctgcgtgcggggagcgggcgatggccgcgctcccgccgcggccgctattcctacttcgcgatcaggtagacgatgttggcgagcgcccagacgaagaacagcacgcagttggccctcgccaggacgttgagcaccttgttcgacagtttctcgcctttgaccagcacgtccgcgttcagcaacgagaagaagaggatcatgagcgagtagctgttcatgttgccctcgttgcccgtggccagcgagtagacgaaacccgcccatatgaagggcagcatgaccagggttatcgcctggaacaggctcgcatcctgccgcttgcgaaactcggggtccttccgctgctcgaaccagcccttcgcctgcccgcttgcagcagcttccaaatgctcttcagccatgatgagacgctccatttccagatagagtatagtgggaaccgaaagtattcgcttgcaagcaggctgattgtagcatagtatccatcattgatatagtagaggagcgaaatggcgaagaggagcccgtacgagacgggggagctgtccgacagcatcttcctcatcctcttggccacgctcgagccggtgcatggataccgcatcatgcagggcatcaaggagtccacgcagggcacggtggagatcgggccggccaccatgtacacgacgctcaagaagctcaaaggcgcgggctggatcgcggagatcgccgacgcggccgaggggcccgagggggagagccgcatccgctacgcggcaaccgacgagggacgcgcggtgctgcggcgcgacttcgagcggcgccgacggctgatggtgctcgccgaggggctgttgggcgggaaggacgggaacaccgcggacatcggggcgatgggcgagggggagcatggcgaagacgacctatagaatgtgcgggggccttgcagtgatgccgggccatgacatggcgatgctcaagaggatgagcgcgaagggctggcatgtgacaggtgtcaaccgggcgctcctgtaccgtttcgagcgcggcgagccgcacggcttcgactacgcggtggacttccagcgcgacttctcggaggaggcgcgggagctgtacggcctcggcggctgggaacccgtcgtgctggggcccggctggcagatcgtgcgcgccgaggccggcaccacgccgctgtacaccgacgacgacgcggaagcggagacgcttcgggagagccggaaggggctgggcctgcgcgcgctcctctgcgcggttgccgcggcgttgctcttcgtgctccagtcacggctttcggcccagggcaacgagccggcgtcgtgggcctgcctcgcggcgtgcatggtcctcgcggccgggttcgtcttctcgctcttccccttcgtcgggtatacgcgttccttgcgcaagatccacgccgagcaggaggcggacccgcgctgctgacgtgcggccccatttgggatacactgttcaggttgttgagaaaggagcccgcacatgggatttttcgataggatcagcgaggggctctcccgctcgcgcgacaagttcaaagagcagatgaacgtcctcctggaccgcggcccggatctggacgacgagttctgggatggcctggaggagacgctcatcctggccgacatcgggggcgcggcggccagcgagatcgtggagaacctgcgtgaccaggccacgcgcaaggcgctgcccgatgcttacgccgttctcgacctgctgaacgaccagatagcctccacgttcacgcccggcggcgaggacgtgttcggcagtgggccggccgtggtgctgttcgtgggcatcaacggcacgggcaagaccaccacggtgggcaagctggccaaggaggccacggacgcgggccgcacggtgctcctgggcagcgccgacacgttccgcgcggcggccatcgagcagctggaggtgtgggcgcggcgcgcgaacgtgcccgtgtgcacgcgcgagcgcggcagcgacccggcgagcgtctgctacgacaccctcgagcgcgccgagcaggagggcgccgacctcgtgctggtggacacggccgggcgcctgcacacgtcggccgacctcatgcgcgagctggagaaggtggtggccgtggtgcgcaagcgctcgaatctgcccgtgttcaccgtgctcgttatcgatgccaccaccggccagaacggccttcagcaggcacgcgagttcgaccgcgcgctcgatctggacggcgtgatcgtcacgaagctcgacggcaccgcgaagggcggcatcgcgctggctgtgagccacgagctggagctgcccgtgctcaagatcggcgtaggagagggcctcgacgacctcaaggacttcgacgcgcatgacttcgcgcgcgccctcgtcggcgacttcgacgagcggggctaagagcgcatggggtctggtgctcggtagaaccatggcactgcgaaggccgtattcgtaattgttcggaagaccatccccagtcgttgaaaaggtgaagttcgcgtccgcatgcgtcgatcaagtataatctcccattaagcgtacgacatgaccgaccgatgggagcgcacttccatgctcgagaacctctccgaacgccttcagggcatattcagcgggctgcgcggcaagggccgcctgaccgaggacgacatcaacgacgccatgcgcgagatccgcatggcgcttctggaagccgacgtgaacttcaaggtggtgaagggcttcatcgcccgcacgaaggagcgctgcctggacgcggaggtgctcgactcgctcacgccggcgcagaacgtcatcaagatcgtgctcgacgagctcaccgagctcttgggccgcacggacagcaagctcgtgctctccagccgcatccccaacgtcatcatgctcgtgggcctgcagggctccggcaagacgacggccgccgcgaagctggcctaccgcctgaagcaggagaaccactcgcccttgctggtggcctgcgacgtgtaccgtcccgccgcggccgaccagctgcagacgctcggcggcgagatcggcgtgcgggtgtaccgcggtgacggccaggacccggtgcgcatcgccaccgagggcatccaggacgccatcgacaacctgcgcgacgtggtgatcgtggacacggcgggccgcctgcacgtggacgacgagatgatggacgaggccgaggccatcaagcgtgcggtcaagcccgaccagatcctcatggtggtggacgccatgaccggccaggacgtcgtgaacgtggctgccgccttctccgagcgcgtggacttcgacggcgtgatcatgtcgaagatggacggcgacgcccgcggcggcggcgcgctgtccatcaagcaggtcacgggcaagcccatcaagttcatctcgtccggcgagaagccggactcgctcgaggagttccaccccgaccgcatggcgaagcgcatcttgggcatgggcgacgtggtcagcctcatcgagagcgccgtgaaggtgcagcaggaggaggtcgagcaggagcaggccgagcgcatgatgcgcgcgaacctcacgctcaacgacttcatcgacatgaaccgccagatccgcaagatgggcggcatctccaagctgatcagcgcattgcccggcggcgacaaggccatgtcgcagggccaggtggacgagggcgcgctcgaccacatggaggtcatcatcaactccatgaccaaggccgagcgcgagaagcccgacctgctgaacggctcgcgccgcgcgcgcatcgccgccggcgccggcgtgaccgtctcggacgtgaaccagctgatcaagaagttcaacgagacgaagaagatgatgaagaagatgatgcccgccgtggaggacctgcagggcggcaagaaggggaggaagggcaagaagggccggcggcgtcgcatgggcctgcccggcatgggcggcatgagcatggccgacatcaagaagctccaagacatgatgggcgaataggcacgatgcggcggcaacggggccgccgcattcgtttgaggagggcgctatgcagggttacgagagcaaggaagcgctgatcgccgagatccggaagacggccgggctgttcgccgcggagttcgacgacgtggccgaggccgacgccgactcgatggtcgagggcgtggaccgcacgccgcgcgagatgctggcctaccagctggggtggatggggctgttgcgcggctgggacgccgacgagctggccggcaaggacgtggccatgcccgcgcccggctgcaagtggaaccagatgggcgttctgtaccaaggcttctacgacgagcatcgcgcggaaccgttcgagcacctgaagcggtcgttcgaggacgacgtggacgcgctcgtgcagtgggtcgacggtttctccgacgaggagctgttcgagccgggcggcagggcctgggcgcagtcgaccccttcgaactggccggtgtggaaatggatccacacgaacaccgtcgcgccgttcaaatcgttccgcagcaagatccgcaaatggaagaaggcgcgggggtaggggaggctgataccattgactcatggacccgcccattcccgaatgcgttaggtatgctaaaggttgcggtagacctctcttcgatggcccactttgaagatctcgatgaccacgcgcccgctgtcgaccgtgccgagcacgcggtacgtcccgacccgccagcgccagccgttgtctatgccttgcagcttcttcgcgttgggaagcgtgcaagggctatcgcatccgtcgagtcgatcgatgaactcggacaccagcaaaagcgttctgcgatcaaggccatggagctgcttcagcgccctgttcgtcagctcgaccgagtagcccaatcagatcgccagcccgaggtcggccttggcctcgttccaggagatacgcgcgccatcgtcctcttcgagcgcttgggcgaggtcgcgggcgtcgagctcgtcctccaagcgctccagcgtccattgacgcacttgggccgagaacgtggagccgttcatcttggcgaatgcggtgatccactccttctcttcaggctcgaacctgattgctgatgcggtcatggccatagctgcctcctccatgcgtttacgttgtcaactcaatatagagggaagcgtttacgttgtcaactgaaaagcggctcaagacgccccgttgctcaaaacagttacaatggtcgagttccggggtgatcggttctgaaggaggcgcgaacgtgccgagcgtactcatagtcgacgacgacgcggatctgtccgccatcgtggcgcgctacctcgaaagcgaggggttcgcggtcatgcgcgccgcgagcgccgaggaggcctacgacgtgctgggcgcccgtccgttcgacctcgtgctgctcgacatcaacctgccgggcgacgacggctttgcggcgtgcgaggcccttcggcgcgcgagcgacgtgcccatcgtgttcgcgtcggcgcgcacgagcgagacggaccgcatcgtcgggctcgacacgggcggcgacgactacctgcccaagccctactctctgcgcgagctgctcgcgcacgtgaacgcgctgctcaggcgctctcggggtcgctccggcggcgcgggacggccgctcgtcgcggggccgttcgccctcgacgaagccgccgggacgctcgcgaaggacggcgtcgtcgcggcgctgtcgcccaaggagttcgcgctcgcccgcttcctgatcgcgcacgagggcgagacagtgtcgaaggagcgcctgctggccgaggtatggggcgcgttctcggaggtggagccgcagacggtgtcggtgcacatgagctggctgcgcgcgaaggtggaggacgacccttcccgcccggcccacttcaagaccgtgcgggggaggggctaccgcttcgacgccgagggcggcgcgtcgtgacggcggcttcgcgcgagggcgcgcgcatcgcgcgacggctcgtcggcatcgccgccgccgcgatgctcgccctcgcccttgcggcgctcgcggccacggccctgctcgcggacgacgggccggccgccgagatgcgggcgcagaccgtggagctgaacgcggcccgcgccgagctgcccgaaggcgcgctctcgcgcgcgcaggatgcgctgcgagcggccgccgacgcgcgcggcggcctccccgtcgcgcttgtctgggcgctcgccgcgctcggcgcggcattcgcatggggcgtcgtcgcctacctctacgtcggcgtcgtgcgtcccttcatgcggttggaggcgttcgcgcaggacgtggcgtcgggcaacctcgactccccgctcgcctatgagcgcagcaacccgttcggccgattcacctgggcgttcgacaatatgcgcgtggagatcaagcgcgctcgcgccgtcgaggccgaggccgtggagcggggcaagacggccgtcgccgcgctgtcgcacgacataaagacgcccatcgcgtccatccgcgcctactccgaggcgctcgagctgggcctcgcgcgcacgtaagcggagcgcgagggctacgcgcgcaccatcgcgcgcaagtgcgacgaggtgacgtcgctcaccgacgacctgttcctccacgcgcttgccgacctcgaccgcatccaggtgcgctgcgaggaagcgcccatcgcccgcgtcatggctcgggtggtcgcggacttcgacgcggacggcagggtgacgctcgggcgcctcgacgaggcgcaagcgagctgcgacccgaagcgcctcgagcaggcgatcgggaacctgttggcgaacgccgccaagtacgcgcccggcgcggacgtggaggtggagggcgtcctcgacaccgccgcgcgcgcctatcgcgtgcgcgtgcgcgaccgcggccccggcatcccgcccgaggacctgccgttcgtcgccgaccgtttctaccgcggctcgaacgccggcgatgcgccgggcgcgggcctcgggctgttcatcgtgcgctacctggttgagcagatgggaggcggcttaagcctcgagaacgccgagcccggcctcgccgccgtcctcgaactccccctcgcgtcttaaggacgccttaatgttcgcgcggctacgatgccttccaacgaataggcgagacgagagggcatcatgaagaatcccatcatccaaaccgagcggctgtgcaagagctacgcggccgacggggtgcagacccacgtgctgagcaacgtcgaccttgacgctctacgaaggcgatttcaccgccatcatggggccgtcgggctccggcaagtccacgcttctgtactgcctttccggcatggacgccccgacggccggcgacgtgcgctatcggggctcgtccatcaccggcttgcgcgagcgcgacatggccgagctgcgcgcgcagcgcttcgggttcgtgttccagcaggctcacctcgtgtcgaacctcacgctgttcgagaacgttgccgtgcccggctacctgaagaagggccgctcggccgccgacacgcgcgcggtggcgcaggccctcgtcgagcgcatggggctcggcccggacgcgcaccacctgcccagccaggcgtccggtggccagcagcagcgctgcgccgtggcgcgcagcgtagtgaacggccccgacatcgtcttcgccgacgagcccacaggcgccctcaaccgcgcgaacacgctcgaagtgctcgcgctcctcggcgagctgaacggcagcggccagtccatctgcatggtcacgcatgacgtgttctgcgccctgcgcgcgaaccgcgtgctgtacctggaggacggcatgatcaagggcgagctcgaactgccggccttccgcacgcaaggcgacgccgcctacctcaaggcccgcgacgcccaggtgaacgcctggctgtcgtcgctggcttggtagggggtgcgagatggcgctcatgcgcacgctcgtcgcggccggcctcaaacgggggaagggctcgttcgcggacatcttcctgctcatggccctcaccgccgctgcgctcaccttcaccgtgagcatgtacgcggacttgaacgcccgcgaggaggtcgcgcttgccgagatcggggcgggcgacgtgtatgccgtcgatatggcgacgaacctcactgacgaggtggccgccgaggtggaggcgctgtccgaggtaagcgaggcgcggttgaacggcgccctctccgttcccgtgaggttctacgatgtgggcggcgaggccgtggacaagaaccccacctcgggtaccgcgcttgtggcttggggcgacgccctcggcttccgcctgttctccgacgacgggacgcgtctcgtcgtcggggctttcgagccgggccccgatgaggtctacgtgccggcgtcgctcaaggtcgctcctggcgttcaggtaggcgacgagctggaagtgctggtgggcgacgaggcgcgtcgcttcaccatcgcgggcttcttcgaggatcctcagcttggcacgccgtttctggagatgaagcgttacgtggtggcgcagggagcctacgacgaggtgggctcgctcgtcgacgcagccgtcgcgcagggcggcgaaccggccgacgttctttcttcctcgtcgaagatgtcggcgtatcgcatggccgagatcaacgtgcgcttgtcggacgaggcacgcgcggcgggcacgacctcgaccgacctcgcccggctcatcgcagatgaggtggcctgggcgaatacggcaacgggcatgttcgccgccgacacgcttgccggctatgccatgatggtcgtggtcatcggcggcgccgtcctgggcgtgttcgcgctgctgctgttcgtgatagcgctcgtcatctgcacgcacgccatcgcgacgtccatcgaggaggattacgcggactacggcacgctcaaggccctcggcttgtcgaaccgctcgctgcgcggcatgctgggcgtggagtacgtgggcgtgagccttctgggactcgcggccggcctcgggttgggctgggcgctcgtgcctcccgtcctgccgttcttcgcgcaattcaccggcgtgctggcgacgaacgcagcgcctcctgcggcggcgctgctccttttggcggcgctgctggcgctggtcgcggccgtcgtcgtatgcaagacgcacaagctctcgcgcatctcgccgctcgtcgctttccggggcggcgcggccgacgtgacgttccgcagccgggctgcccgcccgttgggcggctcccatctcggtttggggttggccgtgcgcgctatcgtatcggcgaagcgccgctacgtggggcttgcgggatgcgcgctggtcatgtgtgcattcatcgtgctcgtgttcggcataggcggcgcgctcggcggcccgaatgcggcgaagaaggctttcggcatgtggacgagcgacgtgtcggccaccctcgtctcgcccgacgcgagcttcgacgaggtggagcgggccatcgaagaggtgagccccatagagaagtcgtggaaggagtcgttcgccatggtgagcttcgggggcgagagccactcttcgcgggcttgagcgacctttcgctggtgacgggtgtggtggcagggcgtctgccgattcacgacaacgaggcgctcatcggcggaaaccttgcgaagtcgatgggtcttggcattggtgacgagctggctgtcgacggggcggacggcgaggagcgccgcttcgtggtgtgcgggctgctctccgccatgttcaatgccggctacggcaccatcctcacctacgacggagtgtgcgacctggccggaaaaggcgcggacgtcgccgagacggcgcggcagtacgtcctgtccgatccgcagaaggccgacgaggctcgtgcggccatcgaggcgcgcttcggcgatgcggtggacgcgcggcctgccggcatgttcagcgataccgagggcatgatcggccttatccagcagctgttcaccatcatgggcttcgccatggcggcggtcgccgcgacgctcgtgttcctcgccgtgtcgctcattatcgggcgcatgttcacggtcgagcgtcacgacttgggcgtgtaccgcgcgctcgggttcacgacgcgcgcgcttcgcgtgcagttcgccctgcgcttcttcctcgtggcgctcgcgggctgctcggcgggcgcgacgctggcggcgctcggcggcagctggctcatggggcagctgttcggcctcttcggcgtttcgcgcttcgccatcgatacgaatccgctcatggtaggcggcctcacgctgggcctttcgatgctgttcctgatcgccgcctacgtgagcgcccgcaaggtgaagcgcgtggacgtgcgtgagctggtggaggaataggaggcgggaggggagggcgcgggggaggggcggccccgtccgcgacccgccgcgtccgccgcccctcgcgccatgcgccgccgcggccctcccgtcgcctccggcttcccccctcccgcgcgctgcggtcgcgcgggtgcggtatactccgtccatgacacgcgacggaaaggagctgcgcatgggccttgagatacggccgtaccgcgaggaggacctggcgggcatggtgaaggtgtggaacgaggtcgtcgagaacggcgaggcgttcccgcagatcgagcctttgaccttggagtctgcggcggagttcttcggcgcgcagacgctttccgtggtggccgacctcgacggcaaggtcatgggcctgtacgtcctgcacccgaacaacgtggggcgctgcgcgcacgtgggcaacgcgagctacgccgtggcctcgagcgtgcgcgggctgggcctcggccgcgcgctcgtggaggactcgctcgcgcaggcggcgcgcaagggcttccgcggcctgcagctcaacgccgtcgtggcgagcaacgccgcagccgtccacctgtacgaggatctgggcttcacccgcgtgggcaccgtgccgggcggcttcgcgaacttcatgggcggctacgaggacatccatatctactaccgcgactgcgtggacacgcgccgcccctgctgaggatagggcgcgcgcccggtccgggcgaacggcgacgacgagggccggggcggcatcgggaaaatttccggtgccgccctttccgtcgaagtggtatccttgtgcgcgggggggggagaagcgctggaggattcgcatggggtaccgcatcggcatcgatgccgggtcgaagaccatcaaggtggtcgtcctcgacgaggacggcgccatcgtgcacgccgtctaccgccggcaccgtgccgacatccgcacgacgctggccggcgtgctgcacgacctggcgtggcgttacggcaacctgcgggggcacgtggccgtgaccggatcggcgggcatcgcgctcgcggggctgctgggcctgccgttcgtgcaggaggtggtgtccaccacgcgcgccgtgcaggccgcctaccccgaggcggacgccttcgtcgagctggggggcgaggacgcgaaggtggtctacctcaccggcggcttggagcagcgcatgaacgccacgtgtgccggcggcacgggcggcttcatcgacaccatcgccttcatgataggcgtgcggctgtccgacctgagcgggctggcgctgggggcgaaccgcatctaccccatcgcgtcgcggtgcgccgtgttcgcgcagaccgacgtgcggccgctgctcaacgccggcgcgcgcaaggccgacatcgcggcgagcgcgctcgaggccgtcgtgcgccagacgctggcggggctggcctgcgggcgccccctggaagggacggtcgtgtttctgggcggcccgctcgagcacatccccagcctggtgcaccgcttccgcgccgcgctcgggctgacgcgcgagaccggcgtcaagcctccgcaggcgcacctgttcaccgcgaagggcgcggcgctcatggcgcgcgagccggccgacgacggcgcgccgcctcgcgccgtctcgctctccgagctggagtggcaggtgcgcgccgccgacgatcccgccgacgacctggaccgcctgcccccgctgttcgccgacgcggccgagcgggcggcgttcgaggagcggcacgcggccgagcgcatgccgcgcacgcgcctgttcgactgcgaagggccgctctacctggggctggacgccggatccaccacggtgaagtgcgcgctggtggacgggaaggggcggctcgtgtactccgactaccgccccgccgagggcgacgtgctcgagaccgccgcggccctgctgggcgatatgtaccgcgtcatgccgcgggagtacggcagcgcggagccgctcgcgcacctggcccacgccacggccacgggctacggcgaggacctgctgcgcgcggcgctcggcatcgactcgggcgtggtggagacgacggcgcacctgcgggcggcgcgcgccttccgaccggacgtgtcgttcgtgctcgacatgggcggccaggacatgaaggccctctgggtgcgcgacggcctcgtgtccgacgccgtgctgaacgaggcgtgctcgagcggctgcggcgcgttcgtcgaggggacgtcgcactcgctgcacctgtcgcccgcgcggttctccgaggccgcgctgcgggcggggagccccgtcgacctggggacgaagtgcaccgtgttcatgacgtcgcgcgtgcgccatgcgcagaagataggcgcggagccgggcgacatcgccgccggcatcgcctactccgtggtgcgcaacgcgctgtaccgcatcatcggccgcggcagggcggccggcatgggcgacgtggtgctcgtgcagggcggcgccttcaagtccgacgccgtgctgcgcgcgttcgagctggtggccggggtggaggccgtgcggcccgacacggcgcacctcatgggcgccatcggcgcggcgctcacggcgcgcgaccgcgcgcaggcggccgcggcggcgggggagaagccccgcagcgcgctcgcggacgccgcgcgcctggcggccctcgcgccccggcgcgccgccgtgcgctgccccgggtgcgggaacgcctgcgcgctcaccgtggtgacgttcgagggtgcgcgccgcttcgtggcgggcaaccgctgcgagcgggcccacggctttttggacggcgccccggcgggggccgggggagcgggcgcgccccgccgcgcggcgggcgggggccggcggcgggcgccgaacgtcgccgcgctcgagcgccggctgctggagcgctgcggcgacgttgcgggcgacgcgcgtcgcggcggcgtgcgcgtgggcctcttggccgcgctcaacgggtacgagagcctgccgttctggcacgcgctgctgcgcgatttggggttctcggtgctcgtggcgctgcgggacggcgaggagccgtccgccgaggggctggagaccatcccgtcggagagcgtgtgccggcccgcgaagatcgtccacgcgcgcctgcacgccctcgcgcggcgcggcgccgacgcggtgctcatgccgcgctatgcgcgcgggagccgctgcccggtgtcgagcgggtacgccgacgcggtgcgcgacagcgtgcccctcgtggccgacgggacggtggccctggcggcccccctgctggccgccgtgagccccgagaagatcgccgccggcgaggccgaccgcgccgcgctgcgcgccgcgttggacgcgctcgcgcccgcgggcgcgccggtgggcgcgggcgagctcgaccgcgcgctcgcggcggggctcgcggcgcagcgcgcgttcgagggcacggtggcccgcgcggccgaccgcgcgctcgcatggattcacgccgcgcccggccgccacggcatcgtgctcgccgggcggccctaccacgtggacgccgcgctctcgcacggggtggacgccgtggcggggcgcctggggttcgccgtgctgccgccgctcggcctgaagggccgcctgcgaaagctgcgcgaccgcgagaaggccgcgggcgaacccgcgcttgcgggcgcggcggcgccgtggaggccggcgcggcgcctcgcggccctggcgcgcctcgtggcgggcgacccggcgctcgagctggtgtgcctgcagtcgttcggctgcggctacgacgcgctcggcatcgacgaggcgcgcgacgtgctggaggccgcgcgccggccgttcaccgcgctcaaggtcgacgacatcgtggacacggcgcacctccgcatccggctgcgcacgctcgccgaggccgtggaggcccgcgacctgcgccgcgcgggcggcgacgcgggtgtgtcggaccggggccgcgcggccgcgcagggcaccccgggcgccgccccgcccgccccggccgcgcccgcgggggcccggccgcaagcagggtcccccttggccccgccccgcgccccggccgccgccggcgaggcgcccgtcccgctgctcggccgcatcgcgcgcgccgacgtcgagcgcgcgcggcgcgacgtcaatcccgacgcgtgccacacggcggccgtcctcgcgggccgcgccatccgcctggccgaggccgacccgtcgctcgcgcgcctcgccgtgccgcgcgtgtgcgagcgctgcctgctggacgcgctgccgcgcctcgtggagcgcggctgcgggcgcgcggtcgacatcgtctggcaggacgcctggccgcccgccctcggcgcggcgtccgcggagcgccccgccgcccccgccgatcgcccgcgcatcggcatcgtgggcaacgcgctgctgtgcttcgacgcctacctgaacgacggactggccgcgttcctggagcgtctgggctgcgaggcggtgctgcccgacccggccaacctgcttgtcgacgacgtgcgctacctgcgccagctcgacgcgttccaggcggccggcgtcgaccacgtggtgtacctgcagagcttcggctgcctgaagggccacgtccaggcgcgcggcgccctgcacgcagccgcccgccgttaccccggcatgcccgtcaccgtggtggactacgaccccgaggcctcggccctcaaccgcgagaaccgcatccgcctcgccgcagcagccgcgcgccaggctcgcgccgcgcgccgcgagggcgcctgaaacgtgggcttttcgaggacgtgcggggtcggggatgccggcccgcggggcgttcgcgtacaatagcgggcactacgagacgacaatcgcttgtcaaacggaagattacgccgtatcataagcaattgctgttttgcgggaatcgtgcgcgcgcccagaaggcgccgcccaacccgcccgacctgacgtaagaagcaaaaggagttcaccttcatggcagtcaaaattcgcctggcccgccacggcgccaagaagcgcccgtactaccgcatcgtcgtcgccgacgcacgctgcccgcgcgacggcaagttcatcgaggaggtcggccgctacaacccctgcgccaaccccacgatggtgcagttcgacctggagaaggtcgaccagtggatcaagaacggcgcccagcccaccgacacggtggcgcgcctgctcaagaacgcccgcgagaacgcgtaagcgccatggccgagcagacggaagacatcgccggcctcgtcgagtccgtcgtgcgcccgctcatcgagtttcccgatgagctgcagatcgaggcgagcgatgccgaggacggctccatcctcgtggagctccgcgtgaacgaggaggacgccggcaaggtcatcggccgccaggggcgggtcatcaaggccatccgcacgctcgcccgtgccgccgcgtcgcgcacgaacacccatgtcgaagtggagctcatcgactagatgcgcgcttggacggacgtcgccgtactggcgagaacgaagaacctgcagggagggttcgtcgcgcagagcgcggcgggccttccctttttgctgtcggagggcctggaggtggccttcgtgccgcccgtgtcggacgccccgcgccgcgcgcgggtgacgaccgtgtctgccatcgacgaccgcacggccgtcgtggcgttcgacgctgtagagggcatcgacgcggccgaggccctcgtaggctgccactgcctcgtgcgccgcgcagacttgccggagggggcgctggacgcgcatgccggcgcctgggacggctgggaggtgcacgacgcgcgcgccggcctcgtgggcacggtggcgggcatccaggagctgccgggtcaggatctgctggaagtcgtcccagcggccgggggccggacggtgctcgtgccgctcgtcgacgcgctcgtggccggcgtggacgaggacgcgcggcgcatcgacgtcgacctgcccgacggcctgctcgagctgtagcagcagcgccgccgtaccgcctaccgattggacttcccgtgattatcgagacgctttcgacgttcccttccatgtacgactccgtcatgggcgcgtccatgatgcgcatcgcccaggagaagggcatcatctcgttcaaggcgcacgacctgcgcgactggacgcacgaccggcaccgcacgaccgacgacgacccttacggcggcggcgacggccttgtcatgaagtgcgagcccctgttcgaggcttacgacgacttgacctgcggagccggcgctgacggcgaggccttgccgcgcccctgcaccatcttcctggccccgcacggccggcccttcgacgacgcgctggcctgcgagctggcgcgcgaggagcgccttctgttcgtgtgcggccactacgagggcatcgacgagcgcgcctatgcgctggccgaccgcaccgtctcgctgggcgactacgtgctcacgagcggcgagctggcctccatggtggtcatcgacgccgtggtgcgcaagctgcccggcgtgctgggggcgcccaccggcgcccaaggagagagcttcgccgacggcctgttggaatacccccagtacacgcgcccggcaacgttccggggcagggacgtgcccgccgtgctgctctcgggcgaccacggcgccgtggcccgctggaggcgcgagcagagcctcgagcgcacggcgcgcctgcgccccgacctgctggacgcggccgacctctcggatgccgaccgcaggtttctgctacgcttggcggacggaagcgggcgctaggcccgcacggaacagagggaaggcggggccatggaccacggccggcatgcgcgcgcgggcgcgccgagcgcgccgcgcaggatcgtcgcggcgctctggtgggcagccttcgtcgttgctttggcgtggctccaggtcacgttcgtgcaccaggccttcgccgtgccctccggctccatggagaacaccatcatgaccggcgaccgcgtctacgctgagaaggtgagctacctgttccgcgacccccagcccggcgacatcgtgacgttccaggacccggagatccccggccgcgtgctcatcaagcgctgcatcgcggtgggcggccagacggtcgacctcgtggacgggcgcgtggtggtggacggcgtggcgctcgacgagccctacacccgcggcctgccctccgagccgctcaagacggcgctcggcgtggaggtgtcctacccctacaccgtgcccgaggggcacctgtgggtcatgggggacaaccgcacgaactccaacgactcgcgctacttcggcgccgtcgggcgctcgtccgtgaccgcgcgcggcgtggccgtcatctggccgctggaggacgccgcccttatcgggtaggggcgcctgcgggcggagcaacgggcgcgcgcgggccgttcgcccggatttcgcccgctgatcgggaatttctgaagagtttatcgaacgcgccgggcgtgctggcgcgaagcgctatcatatacgctcgtgacttcatccgggcgccctccgcgcccgttcggaaaggatagacaaccttcatggactccgggcaacacgccgagccgcgccgatcgggcgcgttcaggaccatcctcagcctgctggtcatggtggccttcatcttcgggctgtcatgggcgctgcgcacgttcgtattccagccctacgagataccctcaggctccatggagaacaccatcatgaccggcgaccgcgtctacgctgagaaggtgagctacctgttccgcgacccccagcccggcgacatcgtgacgttccaggacccggagatccccggccgcgtgctcatcaagcgctgcatcgcggtgggcggccagacggtcgacctcgtggacgggcgcgtggtggtggacggcgtggcgctcgacgagccctacacccgcggcctgccctccgagccgctcaagacggcgctcggcgtggaggtgtcctacccctacaccgtgcccgaggggcacctgtgggtcatgggggacaaccgcacgaactccaacgactcgcgctacttcggcgccgtcgacgaggacacgctcaccggacgcgccgcgctcgtgtactggccgttcaacaacttcggcctgctggactagcaggcccgcacccagggatcgaagccgcctcgcgcgactgcataggatagggaagacaaggagagccatgccaaccgaaaccgagcccgccgcccgtgcggcggggcaggcggccgccgaggcgctgccgcccacgttccaagacgtcatcatgagcctgcagcgctactgggcgggcgcgggctgcgtcatcctgcagccctacgacaacgaggtgggcgccggcacgaacgccccggccaccacgctgcgctcgctgggccccgacacgtggcgcaccgcctacgtgcagggctgccgccgccccacggacggccgctacggcgagaacccgaaccgcacgcagcactacttccagttccaggtgctcatgaagccctcgcccgacgacatccaggagatgtacctggggtcgctgcgcgccatcggcatcgacgtggacgcgcacgacgtgcgcttcgtggaggacgactgggagagcccgacgctcggcgcgtgggggctgggctgggaagtgtggatcgacggcatggaggtgacgcagttcacctacttccagcaggtgggcggcttcgagtgcaaccccgtgcccgtggagatcgcctacggcctggagcgcctgaccatgttcgtgcagggcgtggactccatgttcgacatcgtgtggagccgcggcgccgacggcgtcacgttcacgtacggcgacgtgtacctggagaacgagcgccagtactccacgttcaacttcgaggtggccgacaccgatttcctgttccaggagttcaacgaccgcgaggaggagtgcaagcgcacgctcgcggcgaacctgccgctgccggcctacgacagcgtgctcaagtgctgccacacgttcaacctgctggacgcccgcggcgtgatatctgccacggagcgcatggcctacatcctgcgcgtgcgcacgctggcaaaggccgtgtgcgcgagctacatggagcacgtggtgggcatgaagcccgccgaggaaggggaggaggccgaccgtggctagcctgcatacgctcgccttcgagataggcaccgaggagattcccgcgttcgacctgcacaaggccacgggccagctggagaagctcgtgcccgaggcgctcgacgccgtgcgcatcccgcacgggaccgtgtccgtgcacaccacgccccgccgcctcatcgtgctggcagaggacgtggccgacgagaccgaggcgctccaggaggtgttccgcggcccgtccgccaagatcgcgttcgacgccgagggcaacccgacgaaggccgccatcggcttcgcgcgcggcaagggcctggacgtggaagcgctcgagcgccgcgaggagaacggcgccgagtacgtgttcgccgagcgcagcgtgcccgcccgcgacgtggcggagcttttgcccggcgtgctggagggcgtgatcaccggcatctcctggccgaagtcgtgccgctggggcacccgcagcgagttcttctcgcgcccggtgcgctggctcgtggccctgctcgacgagcgcgtggtgcccgtggagttcgcgggcctcacggccggcaggctcacgcgcggccaccgcttcctggcccccggcccgcacgaggtggccgcggccgccgacctgctccccgtggtggagggcgccttcgtggtgacgagcgagcaggcgcgcgagcagcgcatccgcgcaggcgtggcggaggcggaggcccagacgggctaccgtgccgagctgcccgagaagacgcttctggaggtggtgaacctctccgagtaccccacggtgctcgtgggcacgttcgacgaggagttcctgcgcgttcccgaggagatcatcgtggacgccatgctcatgcaccagcgctacttcccgctgtacgacggggagggcaggctcacgaacaagttcatcgtcgtgacgaacggcgacccggcgcatgccgccaccatcatcgacggcaacgagcgcgtggtgcgcgcgcgcctgtcagatgcgaagttcttctacgaggaggacctgaagcacccgctggagacgtacgtcgaccgcctggacgaggtggtgttccaggaggtgctcggcaccatgaaggacaagaccgaccgcatcgcggcgctggcgcgccacctggccgccgacgcgcagctgggcgcggcggacgccgccgatgccgagcgcgccgcgtacctggcgaaggccgacctcgtgacgaacgccgtggtggagttcacgagcgtgcagggcgtcatgggctcgtactacgccgaggcgtcgggcgagaacgagcaggtggcccgcgccatcgccgaccactaccgcccgcgcttctccggcgacgagccgcctgcgtccgacgtggggcgcgtcgtggccatggccgacaagctggacacgatctgcggcctgttcgccgtgggccagggccccacgggctcgtccgacccgttcgcgctgcgccgcagcgccatcggcatcgtggccatgcttgaggccggcctgcccgtgtcgctcatgggggccgtggacgcctcgctcgccacgtacgcggatgccggcatcggcttcgaccgcgacgacgtgcgtgcccaggtggccgacttcttcgtcacgcgcacgaaggtcatgctgcgcgactccggcgcgtcccccgacgccatcgacgccgtgctggcggcaggcgtggaggagccggcccaggtcatcgcccgcgtgcgcgccctcgaggccgcccgcaccggcgagcgcgaggcgttcgacgatctggccacggcctacgcgcgcgccaacaacctgcgcgacgcggagctgggcgaggaggtggacgaggccctgatgggcgacgccgagcgcgccctcgcgtccgccgcgcgcgacgtggagtcgcaggtggccgccgcgctcgccgccgacgactacgcggcggccctcgccgcgctcgccgacttgcgcgcgcccatcgacgccttcttcgccgacgtcctcgtcatggacgaggacgaggccgtgcgggtgaaccgcctgcgcctgctgaaccgcttcgtgggcgtgttcacggacgtggccgacttcggcaagatggcgaagggcggcaagtagcgccatggacgacctcgtctcgtacggcacgccgagcgccggccccgggggccttcccaccatacacgtggtcagcgactcggtgggcctcacggcccaggcggtggcccgcgcggccgccgcccagttcggggtcacgaaccctgccatcgaagtgctgccgaaggtgcgcacgttcgaggagatcaagtccttcatcgacgagcacggcgccgtccaccggcagaactcgggcgacgggcgcatgctcgtgttctacacgctggtgaacggtcatctggcgggccagctggctgcctatgcggcagctcgcgacgacatcgtggcggtggacctcatgaccgacgccatcggggccatcgcgcgcatgacggggcgcgatccgtccactaagcccggcggcctgcacgtggccgaccagtactacttcaagcgcatcgaggccatcgagttcaccatcgcccacgacgacgggcgcaacccgcaggagctctcccaggccgacatcgtgctcttgggcgtgtcgcgctcgtcgaagacgcccacgtccatctacctggcgcagcagggctacaaagtgtcgaacatcccgctcgaccccgccaccgagccgccgcgcgaactgctcgacgtggagcgcacgaggctgttcgggctcatgaccacggccgaggtgctcatcggcatccgccagcgccgcctgggcaatgcgagcgtggtggcgtcgagctacgcggatcccgagtacgtgtaccaggatctcgagaaggcccgtgcgctcatgcgcaaactcggctgtattgtcatccacaccgaaaatcgcgccgttgaggaaacggctcaagaaattttgcgctactatgagcgcgcccaccctccatccgctgatatgatgggctaggcctgcgaaccagcaaggggttcggtactctgtacgattgaaacgtcgcgtttaaggagaaaaaggtgaccgaagaagtcaaacgagtctatgcattcggcaaagacgctcagggcaacaacgtaaccgagggcaacacgcacatgaaggcgcagctgggcggcaagggcgccaacctcgccgagatggccaacatcgggctgcccgtgcctcccggcttcaccatcacgtgccagacctgcatggagtacgccaacgccgacaacacgtggcccgagggcgcgctcgacaccatccagtcctaccgcgaggacctcgaggcccgcatgggcaagaagatcggcgatgcggccgacccgctgctcgtgtccgtgcgctccggcgcgccgatgtccatgcccggcatgatggacacggtgctgaacctcggcctgaacgacgagtccatcaacggcctcatcgcccagaccgagaacccgcgcttcgcctgggactcctaccgccgcttcatccagatgttctccaacgtggtcatgggtcttgacggcgacctgttcgagaacgccatcacgtccatgaagaacgtgcgcggcgccgcctccgacaccgacctctcggccgacgacctcaaggagctcgtggccgagttcaagcagatcttctccgagaacgtgtccgccgaggagtacccgagcctcgtggtggacggctccgtgcagttcccgcaggacccgagcgcgcagctgcagctggccatcgaggccgtgttcggcagctggaacaacccgcgcgcggtcctctaccgcaagcagaacaagatcgccgacgacctgggcaccgccgtgaacgtgcagtccatggtgttcggcaacaagggcaacacgtcggccacgggcgtggcgttcacgcgcaaccccgccaacggcgagaaggagttctacggcgactacctggtgaacgcccagggcgaggacgtggtggccggcatccgcaacacgagccccatcgccgacctcaagcacgtggagggcctggaagaggccggccgcgagctggaagaggtgttcgtcacgctggagaaccacttccgcgacatgtgcgacatcgagttcaccatcgagcagggcaagctctggatgctccagacccgcgtgggcaagcgcaccgccgccgccgcgctgcacatcgccatcgagatggagaaggagggcctcatctccaaggaggaggccgtcatgcgcgtcgaccccgagcagctcgaccagctgctgcacccgcagttcgacaagaacgcctcctacgacgtggtggccaagggcctgaacgcgtcccccggtgccgccgtgggcgaggccgtgttctcggccgccgacgccgtggccgtcaccgaggccggccgcaagtgcgtgctcgtgcgctgggagacgaaccccgacgacctggccggcatgatcgccgccgagggcatcctcacgtcgcacggcggcaagacgagccacgccgccgtcatcgcccgcggcatgggcgcgccgtgcgtctgcggcgtggaggccctgaagatcgacgccgagaagaaggaagcggccgtggccggcacggacatcgtcatccgcgagggcgacatggtctccatcgacggcacgacgggctccgtggtgctgggcgccgtggacctcgtgctgcccgagctcaccggcgacctggacaccatcctggagtgggccgacgagttccgcaccatgggcgtgcgcgccaacgccgacaaccccgaggacgcggagctctcccgcagcttcggcgccgagggcatcgggctctgccgtaccgagcacatgttcctgggcgaccgcaagcagatcatccagtccttcatcctgaacgacgagccggccatccgcgagaaggcgctcgccgacctgctggaggcccagacgggcgacttctacggcatgttcaaggccatggacgggctgccggtcatcgtgcgcctgctcgacccgccgctgcacgagttcctggagagcccgcgcgacctggaggtggagatcgcgcgcctggaggcgtcgggcacgccggccgccgagctcgccgacaagcgccagctgctgagcctggtggacgccatggccgaggcgaacccgatgctcggcctgcgcggttgccgcctggccatcctctacccggagctgccggccatgcagacgcgcgccatcgccaccgccgccgcccgcctgaagaaggagggcctggaccccgagcccgagatcatgatcccgctcgtgagcgtgcttcccgagctggagacgctgcgcggcgaggttgaggccgtcatcgccgaggtgtgcgaggccgagggcgtggagctggacatccccatcggcacgatgatcgagctgccgcgcgcggccgtcaccgccgacgagatagccacccaggccgacttcttcagcttcggcacgaacgacctgacccagacgacgttcggcttcagccgcgacgacgtggaagccaagttcatcccgcgctacctggagcgccgcatcctgccgtgcaacccgttcgagacggtcgatgccggcgtggccgcgctcgtggacatgggctgcacgaagggccgcgccacgaacccggacatccagctgggcgtgtgcggcgagcacggcggcgaccccgactccgtgaagacgttccacaagatcggcctcacctacgtgagctgctcgccctaccgcgtgccgctcgctcgcctcgccgccggccaggcggcgctggccgagaagatgggcgaccaccgcgacaagtaggccgttcgccagcacccggcacctcacggagggcccgcagctgcgggccctccgccgttttcgggaagcgcgcccacgccgctgcgcgcggacggcggggagggcggccggtttcgaaggccgcgaggtcgctttcgtccgggtgcggcggcgcgcgggcgcccaggctatactcccgatgaccccgcctctccaaggagacgggggtgctcgcccggccggggagcggtggctcacctaccggcgaaggggacgtcgtcttcctcctcctgccttgcggacggaggctgcgggaggatggcggcctgtccgatgagctccgctgcgcgggcgggatcgccgacgagccaaacgcggtcgccggcgaacagccgcgtgttgcgggagggcttcatccgcaggagcgcctcgtgctcgtgggccacgaccaggctgccgaaagtgcccttgaagtcattcgcggctatggtcttgcctgcgaagggagagccggcctccacgtcgagcgcgaagcaggcggcgtcgaagcgcgccgggccgtgcgcgaggtaggtgtcgagcatggtgctctcggcctcgtcctcttcgagcgagccgtccttgagcatgctctgcaggtaggcgtccacctcggcctcggtgccgaggaacgccagcacgtcgccctcgcgcacgccgagggggtcttccgggtcgttgatgcgtcgcgtcagctcctccttcgaaaggcgagcaacctcgtcctctcccacccgtcggccgtcgcgcacgatggccatgaggtccaggttgtgcgcgatgccgaacatcacgtcggcggagcgctcggagccgagcagcctgagcgtgcgggacgcctccacctccacggcgtacaggtgcttttccacccagttggcatgatcctcgtgggagaggctcgcccggcgctcggccagcacgctttccttgaggttgccggtgaagctcgtttccagcttgaggaacagcgagtgcagcgtgcgcgagcggccgagcacgagggtgcaggcaatgccgaggagcgccatccacgcgaggttgtccgctccggccgcgtaggcgatgaacaggaccgacccgaacgagacggcgatgcccgccgtcgagagcgccacgagggcggggcggttgcgccggcggcgcatccacagcgcgccgaactcgttcttgcgccacgtgtagaacaggttcgccatgaagatgcccgtgacgaggatgccgaggaccgccatgcccacggtcagcaagggcgcgggcgctatgccgtgcaagaggcgcggcaccatcctcacgagcacctccaccgaggccacggcgctgagcaccacgagccccgccttgaagaaccagcgcttcaggtagtcgcgccacaggttctcgccctcgtcgtcggcatcttcctcggccgcctctgcgcgccgctcgaggaaggcgagcgctcgtgcgggcagcgcgcgcacgagcaggcggtagatgcgctcggaattgcgcacgagcaggggcgaggcgagcgaagtgaccaccgataccgtgacgatgacggggtagaggaaatccgcggtcgcgccgagcgagagcccgagcgctgcaatgatgaacgagaactcgccgatctgggcgaggctcaagcccgccttcaccgccgtcctgagcgactggccggacaagagcgcgcccaggcagcagaaaagcgagcggcccgccaccgtcacgacggccagcagcacgaccgctcccaggttgtcgagcacggccaagggcgctaccagcatgcccaccgaaacgaagaacacggcgccgaacaggtccttgagcggtttgaacagggctgcgatgcgcggggcctgcacggttcccgcgaggatcgacccggccatgaacgcgccgagggccgaggagaacccgatgcccacggcgagcgccgccatgccgaagcacagcgcgatagaggcgacgagcagtatctcgtcgttaaccgtgtcgcggatgcgcttgagggcgctcggcaccacgatgacgctcagcgcgaaccatatgatgaggtagagggccatgcggccgatcttgagtgcgacgtccgccgggtcggcgccggcgccggcgccgaccgtggagagcactgcgagcaggaacacggccgcgatatcctcgatgacgaggacgccgaacacgagctcggcgaagccctggcccttgatccccaggtcggtgaacgtctttacgatgatggacgacgacgagatggcgagcatcccgccgaggaacaggctcatgacgaacggccagcccagaagcgtgcccacgatcagcccgagcgcgatcatgagcgacatctcggtggcggcggtcacgatggcaggacggcccacggtggtgagcttgagcacgctgaactccaaccccaggccgaacatgaggaatatgacgccgatgtccgaccacgtggtaatgctggccgtgtccaccacggtgggcacccatacgatggccgggcctacgaggaagcccgccagcacgtagcccaccacgagcggcagcctgaagcgccggcacgcgatggttacgaccgccgccaccgcgaggatgagggcgaggtcggtgatgagctgcggcaggttctgcatgggttccttcctgggcggggggtgcccggcgtcgcaggagcgcggcatccaaccaccctattctagcaggtcgatgctccttgcgccccgccgcatctcgtaccgcgcgtctctgaccgatcggagcgcatgccgatcggtgtcccgcacgtgcgcctcgccgacagcgggctgcggccgggcagtaaggggggcggcaagggcgaggaggtcctctcaccggtcccgtgccaccgaaagaaggagcccgccggggacggcgggctctagggagcgggtcggttcgctggtcggatccggaggagcttacgctccctgcggggcggcgtcgtccaggtcgggcttgggatcgctcggcagctgcggcgcgtcctcgcgacgggccatggcctggtcgtagtcgcgcgttcccacgaacacctcgttcaggtacgggttcaccttgagcttcctggcgcggtacatgatgtaggcgaaggcggccacgttggcgacgagggcgattaccgacaccacgaggttcacgttcgggttgttcaccgactgcacgctgaacacgctgtagtcctggaacgcggggaacacctgcgcgaacatgcaccagatggccagcgtgaacgcgcggttctggatccagccgcccttgttccagaacatggccgccacggtgggggccagaagcagcgcgaggccgcagtagaacgagtgcgtgggcaggcagttgtaggtatagcagaagttccacaggtcgtaggccaggatgaacacccacgtcatgtcgggccacagcatgtcctgcttcttcttggacacgtagatgccgaaccagccggtcatgcaggcgatgttgatgaggcccgccacgccgttgaacacgttgtgccagccgccgtagagcgtgacgccctcggaggacacccaggtggtgccgaacgcgcggaaggcgctctcgaagtcgctcaccacggcgatgaggatgttgatggccacgatgacgaacgggaagcacttgaaccagtgcgacttgccgatcttgccccaccggtacttgagtgccatgaaaccgatgcacccgatggtggcggcgtagagcttcgcgtagtggaaccagctgttcatgtgcaggtacgtggggttgttgagcgcccagtcggcgcccatgccggcgccgacgtagatggcgacgaagtacgccgtgagcgccagcggcacgccgatgaagcagacggtgccgccgatcttcgagcgtcgcgcgacctcgttgatcaggatgaggccgatgaacaccatggcccagccgagccactggtacagggcgttctccccgtaaacttggaacaacatggaaaccctcctttgttcgggtatgcttcgcacaggccgccttccggcctgctgattcctaagatgagatgatcgcgcgtgcccttgatgcgcccgaggcgccgcgtgcggctagcttccgccgggcgggctcgcgtcgccgcggtccatgtgcagggtctgggcgatgaggtccttcagcacctcgtcgctggcgtcggggtgcgtgcgcaggtagctcacgatccccaggatgagcacgtagaacgtctcgtagacgtgctcgatgcgtatctcgtggagcgcaccgtagtcgcgcaccgtcgtctccacgatgtaggaggccacgcgatcggccacgcggttcacgaagtcgatgtagagcgctgcgttctcgcgcgaggcgagcgagcggcggaaggcgtcgtgctcgaacacgcccagccgcatgagcctcacgacgctggcgagcgcgctctcgatgtcgccgggatggcgctgcgcgttccagtagtgcgtcgcctcgatgaagtccgccacgtaatcgtcgagcacggccgaggtcacggcctccttgtcggggaagtagtggtagaacagcgagcgcgtcacgcccacgcggttcgtgatgtcctggacggaggtcttcgagaggccctgctcctcgtacagctcgcgggcggcggccacgatgtcggcgcgccgttcggccgatgccgcgttgcgtgctttgtcgcctgcggtttccatgctgccctccttgcgctgtgcggaccgtctccccggcgcgccgggcgttccgcgcctgatctgtccgacccctgatgagcgcagcatacgcccctcgttgacggagcgtcaatagacagtttcgacgattcgtcaacccgttgggagggcaacgggagcggctcggcacagctggcgcggagcggttgctgacggatggcgcgctgccgtcaacggcggcttccgcataccctcgaaaggtgctagcatgcgcccaagaagttcagaaatgaaataaaaaagaaacacaattgaagcaaaacaaggagcggaggagggagaccatggaaaaggagcagggggcggaggcccgcagggacgcagtgggaacgcccgaggtccgagccggcgcatcgcacgaggccggagagccggcaggcaggcggcgcgggaggcgctggccgatcgtcgtcggcgtggtggcggtggtgctggttgccgccggggccgggttctgggcctggcacgagcagccgggcttctgcaacgccgtctgccacgacccgatggacgcctacgtggagggctatttcgacgacgccgcgctcatggcgaacgagcacgcccgcgccgacgtcacgtgccttcagtgccacgaggcgaacatcgaggagcaggtgacggaagggcttgcctgggtgcgcggagacttcgccaccgacgagtcggggcatctgaccgtccagggcgtgacggccgacaagaagatgtgcgcgacgggcgggtgccatgactgggaggacgtgaaggcggccaccgaggactggggcggcgaggcgggcgtgaacccgcacgcgtcccaccagggcgaggccatcgactgcagcaactgccacggggcgcacggcccgtcgtatatgtactgcaacgcctgccacgactacgacgtgcccgccggctgggaaagcccccgatagggtgcgtgagaaggaggaagcgatgatgaggaagacggcaacggccgtatgcggggcagccgtgctcgcgatgggcatgacgggctgcgcctcgaccttcgaggggtcggggtcgaaggacgcggcgagcgccgagcaactggcgatgcgcctcgacgacccgtgggcgcaggaggcatcgtccgacgcgcgggcgaaggccgaagggacgctcgccgacggcgtgtacacgggcgagggcaaagggatggaaggccccatcaccgtcaccttgctcgtgcaggacaaccgcatctcgtgcttggagacgacccaggagggcgagagccagagccgcggcggctacgaggccatccgcgacggcaagttcgcgaccatgatcgaggctgctcagggggccgacatcgacgcggtgagcggcgccaccatcaccacggcgggcgtcaagcaggcggtggaggacgcgctctcgcaggcggaggccgcagctgcgggcgcgaccgcgagccagggaggagaggcgagatgagcgagagcatgaagaagggcgcgcggggcctcacccggcgcggcttccttgcaggggcggcggccgccctgggcggcacggcggcagctgcggccgtgccgggggctgcctttgccgtacaggagggattcatcggcgactgggcggccgacggctcgaaagacgtgtccgtgccgccaagcgccgccacgaacgcctcgtggtcggacggcacgtaccgcgagcacaacggcgcggccttcccggccgacgacgcgagccccatcccgccgcgcgcggttcccgctacgtgggactacgagtgcgacatctgcgtggtgggcgcgggcggcggcgggctgaacgcggccgcgcgcgcggccgagcagggcgcgcggaccatctgcgtcgaggccctgggcctgcacggcggcaacgcccaggaggccggcatgtgcgccatcctcggcggctcgaagctgcaggagtccaagcgcttcgccttccccagctaccccttcgacgcgcgcaagctggccgactgggccatcgacgagtaccactacgcctgcgacccgctgctcatccaccgcatcgccgaggcgggcgggaagtgcatcgactggatggccgactgcggcgtgcgctggcgcttgggcgaggtgccggtgtacgtggcgccgaagaactcgacgctcgaccaccacgtgctgaagatgaaggacgccaccgacgccatgttcgcgttcgggcagcgccacggcgtgcagtacctcttccagagcccggccgaggcgctcgtgcaggacggcgacggccgcatcgtcggcgtggtggtgcgcgagggctacggcgaggagaagtacatccacgccgagcgcgccgtcatcctcacggcgggcgggttctgcaacaacaaggcgctcttgcagcgctacatccccacggcggccatgggctgcgcctcgagctacctcacggcgggcgagaccggcgagtgcttccgcatgggcctgggcgtgaacgccgacgtgtcgggcttcaacagctcggcgagcttcgacggcggcgtggactgggaggccgagggcggccagtgggcgcgcttcctctacgacggcatgacgcagctgtcgcgccagccgtggttcaccgtcgaccgctgcggcaaccgcctgcgctatatggacagccgcgtgggcgaggacggcgcgaacgccatctacgcgctgggcgacctggccaccatccagatgaccccgccggggcaccgctcctacatcgtcttcgacgcccactacgaggaccacctggcgggcttcgcgcaggagcactgccgcaagctcatcacgcccgacctcgagcagatcgacaaggtgcccgagcactaccgcgactggcaccacggcgtcgaggacgccatcgaggccgacgtgctgaagaggcgcgacacgctcgaggagctggagcgcgacttgggcttcgagcccggcgtgctcgtggaggccgtggagaaatggaacgcgtgctgcgaggtcggcgaggacgacttcatgtaccccatgccgcccgagtggctgcacgccatcaaggacccgccgttctacggctgccgcatcgcggcaacctgtacggcacgaaggcgggcctcatgatcaacgacgagatgcaggtgatctcgacgaaggggcggcccatcccgggcctgtacgccggatggcacacggccggcggcgcgtgcggcgagaacagctacatcggcgaccccatcttaggctcgctcttgggcgacgtgagcctggcgttctgcggcgggtatttgtgcggcaccttcgcggtggaaaacgagatgaagggaggggagtagcatgaaagagcagatgaaggccatggcccggccgtacgggacgctgtttctgatcgcgctcgcggtggctctcgtagggcgcgtcggcctggccgcgatggatctgacgggcacgctctcctacgactacatctcggcggccggcgtgcccatcctggacgtggtgtgctccatcctgacgggctcggcattggtggcgttcatgtacgcgccgtcgcttgcgatggcggtgtccacggcgggggtggcgctctacggcttcctggtttggcgcggcgagggcgcccctgcgcggcccgcagcggcgtttctgtggggctgggcgacggcgctcgtggccatcgcgtgcctgctggtcacggtgagcgggatcctgtccgccgtgcaggtggcgtcgatgagctcgaagctgccgggcatgccggtgctggtcctcgcgctcgtgggcttcgcggcgttcctcggcacgctcctgggcgcggcgtcgatggtggtgcgcgcgtgcctcgcccgcaagcgccccggccgcgcactcgtgctcgcggcgctcgggtgcggcctcgtcgtcatggtgctcaccgtgggcaccttcgccgccatcaacaccgccaacatcaacctggccgccgtcggcggctggttcgcagcggatatagcggtgaacctggtcattctcttcggggcgaacgtcctggtcaagaaggctcctcgttcgatctgaacaggcgcccgatgctgttctgcgcgtgtcgggagggcggtccccccccccgacacgcgcgaacgggcagggcatccttcccgaaatcggtacctccgagtcaccgttttgaacgctgtgaagcgtttcgatgggtcagggggcctttttgatcgacctgtttcgacggcgaagaacgttttcgcaggtcggcaaaatcggatcctcgcctctgggagtgcgaaagcttcagagcggcaaaaacggtgacttcaacctgccgatttcgggaagagggcgcttggagagaaaaggcagcccttttatgccaaacgtcccaatggggaccgtcccccttcgggacgtcactcgatgggctgcaggagctcgagcgcggccttgcggtcgagctccttgcgcgcctggacgtcggcgatgacgacgcgccaggcgcgggcgagggcgcgccgccggtcttcgtcgaggcgcgcccatagctgcgtgcgcgcgagggcgtcgacggtgcgggcgatgaccttctgcttgcgcgcgccctcgtcggtggctgccacgaacacggccttgcggtcgctcgggctggcgaggcgccgcgtccatccgcgcccggccaggccgtccacggcgcgggccacggccacggggctcatctgcagctgcgtggcgaggtttcccacgcgcaggggctcgtccacctcgccgaggcgctggagcacgcggcactcggcgagcggcgcccccgccgcgcggcgcagggcgtcctccatcgcgcgcttcaccagctcgagcgacacgagggcgcgcgaggcggcgaagcgggaggcgacgtcgccggagagcggcgggtcgatgctcgcgccggcggcgatggacgcttccaagatggcgcggtggtcggcgtcctcggtggggaagagtgcgtagaggcgctcgacgatggaggcgtttgcgcgggcgacgtgctcctcgccggccccggtggcgcgcgcggtgcgcgtgcggccgtcggccccctcgccgcgcaggcgttcggcgaaaccggcctcctcgagcgcgttcagcgcctgcgtgaccacgttgggcttgaggtcgaggaggcgccccaggtcggactgcgcgaagccgtcaggacccgcggccagcagcttcacgagcatgcggtactgcgtgacgttgagcgggctcgccgccgcgaggccgctcttgagcgcgcggtgggtgaggtcgaacgcgacgaagaaggtggagtcgagcgccaggtcctcgccgccgtcttccattccgcacctcctccgtctcggattctttcatcgttgaaacgatattctaccgcgagggaaggcggttcgccgaaaacccacgcaagggccatcgggcggtaccggagcctccgccttgccgcatccgtaaggtcgaaacagggtcagacctgcgcgatgccgccctcgcggcaggcgtcgacggtctcgttcaggcgccggcggtacacggacttggatgcgtagaggccggcgcaggcgttgtgaccggtgacgtggtccttcgtcacgagcgtggtcgtgggggcgtgcgagtggcggtagaacagcgtgtcgtgtcccacgcacaggcccatgacgatgttcaggtcggtgccctcctcctccagaaggcgggcctgcatgacggggttgcacagcaccggtccctccccgccgccggcggcgggcgccaggccgaggtcggcgcggcggttgccctccaccttgcaggccacgccgaacacctcgaagcctgcgcgctccagcagcttgcgcagcgtgcggctctcgtcgagcagcatcgtgcaggtggcgatgccgatcttgcgggcgcccatgcgcgcggcgaactccatggtctcctgcacgcgggtgaggttcgcgcagcgctcgctcgtgagcgccgccgcctgcatgatgcggtggttctccggctcgcggtaacgttcgcgcacctcctcgcggacggcctcgcccacgagcccctccacgcactgcggcgggttgccgcccgtctggaactcgcacgcctcgccggcgcagctcaagcacgagaacccggtatcgtccatcagcttccccttccaacgcctcttcccaggaagcgcggccgccatgcggcgtccgcgcccgtcagaccccagtatagacgatcgtgcgccccgcgtccggatgcggggcgcctgctggagagaggcggcgggcctcccgtgtcgcgcccgcccgcaggctagccctgcagaccggccgtcccctgcccgcgccgcgccctccagcgtccgatggccttcgccgcctcggtctgcacgagcgagaggaaggccaggcccagcaccgtcgcccactgccacgcgttcatggcagcgccgccgaacgcctcgcgcacgggcggcacgagcagcacgacgagcatgagcgccgtgctggcggccacggcccaggcgagctgcgggttgcggccgccctcgcggtcccatacggggtcggtgtcggagcgctggttcacggcgcgcagcacctgcgagaaggccagcacgccgaatgccatggtgcgcccgaccgcgtcgccgccctgctcgcgcccgaccacgaatgcgagcagggcgaaggcggccacgaacagcccttggaacaccacgcggcgcgcctggcgcccctccagcagcgtgcccgcgcgcagcggcgggtgctccatgatgtggcggctcgccggctccacgccgagcgccagcgcgggcagcgtggccgtggccaggttcacccacaggatcatgacggctgtgagcggcgcgttccagttcagggccacggcggccagcagcaccacgatctcggccaggttgtcggccacgaggaactgcacgaccttctggatgttgcggtgcacgcgccgcccctcgcgcaccgcgtacacgatggtggtgaagcggtcgtccagaagcaccatgtcggcggcgtccttcgccacgtcggtgcccgtgatgcccatggccacgccgatgtcggcggccttgagcgcgggcgcgtcgttcacgccgtcgcccgtcatggccgttacctccccgtcgtgcttgagcgcgcgcacgatgcgcagcttgtggtagggggacacgcgggcgaacacgctggcgcgccgcacggcgtcgtcgagggccgcgtcgtccatctcctccagctcctcgcccgtgatcacgaggtcgccggggcggtagatgtcaagctcctcgccgatggcgcgggccgtggcggcatggtcgcccgttatcatgacggtgcgcacgccggccgtgcggcatgtgtccacggccgcgcgaacgtccgggcgcggcgggtccatcatgcccaccagccccacgagcacgagctctcgttcgatgtcctcctcgtcgccgggcacggcgggaagcgcccgcgtggcgaaggccagcacgcgcagggcctcgtcggagagccgtgcggccacctcgagcgcatgcgcgcggtcgtcgtcggtgatcgggcgcgccccgtcgtcgtccatgacgaaggcgcagcggggcagcaggccgtcgagagcgcccttcacggtcgccaccacctggccgtcgcgctcgtgcacggtggccatgcgcttgcggtcggagtcgaaggggcgctcggccaggcgcgggtaggatgcgcgcagggccgccgggtccacgcctatgtcgcgcgccatgacgagcagcgcgccctcggtggggtcgcctatcacagtgtccggggcggcagtgccgtcggcggcagcaggcggccttccgccttcggtcgggcctcgttcgccctctgcgcccccgttccccgcggccccgggcgcctcctcgccctccgcgaagctcgcgtcgttgcagagggccgccacgaacgccaggtcgccgaagagcgcggggtgcgccgcgagcgccgcggcgggctcctgggccgtgtcgcggtcgaggtccgggcccagcgccacgcgcacgacgctcatgcggttctcggtgagggtgccggtcttgtccgtgcagatgacggtggcgccgccgagcgtctccacggcgggcagccgccgcacgagcgcctcgtgccgcgccatgcgctgcacgcccagcgccatgacgatggtggccgtggcgggcaggctctcggggatgacggagatggccagcgacacggccagcagcagaagcggcacgaacggccggccgtaggccaggccgatggccaccacggccagcgcggccgccacgcccacgatggtgagcagcttgccaaacgaggccagctttcgcttgagcggtgtgtccagctcctcgtcgccctccaaaagccccgcgatctggccgacctcggtgcccatccccgtggctgtcaccacgccccgtccccgcccgcccgtgacgatggacgtggcgaaggccatggtggagcggtcgcccagcggcgcgccgggggcgaccgccgcatcggcgtccttctcggagggcaccgactcgccggtgagcgaggcctcctgcgcgcgcaggctcgccgagtccagcaggcgcaggtcggcaggcaccatgctgccgtcgtccagcagcaccacgtcgcccagcacgagatcgcgggcgggcaggatctcctcggcgccgccgcgcacgacgcgggccgtgggcgcggagagcgaccgcagcgcctcgagcgacgactgcgccttgcgctcctgcacgatgcctatcacggcgttcaccaccacgatggcgaagatgatgcccgcctcggcccactcccgcaaaagcgccgagagcacggccgccaccacgaggatgagcaccatggggtcgcccagctgctcgcgcaccatggcgccgagcgtcttgggcggtttcgaggccagctcgttgggtccgttctgggccaggcggcggcgtgcctcggcgtccgtcaggccgtccggcgaggtctcgagcgccgcgagcacgacattggtgggctttgcgtgccagggggttgccgcggcctctgcgcgcggggagggggctgctgcggcggccgtgccctcgggcgcggcaggggagggcgtggtgcggggttccatagggttcctttcggtggcgcttccgcgtgcgcacggctcggcgcgcacagggcccacgatacccgaagccctcgcccgtccgccgaaccgtcacgccgcggtcacggagcctttacgtgcgcgccggcgcccctttgcaggctctatgcgctagaatggcagcgacgaagaaaggatgccccatgagccagcccctctgcttggagaacctgccgcgcaccgtcgagctcgagcgcgacggcgatgggcggccccgcctagcctacatcgaccagcggcgcctgcccggcgagctcgccttcgatcgcacgggcgactggcgggtcgtggtggacgccgtcaagtcgctcgccgtgcgcggcgcccccgccctcggcatcgccggcgcggccgccgtggcgctgtgggcgggcaacgtcggcgccgcgcgcgccacgtcgcgcggatgcgcaggggaagggccatgcttcctggaggagctgggccccgtggccgacgaggtggctgccgcacgccctaccgccgtgaacctggcctggggcgtgcgccgcgccgtggctcgggcgcgccgggccgtggcgtcgggggcgccgtccgccttggtcgccgacgagctcttcgacgaggtcaagcacatggaggccgaggacgaggccgtgaaccgcgccatcggcgcccacggcgccgagctgcttgcgcccggctcccgcatcctcacgcactgcaacgccggcagcctgggcaccgcgttctacggcacggcgctcggcatcgtgtacgcggccgcagcgcagggcaaggtggagcgcgtgtacgccgacgagacgcgcccggtgggccagggcgcccgcctcacggcatgggagttgtcgcgggcgaacgtcccctgcacgctcatctgcgacgacatggctgccagcctcatggccgccggtcgggtggacgccgtgctcgtgggcgccgaccgcatcgccgccaacggcgacgccgccaacaagatcggcacgtacggcgtggccgtgctcgcgcggcaccacggcatcccgttctacgtggccgcgcccacgtccaccatcgacccgacgcttccggacggctcgggtatccccatcgaggagcgcgatcccgccgaggtcctgccgcagccgctgccgggtgtggaggtgtggaacccggcgttcgacgtcacgcccgccgccctgatcacccgcatcgtcacggagcgcggcgtgttcgagccgggcaagctggtatactgagggcgcctacgacgagcaaggaggtccgccatgcgcatcatccatcgcgaagaccaggaggagcaggcgcacgaggcgctttcgccggacgcctcgttcgccgacgagagcgagggccgcgcccgctcggccgagcccgacatcctgcgcaacgactaccagcgcgaccgcgacaagatcctccatacgaagtcgttccgacgcctgtcgcacaagacgcaggtgttcctggccgccgagggagaccatttccgcacccggctcacccacacgctcgaggtggcgcagatcgcgcgtaccatcgcgcgggcgctcgggctgaacgaggaccttaccgaggccatctcgctcgggcacgacctggggcacacgccgttcggccacaccggcgaggaggcgctcgcgcgcagcatcgcccgccaccggggcgtcgaccccgcctcgcccgaggcggaggcgctctaccggcacaacgagcagagcctgcgcgtggtggagcgcatcgagaacggcggcaaggggctcaacctcacgcccgaggtgcgcgacggcatcctcaaccacaccggcgacctgcgggccgagacgctcgaggggcgcatcgtgggcacggccgaccgcatcgcctacgtgaaccacgacatcgacgacgccatccgcgcgggcatcctgtccgagggcgacctgcccgacacgacgcacgcggtgctcggccccgaccactcctcgcgcatccagacgctcgtcatggacatggttgagacgtcggccgcctgcgacgacatccgcatgagcgattcggtgtgggatgccatgatggagctgagggcgttcctgttcgcgcgcgtgtacacggcgcccgtcgtgatggcggaggtggacaaggccacgcgcctcgtgggcgccctgttcgactactacgtggcgcacacggaggaagtgcccgaggagtaccgcgccatcgccgagggcgacgatctgcgtgccgtgaccgactacgtggccggcatgaccgaccgcttcgccaagaacctgttccagcagctgttcatcccgcactccgtgcattattaggcgctgcggccccgatcgggcctgcctgccggcgtttgcccggggttcgtcccggtttggcgaggggcggggataataccacgttccccgacgcgctcggaggcggcgaggctcccgcgaacgtgacattatccccgtccctctgccacgccctgccgcgatcaagatacccattgatcgtgggcgcggaacttgtataatcgggaggctgtgctttccggggaccacatacgacaatcgctctcagccgcgctgcccatcatgctgggttacgtggccatcggcattccctgcggcatcctgtgcgcctccatcggcctgaacgccctgcaggtgttcctgctctcggcactgttctactcgggtgccgggcagttcatgatcccgaacatgtggctggcgggctcgccgctggcctccatcgtcgccagcgtgtcgctggtgaacacgcgccagatgctgtactccgccgccttcgcgccggcgtgcaagggcgtgaggaagcgcctggcgttcctgttcgccgccaccgtgaccgacgagagctacggtgtgaacacggccaggttcgaggcgggcgactggtcggtggggcgcgccacgctcgtgaacctgttctcgcagagctcctgggcgctctcgaacgtggcgggcgtgctcgtgggcaacgccatcggcgtgccgttggccatcgcggcgttcgccatgacctccatcttcgtctgcctgctggttacccagaggcccacgccggcgaacctcgtggccgctgccgtggccgtcgcgggcgtgttcgcctgcaaggccgcggggctcggggggccggccatcctcgtgggcgcgctcgcgggcgtcgcggctgcgctggcgttcacctgggcgaaggagcgtggctgatggagccgatgggctggggcgacttcctcgtcgtgttcgcatgctgcgccatcaccatgctcgtgtgccgcacggtgccgctgttcgcgctcaagggcaggcagctgccggagggggtggagcgggcgctcgggttcatcccgccggcagccttcgccgcgctcgtggcgaacgacctgctgacgcccggcatgttcgacgcgggcctctggccggccgccgccccgcttctggctgccggcgtcgtggcgctcgtggcatggaggacgaagtcgcttctgtggtgcgccgtgtcgggcgtggcctcctatgcgctgctctcgcttgtgtgaggcggcgcgggcacgcccggcggcctccgccggggacgtcccgcgccccgcgtccgggttgcggctcggcggtgcccgcggtgaaacgatgagcccagggcgcgccgaatctgggatttgcgtggagtacgggacggtttcgggaaaaaatgcaggaagacagcgcttttttccttgcgcgagcgggcgtggggcagtatactgtccaattgtgtctttccacagaacacgatacgagattcaatctgaacgcatagaaggataacgaacatggacatcattcgcgctatcgaacagcagcagatcaagcaggacctccccgatttcaacgtgggcgacaacgtgaaggtccattaccgcatcgtcgagggcagccgcgagcgcatccaggtgttccagggcgacgtcatccgccgtcacggcgcctcgagccgcgagacgttcacggtgcgcaaggtcagcttctccatcggcgtggagcgcacgttccccgtgcattccccgaagatcgagaagatcgaggtcatgcgcaagggcgacgtccgccgcgccaagctgtactacctgcgcgacaaggtgggcaaggctgccaagatcaaggagaagtccttcaggtaaggttacggcggcctccggccgccgtaactgctcgacgctgcgaagccccctcgcaccgatcctcggccctttttcgcttgccttcgcgtaccgaagtacgttcagccgcgaaacgggccgattatcggcacgagggggcttctcgcggtcttgctacgccaacctgggtgttttgctttcgcgctgcgcgcgaaggggggggcgcttgtactcgccgcgttcttctgccgtccggttgggcggcttttgctatcatggggggagagacgggaacgggcgcggccgcgggggcgggcgcgcggaagagaagggacgtgcgggcgcatggggccgacggtcgccgagataaggcagcggttgcaggaggcggatgcacgggaattcgccgtgctcgagcgcgcgctcgtggccgacacgcgcaagggcgtgcgcgacgccgttgaggtggcgcggcgtcggatcgaggccgagcaggccgagcgcgagaggctggcctcgctgtacgcgttcgagcgtgtgctcgccgaggggcgcggcgccggcgtggtcgtggggctcgacgaggtgggccgcggcccgctcgccggcccgctcgcggtgggcgccgtcgtgctccccctcgagcccgcggtggtgggcctcaacgactccaagcagctcaaagccgaggtgcgcgagcgcatcgccctcgaggtcaagcaggtggccgtggcgtggacggtggagtacgtggaggcggccgacatagatgccgcgggcatgacggcctcgctcgtcaccgcgttcaggcgggccgtggcgcgcatcgaggccgcgggcgtgcacccggacgtcgtcctgctcgacggaaacccgctgcgcctcgacgaccgcgaggtgaacgtggtgaagggcgactgccgctgcgcctccatcgccgcggcctccatcgtggccaaggtggagcgcgacgccctcatgtgccgctacgccgaggactaccccgagtacggcttcgatgcctgcaagggctatgcgagccccgcccatatcgaggctatcaagcgcttcggcctcacccccctccaccgcgccacattctgcacggccttcacgcagccgaccctgttctagggcacgtcttgcgatgggagagggcgaaacccaccgttgaaagggtggcgatgcctgccataaccgctccgaacagagggtagacggtcaagcacgaccctccggtcatctcgatcgcaccggtcagcagataggagcatcctgtgacggcgagtccgttggcagaggcgacgagtgaagtagccgtgctctgcttggccgcgggaaccagctcggtacagtgcgtatagaaataacagaagcagaatggccatgccagccccgcaaccgctacggcaattggtgccatagcggcattcggccagtaggagagggcgaagaacgagcttgatatggcgaacagtgccgggagacagacggcgttcccaagccttcggtaagcgcttccgaacacgagcgatcctaaggcggtggatacggtcatcacggaggtcagcatgccggtgaaagactcgtccccgatgtcggcgtcggtcacatagagcgatatcaggtacagcatgacgaagtacaacagggcaacggcgaacgtttgcagcgcgagaggagcaagttttctccaccagcccggggccgagccgcgcggctgctgacggagtagatctcgtgcgagggcagcggcggaggaagtagatttcccacggacggtctcgacgtgcatggcggtactccgatgtggggggaaccgaggcagaaatgcgaccagcatgatcaagacggggattgctgcaaggtatgcaaagtagacgttcttccagtcggaaacggcgagtcctccggcaacggcggcgagagcggcacctatgaccgacatagcggcgttgtaccagccaacgtattttccgtgatccccatcgtcctcgaacatctctgcgagtatggagagggccgcggtgttcgtgatgccccatccgacgcccgtcgccagaagccgcatggcaacgaagtagcggacgtcttccactgccgcgccgaacaccgctccgacggtgaacgcggcaaaccccgtcaccatgatgacctttttatccatgtgatcgcacgcagcccccgttgctaatccgaaggggaggccgacgagcgccggtcccgtcaccccgaggttcaccaaccaagaaggcgagtcggcaaatgctctgtacacctctgccactgcgggcccgatgacgaggtcgcccatcgtgcacatggacgacaggaatagggctgccaaggcgagagcgaggtggggcgccgaaaggcccctgtccccgggcgggagacaggggctcccaagggtgcgatccggtgtcattgcgggcacggcgcctccgcttcgtagaccaccgttccgtcgacgatggtgtaaagcggtctcgcctcgcgcagatcttccaccgggatggcaaagagattccgatccatgaccacgatgtctgcgagcttgccggcctcgagcgtgcctatccggtcctcgaaaccctcggcgcaagcagatccgtaggtgtacgcttggattgcctgggcgagggtgatgcactgctcgggaacgaagccgtcttccggtaggccgtcccacggctgtcggcgcgtgacggctgcgtagatgccctccatgggattgaggttccagacaggtgcatcggtaccgaatgccacgatggcgccggattctatgagagacctcgtgggccacatgagcgggcgccacttctcgccgagaagccgggggtagccgtcgacgttgagcacggcatggatgggctgcatggacggcatgacgccgagccttgcgaagcggcctatgtcctcatgacagcaagtttcgatgtgctctatcgtgtggcgcagggcctttgggccatgccggcgccgcacctcctcgaagcagtcgagcgcctgcttgactgctccgttgccgatggcatgcaagcgtacgctgaaaccgcaagcatccgcctcctctaccatggcaagcagatcctcgcgcccgatagcgggttcgccgcaagtggagggatcgtcggcgtaaggttctgtcagatagcctgtatgcgcctcgcacacgccgtctgtgatctgctttacgcctgcgaagcgcaggcgctcggatgccagcgtgcgtgcgtaccttcgcgggttctcaagccccggttccatcttcaagaagcagctcacgcgcaggggcagcttacctgccgcctcgaactccctcaggacgcggatggtatcgtcttcgggaatgccgccgtacggccagacgcaaccggtggccgtcacgccgaaggagagcgcttcccggatgacattgcccagtgcacggtccatgtcggccgccatgttggcaaggccccataccgggtcgttagccggtggctccttgcatatgcccgtagggttgccgttcttgtcgcggcagatcacgccgccctcggggtcgggcttctcggctgtatagcccgccgcctcgagtgcccggctgttcatccaccccacgtgcatgtcccatgaggcgaagtaggcagggcggttgggtactgcctcgtcgagcatctgcttggtgggctgctcgtcccacgccgatgcgtcgagatcgcatccaacgatccatgcgttatcgggatgcgcgtcggcgaaccgcttgatctctgccagtgcttcgctcctgcccgagattccctcgaggctgagcgtataggaggcgtccttcatgacaccgttctggatgaagtgcgtgtgggcgtcgttgaaaccggggcacacgagccggtctccgcactcgatgacccgcgtgccttcgccgaggtagctttggatgtcggcagaagtcacgacgccgacgatctcctttcccgccacgatgaccgcaccttctacaaggtcgtgcgtctgggccgtgaagatgcaggagcttttgataatcagatctgctgttgttctcatcgttttccacctaccgtgtctgtgccgtttgcagggaaccggcgcgctaatagggatttaagctgcaagcgcatcttccgccatctcgcctctgaccttcttgcgcgtggcgaggaaccagaggcacgagacgagcccgaccactatcagaatgatgccgaacacgggccatacggtgactgaggtcccgccggtagccccgatgaggccagtgaggaggtaggagcagccagctgccgccaggccgtcggagaaggcgacgatggacgtggccgtgcctgccttcgatgccggggcgagctcggtgcagcgcgtgtagaaatagcagaagtagaacggccacatgaggccggccacggctacgctggctatggtgacaagcgggctggggaagaacgccatggccaggaagcagaggccgagaacgaacagagcgggaaggtaaacggcgttcttcatcttcttatacaccatgccgaaagccagcgacgagatggctgtcgtgatggtgctcacggacgagagcatgccggtgaacgcttcgtcgccgacgcctgcgtcgaccacgtacagcgagatcatataaagcaggacgaaatagcagatagcgacgaagaatatctgcacgctcagcgggatgaggcgcgtccaccatcccttcggtgcctcggtcgtcttcggggaagggttcccgttcgcgccggtgtcgtgtgcggccgggaacttgggaaggaacgccacgagcatgatcaggacaggtatggcgatgacataggtgtagaacgcgttctgccacgctgcaaccgcgagcacgccggccacggctgccatgagcgcgcccatgacggacatggccgagttataccatccgacgtacttgccatgctcggtttcgtcagtgaaaagctcggctaaaatggcgagcgccgccgtgttcgtgatgccccagccgacacccgttgcgaaaagacgcatggccacgaagtagtagacattgtcgaaggccgcgccgaacacggcgctcgccgtgaagatggcgaagcccgcgaccatgacccacttcttgtcgatgcggtcgcagagaaatccagccatcaggccgaacggaaggcccaccagagccggccccgtgacaccgaggtttatcagccattcgggcgcatcggcgaacgcatggtacaggttggatacgattgggttcaccacgaggtcgcccatagtgcacattgacgagaggaacagcgctgccagcaatagaaacagctttcctttcgacagattctccgctttggtcatggtttgcatcctttccttgctctcgtcgggccccttgcccggcttcaggttatggcgaggatacgggggacgtccgcggcccgcacccctcgtttcgcatggttcgctacggttttgggttattggcgcgcgggacggcttatcgttcggcccataagattcgtattgttttgcccaagttcggtgcgcagcctctccttgatgcgcgataattcccctatacccgaacgctggattattcgaggggaagggagctgggccgtggcgaggcgaaataacctgtgcgttgttgccccagcgtacaccggtgtggtgtttttgctgtcttggatatacctgctcttctacgcgaattcggcgggcatcgaggctgccgcgcccatctcgctcatgagcgcgggttataccgtgagcgcgacgtgcatggtcgcagcacttctcgtcgctgccttccttcctttgaacgtaggggtcttcctaacgcggaacgcgaccaaggctgtcgttcccctcggcctctctgccggtacggtgctcatgatcatgggcggcttcggctacggtgtcacgttcacgtgggtcggtggtgtttccacgggagtgttctccggtatcatggcgcaacagtggatcgtcgcgtatcggagggtcgggttgaaggacgccatcaacagcttccccatgctcacggctatagccgtgagcatgtgcttgacgatgatgtatctgccgcgtatcgtcttactggcggcgacggtggttttccctttggtctcgggcttcctgttccatttggtgaggaaaagcccccaaccggtgttcgaagaggagccgcgggagcgcgatagggtcgtgaacttcgcgcttctgcttctgcccttcgccgtgtattctttgggatcgggcttcctcgacttctcgtccgctgacaacaattacaccttcgtattctatgcgctggtggccttcatccccctgatcgtttccggcgcgcatatattcatggtcgagcgggagggcttccttttgctgttcggcgttcccttggccttccttacggttgcctttgtcccctttttcacgctttcgggattggttcccctcgcgcatttcatctccattggagagctgggcatcgaggtgctcgtgttcgttgtggtggtaggctttgccgatttcttttcgctcgacgcactcaagacctatgcgctcgggagagcagtcgtgacgctgttcaactatttgggatggtatgccgccttctacttagaaggcgcatggggagcgctcttcaactcccaggtgtcgctccttattgcgttcattgccgttgaagtattgtccgtgggccttatcgttgccatcatcaaagcgcagaagagcattgagttggataaggccgacggctgcgctgcgtttgaggagagcggagatatgcttgcgacctccacctcatctcgaacggaggttgcgggcgagacgggatcggcagacggtagtcttcaggccgcctgcaggcgcatcggggaggagcacgggctgtcgaagagggagctggacgtgttcgtgctgttggcacgcggctatgcgtctgcgagcatccaaaaaaagctctacattgcggcaggaacgacgaactaccatacgcggaacatttacgctaagctcggcgtccattcccggagcgaggtcatcgagctcgtcaacgcgaaggcggatgacggataaggaggaacgttttccacagtcctcgaagttgcgttccgtggcggcgtgagctatcctccctcaaaatctcgaggcgctggcctgcggttatttttgttgcggtaaggtaagcagaatttccgccggttttctgccatatccgcgcaagaagcgcgccaggttcgcgcggctgccgtgcaagggccgtgcatgatcggggcggttccgcgcgggccttcgcgacggttccccggcaaggttgcggccctatgatgcccctagagaagaaaggggcgacgaatggacgagaacggaacggtggctgtgcaggagcggccgcaggaggaaccgagcgccgcgaagggggagggggagggggagcgcccggcgggggcttccgccaagcgccgcaagccgcgcgcgaaggcgaagccgaagcgggagcggtccgaggacgacgggggcgccgaggcgatcggctgccgtaaccgggagcttggccgacgcggcgaggatgcggcggcgcgattcctggaccggcgcggctacgacatcgtcgagcgcaactggacatgcgcggcgggcgaggccgacatcatcgcgcgcgacggggaggcgctcgtgttcgtggaggtgaagacgcgctcgaacaccgagaagggcctgccgtccgaggcggtggatgcaggcaagcgccgtcgctacgagcgcatcgcggcgttgttcttagtggactacgacgtggtggacgtgccggtgcgcttcgacgtggtgtcgatcgtggtggtgccgcccgaccgggcgttcatacggcaccatatcggcgcgttctcggcagggtgagcggcgtgttcgggcgctttgccgtgcagggcgcgacgctgcgcggggtggaggccgtgccggtggacgtggaggtggtcgtgggcagcggcatgcccgcgttctgcatcgtcgggatgcccgacgccgccgtgcaggaggcgcgcgagcgcgtgcgcgccgccctgcgggccggcggcttctccatgccgaacgagcgggtggtggtgaacctggcgcccggtgccctgcgcaagacggggtcggggttcgacctgcccatcgcggtgggcctgctcgcggccacggggcaggtggacccgcgcctggccgagggcgcgctcatcgtgggggagctctcgctggagggggccgtgcggcccgtggacggcctgctggcctatgcgttgtgcgcgcgcgacctgggatgcgcgctcgtctgcgcggacgcgccggagcgccttgtggccatcgacggcctcgagcagcgtgccgtgcgcacgatcgccgacttccgcaccggcgagttccccgccctcgctccccggcgaccctcccgaacgttgcctgcgcccgacttccgcgacgtggccggccaggacatggcgaagcgtgcgctgcaggtggccgccgccggccgccacggcgtgctcatgatggggccgcccggctcgggcaagacgatgcttgcctcgcggctgccctccatcctgccgccgctcgaggaggacgaggcgctcgaggccgcgctcatccactcggtggcgggcgaggagatgggcgccctgctcggcggcgtgagacccttccgcagcccccaccactcggccacgaccgccgggctcgtgggcggcggcgcgccgccgcggccgggcgaggtatcgctcgcgcaccaaggggtcctgttcttggacgagctgcccgagttccggccctcggtgctgcagggcatacgccagcccatggagtccgggcgcgtcaccgtcacgcgggccgacggcaacgtgtcgttcccggcgcgcttcatgctggtggcggctgcgaacccgtgcccctgcggctacttcggtgacgacgagcatgcctgcacgtgcacgccggcccaggtgagcgcctatcagaaccgcatcggagggccgctcatggaccgcatcgacctgcacgtcgacgtgcgccgctcggcgccgcgcgacgtgctggggacgggcggcggaacatcgtcggaggacatgcgcgccgccgtgcggggcgcgcgcgagtacgcctcgtggcggcgggcgcgcgccggcggcggcgaggggccggagacgctcgtgcgctcgtgcgccctcgcgccggccgacgaggctttcttcgaggacgcggcgcgggctgcccgcatgagcgggcgcgccatcatgcgcacgctcgcggtggcgcgcaccatcgcggatatggaggaggcggcgtcggtggggcgggggcacctgtgcgaggcgctggcgttccgcctgcgggagggggtgggagcatgcggctaggggtccccgcttcgagcttttgcccggcgacggcgccttccctgcggcgctcgcgcgcgttcccgacccgccgcggcgcctctacgtcgtgggcgacccggcggcgctccaagaaggtttggccgtggtgggcgcgcgcaaggcgacgccctacggcacgggctgcgcccggcgcttcgccggcgcggcggcgcggcggggcgtcgtggtgatatcgggcggtgcgcgcggatgcgacgcggcggcccacgaggccgcgctcgcggagggctcgccgacggtggcgttcctcgggggcggctgcgacgagccgtacccggcggcgcacgcgggcctgttccagcgcatcgtggacggcggcggggcggtggcgtccgagcagccgtgggaccggaagccgcggccctatatgttccggcagcgcaaccgcctcatcgcgggactcgcccgggccgtgctcatcgtggaggccgggctgccgtcgggcacgttctccaccgccgacgaggcgctcgcggcgaaccgcgacgtgctcgtggtgcccggcgccatcacggcggcctcgtcgcgcggcgcgaaccgcctgctgtaccagggggcgctgcccgtcgtggacgacgagacgttcgaggacgccctgttctccctgttcggatgtttgaggcaggagcagtggccgcctgcgggagagcatgcggcagccgccggcgcgggcgtcgggggcccgggcgatgccggcggcggggcggccgcgtcggcgggcggcgccgcgggccgtgcggggatgcgcccgcccgccctcgctgccaaccccgtggccgcggccctcgccgcccagccgctgggcatggaggacctctatgccgtggcccgcgcgtcctgcggctccgccgagccgcgcgcctggctcatggagcgcctcgtggaggccgagcgcatgggcctcgtcgcccgctatcccgacggccgctgggggccggcagggtgaggggcatcgcatcggcggatgtgcgggaaagcggaaggagggggcgagatggcgacgatctccatgttcttcggcatagtggtcatcatgtataatgagtcgacttgaaagcatcacgcaccgcatgtccacgcccgttatgcggagttcagctgctcgctcgatttcgagggcgaggtgctcgacgggtatctcccgccgaggaagctgacgctgcttagggcatgggtcgtccttcatcgggaagagctcgaggccgactgggggctcctctcggaggggctcgatgctttcaggatcgatccgttgcgatagggaggcggtggtgcgctcatgggggagccggtcttggtcgacgaggttgcctgcgggatgggcaaaagccagcccgacttgacgaaggtcgagcctaagggcggaagcgagcttctgctcgagttcgaaacgggggagaggcgccttttcgacgccgccccgtttatcgactgcggcggatcgtacggacgcttggcggaagagcgatacttcgcgcaggtgcgcatcatcgacgggggcttggcccttggatggcctgaaggccaggaagtataccccgaggccctgtacgagttcagcacgcctgtcgggtagcggcgcaggcggcatccgcttctggccggctgcaccgggcgcctgtctggcgcgcccggtgcgctgcgcccctccggcgatccgctggtttttctcgcctgccgtttcccgtggctccgaggtttggtatccttgcaggcatgtctgacaacgtgaccatactcggcgccggccttgcggggagcgaggcggcgctccagcttgccgaccgcggcttccgcgtgcgcctcgtggagatgcgccccggcacgcccacgcccgtgcacgccaccggcgcgtgcgccgagctcgtgtgctcgaactcgttgaagtcgaccaagcccgagagcgcggccggcatgctcaaggccgagctcgatgcgctgggatcgcacctgctggccgccgcgcaccggcacgccgtgcccgccgggtgcgcgttggccgtggaccgcgaggcgttcgcccgcgacgtcacggcgctcatcgaggggcacccgctggtcgacctcgtgcgcggggaggctgcaagcctggccgaggaggcccgcggcgccgatgcgctcgtggtggccacggggccgctcacgtccggtgccctcgccgccgacctcgcccgcgtcgccggcgccggccacctggcgttctacgacgccgccgcgcccatcgtcatggccgactcgctggacggggagcgcctgttccggcagagccgctacgaggacgggtccgacggggcgggcgactacctgaacgcgcccttcacgcgcgaggagtacgaggccttcgccgccgagctcgtggccgccgagcgcgtcgtgctgcgcgacttcgagacgcgcgagctgttccaggcatgccagcccatagaggagatcgcgcgcaagggcctcgacgccccgcgcttcggcccgctcaagcccgtgggccttaccgacccgcgcacggggaggcgcccctgggccgcgctccagctgcgcgccgaggatgcgcacggcacgtgctacaacctggtgggcttccagacgaacctgacgttttccgagcagcgtcgggtgtttcgcctgatccccggcttagagcatgcggagttcgcccgcttcggcgtcatgcaccgcaacacgttcctggacgcaccgcgcctgctcgacgccagcctgcgcctcacggcttccggggccgccgcgttgggcgtgcccgtgttcgtggcgggccagctcgcgggcaccgaggggtactgcgaggcgctgcgttcgggcctgcatgccgcgctcgccgtggcggccgagctctcggggaccggcctgccgccgctgccgcgcgagacggccttcggcgcgcttctggcctacgccacgagccccgagacgagggcttaccaaccgatgcacgtgaacttcggcatcatggagccgctggcggagcatgtgcgcaacaaacgcgagcgttacgccgcctacgccgcccgcggcgccgacgcgctcgcggcctaccgtgcccagcttgcggaccgcggcctcatgccgaaaacggctcccgccgctgatgcgccggtcgaaggcctgccagaaggcagctcccgtgcctgacgccgtgcccgtgcccgacgacggcatgcccgcatgcgatccgcgcgccgcatccctcgtcgaggatttctgcgacgccctgcgcgtagagcgcaacgcctcggtgcatacggtgcgtgcctaccgcatcgacctcatggactacgtgcgctgggctgcccgggagggcatcgacccccttgcggccacccatcgacagctgcgccgctacctgggcgagctcgacagcgcgcagtactcgcgcaccaccgtcaaccggcggctctcggcgctgcgcagcttcttccgctggctcaacgtgacggacgtgtgcgactgcgacccggcgagcgtgctctcgggaccccgcaagcagaaggacctgccgcacgtcatccgcccagccgacatggcgaggttgctctcggtgcacggcaagcgggacggagtcggcaacccgcgcgagcagtcgcccgccgacctgcgcaacctggcgctgctggagttcctgtacgcgtgcggcgcgcgcgtgtccgaggcgtcgggcctgctcgcagacaacgtcgatttcgagcgtggccaggtgaaggtgttcggcaagggggcgagggagcgcatcgtgccgctgcacgacctggcgctcgcctccatgcgcacctaccagctgctcgggcgcccccggctgctcaaggagaaggagtgcccgttcttcttcgtgtccacccgcggcaacggcatgaccaccgatgccatccgcaagatgttcaaggaatccctgcgcgcggccgggctcgacgagacgctctcgccgcacgacatgcgccacaccttcgccaccgacctcttggagggcggggccgacctgcgcagcgtgcaggagatgctggggcatgcgagcctgtccaccacccaggtctacacccacctctcgccggggcgcctcaagcaggtgcaccgtcgcgcccacccgcgcggctgatcgcacggcccctcgcgcagcggttctccgctccgcgagacgctccttgcgcgaaggttgcagcgccgtgaccgacggctgacggttgcccggaacccctcgcgcacggcgccgatgtccctcacaatcggaacccgataccacgcgcgcctcgtcgcgcggacacctgcgtcgaagggacacgattatgaacaagcgcaagatgagaatgatgggcatggttctggccggcgtgctggcgatgacgccgtttctgcacgggtgcgccaccgacgacggcggctcctcgaacgacaacggctcgcagaactcgaccgaacagcaggagcagaacggctccgagcagcagaacacgggcagccagggcgacgtcgtgtactatggccaggtcatgggcgtgaacggcgacgagatcaccgttgtcctgggcgacctgagcgccgcggacggcgagggcctgcagaagttcgaggcccaggaggacgaggtcaccttcaacaagggcgacgtcgtcatcgtggacgagtccggcgccgtcgtcgacgaccccaccgtctcggccgaccagatcgtggtcatgagcggctcgggcgacggtcccgacttccggccctcgaagctggagatactccaatccaacgccgacggcgccgtgagctccgcggccgcggagcagggcctggaccagtagcggcccctgcctgccgcgaaggacgaccccgacgggagcggcggcctgcagccgcggttcgtgccggcctgcgcagctcccagccggcagcacgatggcccggctccgagcggggccgtgctggttctacggggccgctcggcctcgtaccggtgccgacctgccgcgcaacgccgccttttcgcaccgtgcggccctcttgctctcgcgcagcggggcgccccacctttcgcaagcggtttatgaacattgttcataaaccgcttgccttgttctagcgccccgctataatgggataagcaaaatgaacgaggttcaaagaatgatgggaggtgcggccatggcgcggcagggcatcgatcgggcggcgatagccgaggcggcctacgcgctggcggaggagcgcgggctggcgggcctgggtatccgcagcgtggccgaggcctgcggcgtgtccgtgggcacgatctacaactactttccgacgaaggacgacctcctggtggaggttatcggcacgttctggcagcgcgccttccacgaggacctgtgcctcatcgtggagggggagcgcttcgacgccttcgtcagccgggtttacgcggctatgtcctcggcgctcgcagcgttccgctcggactggctgccccagatcagcgcgctgtccatccaagggcgcgacgagggcaaaatgcgcgagtccgcgacgttcgaccatatacgcgccggcatgcggggcgtgctggaggccgacgcgcaggccgaccccgggcgcgcgggcatcgagccggccgagctcgtggcattcgtgctcgagggcatgatcgtcggattgtgcgcgggcgagcccgactgccgcgtgctctcggcgctgctgcgcgcggggctctatggaccggacacgccgggtacggaagatgcggcagacggcgcgggaaggctggagccccccgcgcgcagcacggaaggggcggccccggcggccgccggggaaaggtgatagcaatgctcaagatctcaacgaacaagctcatgctcgtagcgggcatcgtgtgggccatagccggcgcgaacatcgccaacatcgggctcacggcctaccggcacgactggggctgggtcatctgggcgctcctcgtgggctcggcggtgatcttcgtgctgttccactcgcgcatcttccagaagatggtgggcaagcacgccaagcgcatcggcggctacgaggaggccaagacgaacatcctgaagttcttcgacaagaagggctacatcatgatggccatcatgatgggcggcggcatcgggctgcgcatgtcggggctcgtgcccgactggttcatcgcgttcttctacacgggcctgggcatcgcgctcacggtggcgggcctcaccttcctgctgcgttacttcatgaacgtggagccggggtgccccctgttgccgcacacctacgcgaagcgcggctgaccggccgatctgccagagctgatgcggcgcgcatcgttgcgccatgtggaggaagcggtgccggcaccgcccgaaaccaacgggttagctgacggcacgttgacgaaacggttacggctcgggggcgttcgcgcccccttgccatagtatgaggggcgaaccatggcatcggccccgaggcgcggtgcgagaaaccgagtgcgaaggaggccccgtggcccggatattcgtcgtggaggacgacgcggcgctgcgcggcgagctcatgcgcctgctggagctgcaggggcacgttgcgctggccagcacggcgttcgaccgcattgccgacgaggcgctggccgccgatcccgactgcgtcctgctggacctcaagctgcccggcgacggcggccatgccgtgtgccgcgacctgcgccgcgcaagcgacgtgcccatcgtcatgctcacctcgtcggacaacgagttcgatgaggtcatgagcatgaacctgggcgcggacgactacgtgacgaagccctacaaccccgccgtgctgctggcgcgcatccagtcggtgctccgccgcgcggcgcgcacagagccgcctgcgcgcatcgagcacaagggcgtcgtgctggacgtggcgaaaagccgcgtggagtacgagggccgcggggtggagctcacccgcaacgagttccgcgtgctgcacctgctcatggagaacaagggcgccatcatctcgcgccaggagctcatgatggagctgtggcagtccgacgccttcatcgacgacaacacgctcacggtgaacgtgaaccggctgcgcaagagcctggcctccatcggcgtgcccgaaggcttcctggccacgcgccgggggcagggctacctcgtctgatgggcggtgcacggccatgagcctgtccgcctacctgcgcgacaacctcgcggccatcggcgtgggcgtgctgtgctgcctgggcgtggccggcatgctggcggtgctgggcgtgggcacggacgccacggtgctcgtgccgtgtttcgtggcgctgtgcggcgcggtggtactcggcatcggctacgtgcgcaggcgccgcttctataccgagctcgcgcgcatcgtcgaggacctcgacagcacctacttcgcctcggagctcgtggaggatcccggcttcctcgaggggcatctggcccacgaggcgctcgaggcggtgggaaaggccgcggccgacgatgtggcgttccatcggcggcaggccgagtcgtaccgcgactacatcgagctgtggatacacgagatcaagacgcccatcgccgccgcccatctcatggcggccgacctgcacgggggcgtggctgcgaaactgaaggccgagctggaccgtatcgagtcctacgtggagcaggcgctctactatgcgcgctccacctcgctcgcgcgcgactacgccattcgcgagctgccgttggccgaggccgtgcgagcggcctgcaagaagtacgcgcgctacctgattgagcacggcgccatcccgtccatcgaggtgggggacgatgtctccgtgtttgccgatgcctcctggctctccttcgtattggggcaggtcgtggtgaacgcggcgaaatacggcgcgactgccgtgcgcttcaccgcgcgcgaggagggcacgggcacgagcgcggcgcgcaccgtgctggagatcgccgacaacgggcggggaatccccgctgcggacgtcccgcgcgtgttcgaccgcggcttcaccggcgagaacggccgcgaccagggctcggccaccggcatgggcctgtacctggtggccacgctctgcgagaagatgggcctcggcgtgggcctggcctccgaggagggcaccggtacccgcgtcatgctcgcgtttccgcacgaccgcaggcgcagggacgtcgggtgagacgcggggacggggatgatgtctccgtttggtgagacgcggggacggggattatgtctcgtttggcgtggcagagggacgcggacaatgtcacattccccctgatcctggcgtgtttggaagacatcagggaacgtgatattacccccatccccctgtcgcatcctgtcacgggcgccccacccttgcaaattcgtaaggttgcggtaagcctcttcgatggcgggtgcggcgccgcggacgtactatcttggcagaccccgagagaaggagatttgccatgaccgaagtttacgcgaccccgtcggcggcttgcgcgcagcaggcgccggccgcctatgcgtccggctcccggcccatcctgtcggttcgccagatagagaaggtgtacgggagcaaagattccgtcaccaaggcggtgcgcgacatcagcttcgacgtgatgccgggcgagttcgtgggcatcatggggccctcgggctccggcaagaccactctgctcaattgcgtggccaccatcgacaccgtgacgagcggccatatcctcgtcgacgggcgcgacgtcacggggctgcgctcccgcgcgctcgcgaagttccgccgcgacgacctgggcttcatcttccaggactccaacctgctggacacgctcaccggcttcgagaacatcgcgctcgcgctcacggtgaagggcgagcccaccggccgggtgaaacccaaggtggacgccatcgcggccacgctcggcgtgtccgaggtgctggggaagtacccttaccagatgtcgggcggccagcgccagcgcatcgccgccgcccgcgccatggtggccgatccgaagctcgtgcttgccgacgagcccacgggcgcgctcgactcgcgcagcgccaccgtcatgctggagacgctcgagatgatgaactcctcgctcggcgccaccatcatgatggtcacgcatgattcctacgccgcctcgttcgcgagccgcatcctgttcgtcaaggacggcgccgtgttcaacgagatacgcaagggcgacacctcgcgcaaggacttcttcaaccggatcatggaagtggtcacgttcctgggcggtgacgtgcgcgatgctcgctaaactcgccttccgcaacatccgccgctcggtcaaggactacggcgtgtacttcgtcacgctcgttttcggcgtggcggtgttctacgcgttcaactcggtgtcgagccagtccattctcttcgacctcgaggacacggcctcggccagcgtcttctcgctgacggggcagttcctcggcatgttcagcgtgctcatcgcctgcgtgctcggcttcctcgtgctctacgcgaacggcttcctcatcaggcggcgcaagcaggagttcggaacgtacctcatgctgggcatgaatccccgcagcgtgtcggccatcgtgctcatggagacggcggtggtgggcctcgtgtcgctcgtggtgggcctggcgctcgggttcgcgctttcgcagggcatgtcgttcgtcacggcgggcctgttcaacatcgagatgacgcagtaccgcttcatattctcgttcgacgccttcttgctcacgctggtgtgcttcgcgctcatcttcgcggtgacggccctgttcaacaccgtgtccatccgccgctacaagctcatcgacctgctctccgcccgctcgaagaacgcgcgcttccgcgtgcgcaacccgtggatcagcctcgccgggttcgttgcggccgcaggcctgatcgcatgggcgtacgccacgctcgtcgaaaacggccttctggagttcgacgacgggttctggaaggccacggcgctcatggtggtcggcacgtttttgctcttctggtcgcttgccggcttcgccatcgcggtgatcgagcgcacgcgcggcgtgtacttcaagggcctcatgatgttcacgatgcgccagatagccagcaaggtgaacacggcgttcgtgtcgctttcggtggtgtgcgtcatgctgttcttctcgctcaccgtgttctccaccggcatggggctggcgcgcgccttcagcggaaacatcgaggacggcacggtctacgacgccacgctcacggccaacgtgtacctgaaccagggcggcacgcacgaccccgaggcgctcgcgcagatgaccgaggaggaccgcgagtaccagaaggtggccgacgagaaggcggccgccatcgaggccgacgcggaggcctacggctgggatatcgccgcgaagctggccgacgcctcgccgacgtgggacgagctcgtggcgaagtccgctcagatcgacgccttcgtgagcgacgagacgtcctacggcgagctcatggggcgctacggccaggacacgggcaatgcgaagcagaacgaggccctgcacaaccagggcgtcacgctcatcggcgtctcgcagttcaacgcgctcgcagagcttgcgggccggccgaccgtggacgtgggcgaggacggctacgcggtgaacaacacgctcgacgccatgaaggcgctttccgaggcgcttgcgcgcaagggcgagacggtggtcgcaggcgggcgcgtgctcgagtcctcgggcgagctgcgcagccaaccgatggaggacaccacgctctccgcgagcggggcagagctcatcgtgcccgatgcggtgatcgccggcctgcgcgcccaaggcgccgttcccgagcagagcatcctcaacctcatgtatcggacggaccgggccgagggcgacaagctgctcgagcaggtgctcgccgaggcgtcgcccgccaacccggaggtggcggcatccggctggaagttcagcccgaagccctggcccgtgacgctgtcgttcacggccgaggaggtgctcgtgcagtcgggcggcatgaacctcatgatctcgtatttggcgctctacatcggcttcgtgttcctcatcgccacggcggccgtcctggccatccagcagctgtccgaggcgagcgactcgctgccgcgctaccgggtgctcgccgagatcggctgtgaccgccgcatgatcgtccggtcgctgcgcgcgcaggtgctcgtgtacttcctcgtgccgttggcggtggccgtgtgccataccgtgtgcgccgtgggcgtcatcagcgactccgtcatctctcagctgggcgtgtcggtgctcgagcctgcgctcatgaccgccgtgctggtggcggtggtgtacggggcgtacctcgcggtcacgtacttcgccagcaagggcatcatccgcgcctcgctgggcaagaagctcgtggggtagggcggggccgccgcgcgctgctccgcccgagccgccgcccgtcgcgtcgcggggaaatcccgctcgcggcgcggcggcggttctgctaccatgttcgccatgggtgactcgccgaaaaccgccaagcgccgcgtgcgcgagaagcgcaccatctcgcagatggtggcgctttactgcgcgggcaaccacgacgccgcagctcgcaccgagcgcgcccattgcggcgaggccgtgtgcgcggactgcgcggccatcgatgcctacgcggtgctgcgtaccgagcgctgccgcaagatggaggtcaagacctcctgcgaggaatgcggcaaccactgctatgcccccgagaagcgcgacgagatccgagccgtcatgcgctacgcgggcccgcgcatgctggggaagcacccggtggcggccgtgcggcacctgctgggccgctgaacgtccgcgtgcgccgcggatctgtttcccgaacgtatccgttcacgccgcccgttgtctccgttcggggtacaatggcttcgacgaaacggtgaggacgggacggaagggcgggcatgctcgacaaggttgacgcgctgttcgcgcgcttggaggacgtcatggcgttccaggccatccgccaagggctcatcctcaccatccccgttctgctggtggggtcgttctgcctcatcttcctcaacctgccgctcgcgccctaccaggacgccctcgccggcgcgccgcgcgtcgagggcctgctcgacctcgtgtacgacggtaccatgggcatcttctcgctctacgtgtccgttgccgtggcgctgcgctacgccaacgcctgcgccgagcgcttcgggggcttcttcgtccagggcgcgcccttcgccgcgctcgcggcctacctcatgtccgtgggattcggcaccgagggcttcgatcccatcgtgctcagcacgcgctcgctgttcatcgccatcgtgtgcgggctggcctcgtcggtgctgtactgccggctcgtgcgcctgcgccgcacccggcggctgtacggcgacagcctggacaacgtgttcaaccaggccgtgtcgggcctcctgcccatcgcggccgtcatcgcgctcttcggcgcggcgaacgccgccgtggcggcgctctcgggctcgagctgcatcgagcagctgttcttcgacagcgtgagcgcgctcttccccctggccacggccacgttgggcagcgggcttctgtaccttttcctgaacaacgtcatgtggttcttcggcatccacggcggcaacatgctcgacggcgtggcgcagagcgtgttcgtgcccggcacggccgccaacgcggcggcgctcgcggcgggcggcgagcccgtgcagatcgtgacgaagacgttcctggacgtgttcgcctctatcggcggggccggcgcgctgctgtcgctgctcgcggccatcctgctgttcggccgccgcaggagcgcgcggcggctctcggcgttcgcggccgtgcccatgtgcttcaacatctccgagatcatgctgttcgggctgccggtggtgtggaacccggcgctgttcgtgccgttcatcgcggtgcccctggtgaacatggtggtgtcgtacgccgccatggcggccgggctcgtgccgcccgtggtggtggacgtgtcgtggaccacgccgcctctcgtgggcggctgggtggccacgggctcgcccgccggcgcggtgctgcagcttgcgtgcatcgcgttgggcacggtgctctacctgccgttcctgcgccgctacgagcggttggccgacgctcacgcgcgggtgcagtacgatgccctgctctcgtcgttccaggacgacgagcgcgccgggcgctcggtcgagctcgtgacggccgcgggctcgctgggcgcggtggcccgctcgctcgccgaggacgtgcgggccgccgtggacgcgggggccttcgagctgcgctaccagccgcagttcgacgctgacggccgcgcggttggcgcggaggccctgcttcgcatggagcaccccgtgtacggctggctctacccgccgctcgtcatcgagctggcacgcgaggccggtgcgggcggcgagctcgagcgcgcgggctcgacaccggccgcgtggtggtggaagccaccgagcgcgaggcgctgctgtgggacgcgggcgcgcacgacctgctgcgccgcgttgcggacgcgggcatgccgctggccatcgatgacttctccatgggccgcacctcgttccagtacctagaaaccagcgtgttctccgtggttaagctcgacgggaccattgccaagggcgtcatggagaacgagcgctacgccgagatcgtttcgtccatcgccgacctctccgagcacctgggcttcacggttctggccgagtacgtggagacggccgagcagcgcgacgtgctgaagacgctcggctgctcctacttccaaggctacctctacgcgcccgcgctgcccttcgacgagatggtggagcgcgcacggctgacgggaacgctccgttagggggagcttctctttcggggcaaatgatgcgggatgatgcgtcatcccgcgccctgcgtcaccctcgcggctgaactagagggcagtgccgctgcccccctcccggcacgctgcagcattggaaagcgaacgaattgtgcgcatcgtttgaacgctggaacacgaacgtatgttttcgctggctctttccgcgcgctgcgctagaatgaacgattgcacggaaatgatagtttcccggtagcctaatttgcgacctacggcacgcgacgccggggcacggctgccggctgcggatgcgcaagagaaagagcgataagtcacatgggacagaacgccatcgtcatcaagggtgcccgcgagcacaacctcaaggacatcgaccttatcatcccgcgcgacgagctcgtggtcatcacgggtctgtcaggcagcggcaagtcgagcctcgcgttcgacacgatgtacgccgagggccagcgccgctacgtggagagcctctccagctacgcgcgcatgttcttggggcagaggagcaagccggacctggacagcatcgacggcctgtcaccggccgtttcaatcgaccagaagaccacgagcaagaacccgcgttccactgtgggcaccaccaccgaaatatacgactacctgcgcctgctgttcgctcgcgtgggcgtgcctcactgtcccgagtgcgggcgcgtcattcgcaagcagaccaccgaccaggtgaccgacgagatactggcgctcgctcccgatgcgaaggccatcatcatggccccggtcgtcaccggacgcaagggcgagttcacgaagctgttcgccgacctgcagaaggagggcttcagccgcgtgcgcatcgacggcgagatcgtgaagctcgaggccgagccgctcacgctcaacaagaagatcaagcacttcatcgacgtggtggtggaccgcgtgcagctgaaggagagcgccacgagccgcatcgccgaggcggtggagctggccacgaagctggccgacgggcgcgtgctcgtgcaggtgctgggcgaggacgggcaaccgctcggcgagggcggcggcaagtcgagcggcgctacgggcggcctcggcgccggcgagcatatcttctcgctcgcgcttgcctgccccgagcacggccattccatggacgagctgcagcctcgcgacttctcgttcaacgccccctacggtgcctgcccggactgcctcggcatcggcagccgcgaggaggtggatccctcgctcgtggtgcccgacccctcgctcacgctggccgagggcgctatcgcgccgttcaagacgggcaactactacccgcaggtgctgcgcgccgtggccaagcacatgggcaccgacgaaaacacgccgtgggaggacatgccgaagaaggccaccgacgcgctgctctacggcctgggcgacgacaaggtgcgcgtggactacgtgaccgtggacgggcgcgagacgtactggtacatcgagtgggaaggggcgctcgccgccgtgcagcgccgctaccaggaggcccagtccgacaaccagcgcgagaagctgtcggagtacttcgccatcgtgccgtgccagacgtgcggcggcaagcgcctgaagccggagatcctggccgtgacggtgggcggcaagtccatccacgatgtcaccgagatgagcgcggccgattcgctcgactacttcgagggcctggcctttcacggctccgaagagcatatcgccggtcccatcgtgaaggagatcaaggcgcgcctgcgcttcctggtggacgtgggcttggactacctcacgctcgaacgggccacggccacgctctcgggcggcgaggcgcagcgcatccgcctggccacgcagatcggcgcgggcctcatgggcgtgctctacattttggacgagccgtccatcggcctgcaccagcgcgacaacgagcggctcatcgccacgctggagcgcctgcgcgatttgggcaacaccgtcatcgtggtcgagcacgacgaggacaccatccgcagcgccgactacgtcatcgacatgggcccgggcgcgggcgagcacggcggcgaggtggtggcggccggcaagcccgacgagatcgtgaggttcgagggctcgctcacggccgactacctttcgggccgccgcaccatccccgtcccggagaagcgccgcaagccgcggcgcgggtcgctcaagctcacgggcgcctcggagaacaacctgaagaacctgacgctggaggttcccttcggcacgctcaccgtggtcacgggcgtgtcgggctcgggcaagagctcgctggtcaccgacacgctggcaccggcgctcgcgaaccgcgtgaaccatgcgcatcgccgctccggcaagtacaagaagatcaccggcctggacaagatcgacaaggtcatcaacatcgaccagagccccatcgggcgcacgccgcgctcgaacccggccacctacataggcctctgggacgacatccgggcgctgttcgccagcacacaggagtcgaaggcgcgcggctacgggccggggcgcttctccttcaacgtgaacggcggccgctgcgaggcctgcaagggcgacggccagatcaagatagagatgcacttcctgcccgacatctacgtgccctgcgaggtgtgcggcggcgcgcgctacaaccgcgagacgctgcaggtcacgtaccgcggcaagaacatcgccgaggtgctggacatgaccgtggacgacgcgctggccttcttcgagaacatccccggcatcaagcgcaagctgcagacgctgcacgacgtgggtctgggctacatccgcctggggcagcccgccaccacgctctcgggcggcgaggcgcagcgcgtgaagctgtcgagcgagctgcagcgccgccagaccggcaagacgttctacatcctggacgagcccaccaccggcctgcacttcgaggacgtgcgccagctcttggaggtgctggagcgcctcgtggacgccggcaacacggtgctcgtcatcgagcacaacctggacgtcatcaaatgcgccgaccgcatcatcgacctgggacccgagggcggcgaccgcggcggcaccatcgtggcccagggcacccccgaggaagtggccgaggtcgagggcagctacacgggagccttcgtgaagaggatgctggaggcgtaggctccccggcgcacgccgtccccgttcggacggcacgctggcaacagaagaaaacgaaacggcgagcgcctggcgctcgccgtttcgttttctgcggcgcagcaacgcttccgcaggggccccgtcgcctccaaggaaagatcaccaccccttgtcacgtgtttccggtggtttcagatgtccgggcgcttcctatactttctcgacaggaggacagcaatcgagaaaggaggagaccatgtgcttcagacctgcagacgtgaaggcccaggccaatacctgccgcaagtgcggtgcggacaatttggagtatgcggctatctgtgagaagtgcggggccgagctcgaaggacccgacgccgccgccccggggttcgccgccccggcaggtgcacccaaggcaccaggcgcgccgaaagcgccgagcgccccgaaggcaccgggcgcgccgtcggctccgatggggtgattgcatcccgcctcggaaggcctgtcggcatagcaccggcgagggcccgctgtggggcgccgcatcgcaaggcaagcgatcgaaacacgaggaacggaggatgagaacgtggagaatgctcagacaagcatcgacggcgagacgaggaaagtctacgccggctgccgatcctgccacctgaactgccctgtgtgggtgacggtgaaggacgggcgcgccgtcaaggtcgagggcgacccgaagctcggcccgcccaacatgggcaaggcgtgcgtgagggcctcggaggccatccagttcgagtacagcccgacgcgcctgcgctaccccctgaaacgagcggggaagcgcggcgaggggaagtgggagcgcgtctcatgggatcaagccgtggacgagatcgcagccaagatccacgagatggtggagaagcacggcgcggagacgttcgtgctcccgggacgcaccgggcgccatgacatgggttgggtcgcccaccgcatcgcccggaccatcggcacccccaacaactactacggggccatccaggtttgctacctgccgcagttccacgagcaggtcaactacgggttctacacggcgaccggcggcggctcggctgcgacgaaatgccacgtgagcttctccgccgagcaggcctacgcgtggccgatccaggcgcagaccatcatggcgaacaaagagaacggcatgaagctcatcgtcgtggatcccgtccagggagtctatgccagcaaggcggacgagtgggtccccgtgcgtcccggcaccgacgtcggcttgatcatgggcatggcgaaggtgatcatcgacaagggcctctacgacaaggactacgtcgtgcgctggagcaacgcccccttcctggtgcggggcgacacgggcggtttgctgctcgagagcgacatcgtggagggcggcagcgacaagcgcttcatggtgtgggacgagaaggaggaccgcctgaagtactgggacgccgaggagatccagtgggagggcggcccctccggcaaggcccattacgaccatctggtggagctgttcgaaaagaacaagacctcgaccgagaagtcgccggcggccgacctgcccgactccatcatgcccgcgctgttcggcgagcacgaggtggagctctgcacgcgcggaggaaagatcacctgcatcccggccttccagatgctcgcgaacaacgtcgcggaatggacgcccgagcacaccgagtcgatcacgggcgttcccgccgaccaggtggagcgcgtggccacgatgatcggcacgctcaaacccgtcgacatcaaccagggcatgcagtacatgtccacgaacgtctcgcagtacgtgaacgccatcaacgtgctgaagatcatcaccggcagcgtggacgtggcgggcggcaacgtgctcggcgccttctacccggtgacgccgcacgccttccccagcgaactcgacctttcctgggccgacgggctgcccttggagcagaagcgcaagcgcctcggctactacacgcaccgggtgggctgcggctacgcctgggaggagatggtgaagtggcagcctatccgcccgcagaacgccgacggcgccatgctgttccccgacctcacgagcgtcatggaggcggcggagacgggccgtccctatcccgtgcacggcatcatagccatctcgtccaactggctcatgcacgatcccaccctcgcgcgctggctcaagctgctcgaggacgagacgaagatcgagctgcacgtggtcactgacgtggtcatgaccccgacggccgagatggcggactatgtgctgcccgccgtcacctggatggagcgcaacttcctcaacttcggcaccggcggcggctcgagcccgctgcaccaggcctacaacaaggccgtcgagcccctctgcgaggcgcgccacgactacgatttcggcgcgatgctctccaaggcgcttggcaagtacgacaagcgctacgttgagggccgcctcaaccacgagtggaccaaccactgggcgggggagtacgggaagttctggcccgccgacaccatcgacggacagcgcgacctcctgtcccgcgagtttttgggcatgccgttcgaggacgtgctcaagcgccgcgtggtggcggtccccggtgccgacacgccgccgtccacggagcgcttcctgatagccgggaagttccccaccgacacgggcaaggcgaacctgttctcgacgatccaccagaagtgcggctacccgcccctgccggtgtacgtcgagccggccgagtccccgctgtcgcgccccgacctcgcaaaggactatccgctggttggatcgtacggcaagcggcaggcgggcttcttccactcggagttccgccagctgccttggacgcgagagatgacgaggacgcccgacgtgttcatcaacccggagacggccgcgcagttcggcgtcgccgagaacgactggatatgggtggagtccccgcccacgggagggcgcgccccctacaacaagatcatgggcaaggtgtcgttcaggttcatggtcgctcccggcatcgtctcgtactcccagcacgcgtggtggcgtcccgagaagaccgtggaggaggagctgcacggtgccttcgagtggaacaccgaggccctgatcgaggtggagaacaactgccccgagaccggatcgggcgggtaccgctcgcagatatgccgtatctacaaggcaaccgaggaggatatcgcgcgctaccggcccgagatcacgcgcgaacagctcgaggcgctcatgcccatgaccccggaggagtgtgcaaaatgacgcagctaggtttggtcgtatcccttgaccgttgcatggacacgcgcggctgcatgggggcgtgcaagcaggagaacaacgtcgacctcggcgcgttctgggtacgcacgtacacctccaccaccggcgggttccccgatgcggagacgtacttcatcccggtgatgtgccagcattgcagaaagccctcctgcgttccggcctgtcccgagcaggcgatacgcaagcgcgaggacggaatcgtcgtcatcgacacggcaccttgcgccgcctgcggggggaaggagtgcatggacgcctgcccctacggcgccatcagctacaacgagcgcgacaacacggtggggaagtgcgatatgtgcgctgcccgcgtggaccaggggctcgctcccgcctgcgcgttcgcctgcaactcgaacgcgtggatgttcggggacgtggacgatcccgagagcggtatatcgcaggttctcgcagcgatgggcgacagcgtccaccagctcaagccggagacgggcaacgagccctcctgctactacctattgagctcgaagcggtggcaggacatggacgggctgcgcgcccgctagcaggcacgccggcaggccggggcctctgcccccggcctgccgggaaacagggaaggaggggcttcgatggagaaccatgatgccctcggggaaggtttttgcaaagctcaggccgagcgtctgcgcctgctcgcccggatattctggaacgtcgccgaccgcgaggcgctggaatcgctcgacctcgccccgttcgacggcatgggcgaggccgtcgaacgggcgagggaggccgtcgagcgggaccggaggcgcgcgctcgccgacgacggcgcggcgcgcgacctgagggtggagtacacggccctgttcgcgagctcgcggctgggcgcgcccctgccctacgagtcgctgtatgccgacggagggggccttctcatgcagggggcccgcgacgaggtgcgcgaactgtatcgggcgggcggttacgctgcggggcaggaggacggcgagccggaggaccatctttcgaacgagctgcgcttcctcgccttcctgtacgatcgggcacgcctcgcccaggaggcggggcgggacgcggagagggacggggcgctgttggaggcctcggcgttcaaggaagcgcatctggccagatgggtcccttttttctgcgaccgcgcgtccgctacggccgaatccgatttttaccgaaacatcctggtccttctgaggtcgtgcgcgtgtgatcgggcctcttgccaggatagtgctcacccagagaggggatgatatcgtgtcagaaaaagcaaaggggaagttcttcacccaaggttggatccaggtgttcctcgttttcatcgtctgcatcgtcacgcaggggttcgggctgtactcgttcagcatgctccgcattcccatgacggagatgctgggagccgaggcctccgtcgtgagcctgggattctcggtgtacctcgtggtgtcgggggtcgctggtctcgccgtgaacggcctggtctcccgtatcggcatcaagggatgcctgctgatcgccgcggtcatgtattcgggcgggttcctgatactcggcttcgtcgactcgctgtggatggtgttcttggcgtacgccgtcatgggcatcggcaacggatgcggcggcttcgtgctcatcacgtcgataccggcgaactggttcgtcaagcgtcgcggcctcgcgaccggcatcacgctctgcgcgacgttccccgcctcgctcatcaccacgaacctggttgccgtgctggccgccgccggcagctggcagaacgccccgctgatcttaggtctcatctcgttcgtcgtgcttctggtctcggcgttcctcatcaagttccgcccgcaggacgtcggcctgtaccccgacgggatgaccgaggaggaggcggcgcaggtgaagagcgaggagaccgccggcgcggtcaaggtggtcggactcaaccgctcgcaggcggtgaaaaccttcacgttctgggccatcatattcagcttcggcctgatcggcatcggcgagcagggtgtgttccagaacttccccacctacatcgtctacaccgggttcgacttggcgacggccggcgtgttcatgacgttcctctccatcgcgggctgtgtgggcaagctcctatccggctacttcatcgaccggatcgggccgcgcatcacctacgtcgtggtcaacgtgctcgccgcctgcggccttctgctcatcgtgctcttcggcgccaacgtcgcggtgctctacatcggcggcttcttcttcggcgccgccctgagctcggcacccgtgtgcttcacgtctgccgtgtccaagtacctgggccccgcctacttcgccgccctctacagcatcgcgtttttggcgaagaccgtcatggacgccatcggcgtccccgcgctcgcagcggtgggcggctcggccttcggctgggacggcgcgctgatcgtcggcgccgcgttcatcctcgtgtcggctgcgttcatgctgttcggcgccaagaagagcaaggagctcacgaagatggaggaggacgccgtcaaggagctgggagagagggcgtaggccggcgcgctttccatccaacaacctcgcgcagcggttgcgggcgggtgtcgccgacttgcggtcggcacccgcccttttctatccatgaccgaaatacgcggcaaaaggtgtggtagaatcctgaaaagaggttcgggtaaagacgaacggcctttccgccgctatgaagcgaatacccggcatgtcggggaaagccggtgggaaacgcagggtttgcacgaaggagtcagcgaggctcggcttatggagaacctttccgcattgcgaacggatcccggcgtattcccctcgacgaagctccgcgccccgcgccttcccaaccgcctctacccgcttggcgagctttacgagctggtggaaagggccttagacaagaactcgctcatcctcgcggcccctgccggctgcggcaagacctcgctcgtcgccgcctgggaaaggcatgcgaggcggtccgaggacggtacgccgacgagcgtctcgtgggtcaggctcgatgccgacgacagcgattacgcgcggttctgcagcctgctccttgccggtttggaggctttcgtcccggacgtgcggcagcagttttgcgaggtgctgggggacggcgggccggatgcggttccgggcgccctggtagtcgccatcgaacgtgccggcctgccggcggcttgcggcaggaacgtgctcgtactcgacaacttcgaggctgcgagcaacggcccggtcgaccgcctcgtcagctatcttatcgcctacatgccggccgggtacaagctcgtcgtgtgcagccaggaagtgccttctctctccgcagcgagcccggtcccggatttcgacggcatggccgcgctcgtcaccgcggagaagctcgtgttggacgagggggaagccacggggttcctccgtttctctctcggggaggacgcaggggtgcccgagagcatcctcggctcggcggtccgggcggccggaggccggcttccggccttgaacgtggcggcgcgctgccttgccgaggcgcggccccgcatgggcgaggttcccgattctgctgcatgcggccggctctcgctgctggacgagctcttggcggcgctctccgaacgggagcgggaccttctggtgaaaacgtccttcctcgacttagtgagcccgccgctttgcgacgatgtccttgaagccgaggggtgcgacggcgtcctggcgtcgatcgcggcgaaaaccggcgtcctcgtgacggtggacggcaagaggcgctggtacaaggcgcagggcccttggccgcagtacctgcaatcgaagttcaggaagctcgatcgcgccgaggtgagggggctgtgcaagagggccagcgcctacctgaagaaccataaccatgtggggcaggcgatcgactgcctgtgcaaggcggccctttggaacgagctcgaagacctggtcggcgagcatcacctctcgctcatgttcgacaaccgcttcgacgtgttcggcgaggtgctctcgaagctgccgcgtcacgtcctcgaatcatccccgaagctgagcatagcccaggcatgggtgctcgccaaggccggctcggtcgaggagtccgtacgcttcgtgaagatgtcggaaagccttaccgatgcggattcccccgatgcttcccagcttgaggcggaacgcttggccgtgctctccctttgctgcggtcacagcggcgacatccgcgcggggaaggacatggtggccgagcttctaagccgcggccagggcgacccgggagtgcttgccagcctggtgtacaacgcggcggggtgcatcgtggcgagggagaaggagcccgcaagggtcgtcgattacctcgaaaactgcttggaggtagccgcgggccagggtaacaggcccgcatgctcggtgctttgctacttcgcggcgcgacagcgcatcgacgcgggtgacctgcggactgccgagaagaccgcttggagggcgagggacggcctcggcttctccagcatggacgagctcgaggtcctccccgaggtgataggggcgacggtcatgcggaaaagaggggagttcgcacgcgccgaggaggcttactcccgctgtctcggctctctcggcccctcttcggggatcgagtttttcgccgaggcggggtgcggcctcgccttggcgctgcgcgcgcagggcaggatgggggaggccgccgacatggcccgctcgatcctgcagctctgcgacaggagccatgcggagcggccgcggctgatagccctcgtgtacctggcgatgatcgagatagacgccgggaacatcgaccaggtcgccgaccacgtccgggcgctgaggggcgcgaaccccgcctcggcggatctgatcggcgacctgatcgcgctcgcccttgcgcgcttccgcttcgcgagtggccaggtggaggaggcggggaaatcgctcgaccggcttgccggggcgttcgaggagagcgggcgctacgggctcctcctctccgcgctcgtcgccaagggcatggtcctctacgcccagggccttcaggggccttcctcgcatgcggtcttgcgcgccttggagctggcccgggacaccggcgagatagaggcgttcgtcaacgagggcatctccatgacgcgcctgctcagggggatgcgcgaaaggaggctcgtgggcgacggcctggacgcccttgcgcagaggataacgcaggagatcgccgacctgaacatcccggagcccgcatggcgcctcgaacggcgcgaccgcagccccctgacggcacgcgagcgcgaggtctgcgagctgctcgccctcggctacagcaaccggcagatcgccgagagcctgtgcgtgtccatcaacaccgtcgacacgcaccgcaagaggatatacctgaagctgggcgtgaacaaccggaaggacctggtcgagaagatcggtgcagcggggggatggtgacgggggcttcccgtcacgccccccgctttgcgagaatcttaccgaatgcctcctttacctgcccgcgtgctcgtgcgacaatgcgctgcggccttttccggccgggaatccagcggacaacgaggggagcgggtgcaggtgacagaggcagcaggggctccggcgggaggccggcatatggcgcgcggcatcgtgtgcgcgctggcgggcggggtgtgctggggcttctcgggcacctgcgcgcagctgctcatgaacgactacggcgcgccggcggagtggatcacctgcgtgcgcatggtcatcgccgccgtgttcttcctgttcctgaccgcagtgcgcgactggcgcgaccttgtggccgtgttccgcgaccgccgctcgctcgtgcagatcgcgctgttcgccgtcttcggcgtgctgctcacccagatgagctacctgaacgccatcaggtacacgagcgccggcgtgggcaccaccatcgagcagatcggcctcgtgctcatcatgctctacgtgtgcgtgcgcgcccggcgcctgccgcgcgtgcgggaggcgctggggctcgcgtgcgccctgggcggcatgctgctcattgccacgcagggcgagatcgaccagctggccatcccgcccgaggggttgggatgggggctcgtgtcggccgtggcgctggccttctacacgctcatgcccgtgcgcgtgctgaagaaatggggcgccatgctggtcacagggctggccatgctgttcggcggctcggcggcgtcggccgtcgtgcagccgtgggccgttccggtgcagctttcgggcggcgcgctggcggcgctcgtggccatcgtgctcgtgggcacgctgggcgcctacatgctgtacctgcagggcgtggccgacgccggcccggtgaaggccagcctgctgtgctgcgtcgagccggtgtcggccatggtgctggccctgttctggctgcatacgcccgtgtcggtgtgggacctggcgggctgcggcctcattgtggccatgatcttcctcgtgaccgaacgtgagaagaaaccgcgcgccgcagacggagtcgcggagccgattgccgccggcatggccgcctacgacgatccgccgctgttcgccggtcgcgcctcggtgctgggctactacacgagccgccccgccgcgcgcgaggacttcgaccaggtgtcggccctgctcgatgccgggcacgagacgttcgccgcgctcggcatcgacgaggggcgcaagaagtacccctcggcgcgccgcctcatgcacagcataaagaacggcacgacgcacgtggtggaggacgcgcatgggcatatgatagccgtgttcgccgtgtcgttctcgcccgacaagaactatgcggcgggcatcgacggcgcctggctcaccgacgcggacgaacagccccaaccctacgccgaactgcactgggtttcggtggcgcccgcggcgcggcggcgcggcgtgggtcagttcatcctggagacggcgggccgcatcgcccgcgcaggcgggcgccggagcatccgcgccgacgtgtacgagcggaacgtgcccatccagaagctcttggagaagcacggctatgcgcgctgcggcatcctctccatgagggacgtgttcggccgccggaaaacccgggtggcctacgagcgccttctgtaggcaaggccgcctgcgcccggttttgggcgcatgatcaaaaacgacgcaaaaggctcgccaaacctctttaccgtggtgggcttccgtgggacaatgcgctgatggatgcaacggggcaacgccccgcgagacaaggagagggggagggccatggccggtcaggcggcaatcgcgcaggcggcgcccaggaaaagccatgtggcacgcggcatcgctttcgcggcgctcggcggcatctgctgggggttctcgggaacctgcgcccagctcatgacgagcgagctcggggtgccggtggcgtggatcacctgcgtgcgcctgctgctgggagccctcatcttcctcgtggcgtgcctcttcaagaactggcgcagcctgcgcgccgtgctgcgcgacaagcgctcgctgctccgtatcgcggccttctcgatgttcggcgtgctgctcacccagatgagctacctgtcggccatctcctacacgaatgcgggcacgggcaccgtgctggaacgcctgggcctcgtggtcatcatgttcatcgtgtgcgtgcgcgtgcggcgctggccgaagccgcgcgagctgttcggcctcgtgttcgccctgggcggcacgttcctcatcgccacgaagggcaacatcggagcgctcgccataccggccgaggggctcatgtggggcatcgtgtcggcattcgcgctggcggcctacacgctgcttcccggcaaggtgctggcgaagtggggcagcttcatcgtcacgggcctggccatgctcctggggggcacggtagccaccgtgttcgtgcagccgtggagcatccccgtggacatcacgcccgagctcgtgggcgtcatgggtgccatggtgatcatcggcacgttcgccgcgtacctgttctacctgcagggcatcaccgatgccggcccggtgcgtgccggcctcgtgggctgcgtcgagccggtgtcggcaacggtcatctcggccgtgtggctgggcacgcccgtcacgccggtggacgtggcgggcattgccatgatcgtggtcatggtgctcttggtgacgcagcgcgaggaggcgcccgcgaagggcgagggcggcctggacggctcgcccgacgacctgccgcccttcgagggacgcgcctcgcttctgggctactatcgctcccgtcctgccacgcacgacgacttcgtgcgcttccaggaggtgctggaagacggccacgaggcgctggccgccttgggcatcgaggagaaggggtcgaagaagtacccctccgagcgccgcgtcatgcgcgccatcgactggggcaccgcccatgtggtcacggtgcccgagcgcaccggcgacgaggaggccggcggcgagcgcatcatcggcgtgtttgccgtcgacccgcgcggagacgaggcctatggccgttcctcgggcgcggactggctcaccgagtctgccgagcctcctgcgggggaggccccgtatgcggccctgcactgggtgtgcgtggcatcggaggcgcgccgccgaggcgtgggcatgttcatcctgggcgaggccgagcgcctcgcgaaggctgccggcaagcgcagccttcgctgcgatgtgtacgagggcaacgagcccatgcgcgcgctgctcatggagtacggcttctcgtcctgcggcaccgctgtcctgcgcgaccgcctgggccgcgagagacgccgcgccgcgttcgagcgcctgtggtgaaggcgggcggccccgccggccgtgcaatcctctgaccgcgccccaaggcgcccctgcgacctgcgggtcgacgctttgtttcgaacggctcctttgagaagaaagagaacatccccgtgcaattccgctcaacccgcgcgtcggacgtcgaccgcatcatggacatcctcgccgacggccggcgcgcgctcgccgagctcggcatcgaccagtggcagggcgggtacccgcatcgcgaggctatcgaagccgatcgtgcacgcggagagtcctacgtcgtggtcggcgacgaaggcgacgtcgtggccacggctatggtgggcttctcgggcgaacgcgactacgacctgatcgatcggggctcatggctcaccaacacgcgctcggatgatgcgtgctacggcgtggtgcaccgcgtggcggtctcggcctcgtgcaaggggcgcggcgccgcctcgttcttgctggcctgcgccgaggagctgacgcgcgaccgaggatgcgagagcgtgcgcatcgacacgcatcctggcaacctgcccatgcgccgtttgctggagaagagcggctacgccgaatgcggcgtcatctacatcgcgcatgccgaagcgggcacgcccgagcgcatcgcctacgagaagctggtgtagaccgggtgagcggtcgcgccgtcatcccttgcagcgcccgcgtcggcgggagcgcgtagctgtcgaaattctgtcggttgcccatctgggggacggcctcaatgcggcacggtataatgctgagcattatgtcggtgaaatctcgcgagaaaatagcgctcttcgtgttcctggtccttatcgtccttagcctgtgcggcttgggatggtacctggtggcagggcactcttggaacgtggcggcatcgaacctggatgacacgttcggaagcatggacggctacaccgccatcgtgtacccggggactgccgtcgaaccggtggccgggaagggtgcgggggatgcggctgcggaggacgatgcggttggggacgcggccgacggcaaggaatcggccgaaggcgcggctgccggcaaggaggccgatgccggctcgccggatgccccggggtcgtccggcggcaaagacgccaccggcacggcagggaccgcgtccgtcccgggaacggatgccggggagagcctgctcggctcgaagaagaagacgctcagcgcccaggaggcaaaggaaggctacgaggagaagggcgccacggtgttctcgctcgacacggtcgacctcgacgcgtaccgcgagggcgtcatcctgaagaagggcgggcaccgcttcggcgttttcggcatcgccgagcccacgtccaccatcgtgctggagaagcagatcgcctacttcaagcgccacaaggtcgatttcatcgtgctcgtcacgcccgacaaggagtacgccgaggacgtctcgggcatcgacatcgtggtgtccacccaggacgaggacctgttcgtcatgggcgagaccatcgacggcacgttctacgtggacgccccggccgtcggctcggtgggcgccatcctcatatcccccagcaacgtcgtgtccgccaaggtgctgcaggcctcgtagggcgtcgtccgttaggcgcggttggtgcctcgtacgaggcgggcgagaccgtgtagagaggttcaagcaggcgggaaatcctcccagttcaaagcctttcaccatgctacaatgcctccgtggatctaaaggcgaaggagcgatacgtaatggcgggcgaggcgggcaacgggcagggggcctccaggttctcgtacaagcagatggcgctctacggtgtcatgctggccgttgtctccgtcatggtggtgttcgccttcggagcgttcatggcggtctccgacatgcgtcacgaggcggacgtgtcgatcgcggcggcccttccccgcgtggaggggcgcattgacgagacgttcaagctgctcgagacgctcgcggagagcgagacgctctatgatcccgacgtcgacgtaatggagaaggtagatttcgtcgacaaggtaaacgagcatttcgggttcttcctgctctgctatgtggacgccgacatcaacgtgtgggacgcaacgggacctgccagcctggccagccgctcgcacatgcagcgcgtgtactccaccggcgagcgctacgtcaccgacagcttcgtggcgggcgccgacggcaccaccctcaactacaccgtgatcgtgccgttgcgcgacgggcagggtgccatgccacgtcggggcacgtgtacgacgatccctttctcgagcccatccgcgattccatcgccttcggcatgaccgccgacgtcgtgcaaagcgagcttctggacctgaacccggtggcgttctggaccgtggacggcctcgatgtgcgctactacactgcctctcccgtggcgggtaccgagtgggacgtcgtgagcgtggcagggttctgggacgcgtatgccaaggtcatgcgcgtcatcttcccgctggccatcgtggcggtggcagtcatcgcggcggccttcctgcttatgcagcgccccttcgcgcgccagatgaagaaggcgcgccttttggagaagtcggttgccgagctgcagaagaaggtctacagcgacggacccgccgacagcggcttcgccgacctcatcgagctcacctcatcggggctttccgacggcctgaccggcacggtgacgcgctcggtgttcacgagccggctggcgaacgcgctggacggcgccggcgacggcatctacgtgctctgcttcatcgatatcgatgacttcaagggcatcaacgacacgttcggccacgcaaccggagacatggcgctcaaagccgtgggcttcctgctgcgcgagttcgagcgccgctacgacggattggtcggccgctacgggggaggcgagttcaccttgctcatgaccgacttcgacgacgaggccgaactgcgacgcgtcctcgacgagctcaccgagcgcctgcacgtggatatccgggctggaggcgcctcgttcgcggtgcactgcagcatgggcgcgtcggtgtgggatcgccaggtggacgccgacgagctcttggagcaggcggatcgtgcgctgtaccttgtcaagcagcgtggcaaagaaggctactgcgtctaccaggacgaggagtggtcatgaggcgttcggcgtggcgagggggcttcggattcgcgttgctctccctcgcggcggtcgcgctgtgcgccgcgctcggcatggccgtctacaacgaggtgaaggacattcgccggaccgatgccgacaacctgctcgcctcattccagcagaccatcgagttgaagctgaagggcggcttgggcgagacgggcgatttggtggccgccctcgaggtcgatccttccgacgaggcatggttgcccgctgctgcggatgccctcctcgcgcgcgacgaggtggtcggcgttctctacgtggtggacgatacgatgcgctacgcgtttcctgaaagcgacttcggcaacatggtggggcgcgacctctcccagttcacctacgtgttcaccttggcgaagtataccgacggcttcgtcgtggaggggccggtcacgcttgagaacggcgttgagtcgttcgtgttcgtggaacccgtcgatgtcgacggcgcgtaccatggcgaggttgcggtggccctcaaggcggatttcgtcatcgagcagctcgacctttccctgctcgagcagggcggctacctctacgagctgtgggcggtaagcccccaggacggtcgcaaggacgtcatcgccgtttcggacggggggcacgatttctcccatgcggcgaaagcgaccttcggcatgccctccgaatggacgctgtccgtcatgccggccgacggctgggttccgggcctctggacggcggccatcgtggccgtggcgaccgcaatctcgctccttttagtcggccttatgttcctcggtgaacggacgaggcggatggaacgatgcgtcgaacgggcgaagcgcaccgatcaggagacgggcatgtacaacttcgacggcttcgttgagatgctcgagaaagaaaggctcggccccgattcgccgctcacgctcatctgcgcgacggtggacgatttcgaggaaacgtccatcgcaatgggccgggacgcgcgacaggagtatcttggcaaagtgctcggggagatagacgcggcggtgcgcggcaaccaggtgggcgcacgggtgggctgcggaaccttcgccgtcgccatccgcgggcgggtgggcaagcaggtgctcgtggacacgatgcgctcgctcgagctcgccctcatgtggaaggtgcgcgcgggcgaccgcaaggcgttctgccgcgcacgttcggcagctgtgtactatcccgaggacggcgacgacctcgtggcgctcttggagcggacgatcaagctgctcgatcgcgacaagcccgaggggttcggctccaatcgcaggcgccggaagtagaacatgaagaggccccgtcgatcgacagggcctcttcatgcgctcgcttcgtcgcgttcgcgctacacgatgccttgggccatcatggcgtcggcgagcttcttgaagccggcgatgttcgcgcccatgacgtagttgccctcgtggccgtactccttggccgcgtcgtcggccgcgtggtagatgttcttcatgatgccctgcagcttggcatccacttcctcgaacgaccaggagaggcgctcggagttctgcgacatctccaggccggacgtggcaacgccgccggcgttcgccgccttgccggggcagaacaccacgccgttctccatcaggtagtcggtggcgtccatcgtggtgggcatgttcgcgccctcggccacgatctggcagccgttcgccacgagctgcttcgcgtcctcgagcaagagctcgttctgcgtggcgcagggcagggcgatgtccacgggcacgctccacacgccgcgcccgtcgtggtactccacgccttccttgcgcttcgcgtactcgctgatgcggccgcgctcgacctccttgatctgcttgaccaggtccacgtcgatgcccgtcgggtcgtgaatccagccggtggagtcggagagcgtgaccaccttcgcgccgagctgctgggccttctgcgtggcgtagatggccacgttgccggagccggacacggcaacggtcttgccctcgaaggagtcgtcatggcagttcaggtactcctgcacgaagtagatgaggccgtagcccgtggcctcggtgcgggcgagcgagccgccgtaggacaggcccttgccggtgagcacaccctcccacacgttcttgatgcgcttgtactggccgaacatgaagcccacctcgcgggcgcccgtgccgatgtcgccggccggcacatcggtgtcggcgccgatatggcggtagagctccgtcatgaagctctggcagaagcgcatgacctccaggtccgacttgcccttcgggtcgaagtcgcagccgcccttgccgccgcccatgggcagcgtggtcaggctgttcttgaagatctgctcgaagcccaggaacttgatgatgcccaggttcaccgacgggtgcaggcgcaggccgcccttgtagggcccgaggcagctgttgaactgcacgcggtagccgcggttcacgtgcacgttgccctcgtcgtcgacccacggcacgcggaacatgatgacgcgctccggctcgacgatgcgctcgagcagccccgccttctcgtaggctgggttggactcgatgaccggttccagggacttcagcacctcggtgacggcctggatgaactccggctgctcggcatccttggccttcacctgctcgatgacgcgatcgacgtagctcatggtgggggaacctccttcggggaattttcacatgccctcattataaggtgcgaacggtgatgacaatgattatttaaacgttttgaaacaaatccgctccggacgggcgcatgcgggatgcgctcccgcccctcccgccgcgtccgacggcggaggcttcgacgagtgttccggacgtgggactgccaggggcgggcggatgcggtagaatcgtcgggacgcgagaaggagagagcatgaacgagatcaagtgcccccattgcggcgggatgttcaccatcgacgaggccggcttcgcggccatcctcaagcaggtgcgcgacgccgagttcgacaaggaggtgcgccgccacgccgacttgctggaaaccgagaagcgccaggcggtggagctcgccgtggcccaagcgctcggcgatgcgcagggagcggcggcgcagaaggaggcgcgcatcgccgagctggaggcccgccttgaggcggcggcgcgcgagcgcgagagcgagtcgcgcctggcccaggccgagcgcgagcgggcgctggccgacgcggcggcggcgaaggatgcccgcatcgccgagctcgagcagcgcctgtccgcgcagcagcgcgccaacgaggccgagaagcagctggcggtccagcaggcgcgctcggccctcgagcgcgagcgcgacgagcttgcggcgcaggtcaagctcaaggatgccgagaagtgccaggttgccagcgccctcaaggagcagctggccatcgagctcaaggcgaaggacgacatcatcgcctacaaggagggcgagatcgagcgctacaaggacatgaaggcgcgcctgtcgaccaagcttgtgggcgagtcgctcgagcagcactgcgaggttgagttcaacaagatccgcgccacggcgttcccgcgcgcgtacttcgagaaggacaacgatcagtccggcggcagcaagggcgacttcatcttccgcgagtgcgacgaggagggaaacgagatcgtctccatcatgttcgagatgaagaacgagtccgacgagtcggcctaccgccacaagaacgaggacttcttcaagaagctcgacgccgaccgcacgaagaaggggtgcgagtacgcggtgctggtcaccttgctcgaaccggagagcgagctgtacaaccagggcatcgtggacgtgtcgtaccggttcgagaagatgtacgtcatccggccgcagttcttcatcccgatgatctccatcctgcgcaatgcggcgctgaactcgatggcgtacaaggcggagctggccgtcgtgcgcaaccagaacatcgacatcacgaacttcgaggagtcgatggaggcgttcaagacgggcttcgcgcgcaactacgacctggccagccgcaagttccagacggccatcgacgagatcgacaagaccatcctgcacctgcagaagaccaaggacgcactcgtgtcgtccgagaacaacctgcgcctggcgaacaacaaggcccaggacctcaccatcaagcgcctgaccaggaagaaccccaccatgaaggccgccttcgaagcattgaaggccgatcaagacggcgacgagtcgtaacgacggggaagtcggcatgcagccgcccgcctgtacggggcacgcgcgggcgggcgcgctcgtcgcagtgctcgcggcatcgtcggctcggtcgcctcgggctcggggagggcgggttcccgctccgcgcggactagggcggcttcgtcgagaacggcaccggaccgcgcgtatcggaaagcgttcgtcgagcggcgcccgcacggcatgaagggcttgcagcggggaatggacggggcggtcatcgggttctccgacctgtcggccgagggcgtgctgcgcgcgaaggcgatcgtcggcaacgacgacgcctcgtcgggctactggggagaacatgcccgccgcatgatgcgccggctctcgggacccgaagggctcccggccttcactgaggcgcatgtgcgctacaaaatcaccgatttcggcgttgtggcaagtcggggaacgccccgtgcctcgtattgattcggaagccctagtcgaaagtcctggtggaaacggtatcgagggtaatggttttgcgacgggcctttcgagatcccgtcgatgcgccgaaatcggtgattttacagaaggaaccttcgccagctagtgctctcgttctccgtcgcgcagcgactcctccacgaggcggcgcaggttcgccgcgaagcgctcgcggtcgtcgtcctcgaagggggcggggccgcgcgtgcgcccgccctgccggcgcaccttcttctcctcgtggcggatgtgcaggtcgaggtcgatggtggccagcgtgaacacgcgcccgcgcacgccgatggcccgcgcgccgcgtccgagcgccatggcggccaggccgatgtcctgcgtcaccacgatgtcgccgggctggagttcctgcacgatggcgaagtcggccgcgtccgcgcccacgcctacgggcagcgtgtcgacccagaacccgccggtgggcgtgcgcgggtcgccccgccgcagatggcgcgccaggttctgcgtcgagttgcccgcgatgacggcgggcacctggcacgcgcgcgcgaccgcgagcgcctcggccgtgaccgggcacgcatccgcatccaggtagatggtgggtttcatggcacctccgtcgctttctgaacccccaaccagtatagggctgcgaaccgtgaggtttgcgcgcattccgtaacgggccggtgaccgttctgtcaggagtctgtggccgcaacagcgcttccataatcgggtcctatctttgatccgcccgcttgaggaacgcagtcgggcttcaaccacgacgagagagacggggcggtggtagatggcagaggagaacggattcttgctttcggttgagaaagcggtgcggttgcgtccgcaggcgcccgcctaccgcgcggccgacgggacgacgatgacgtacggggagctgtggaagctgtcggacgccatcgccgcgacgctggcggcgcgcacggacgaccgcgcgccggtcgtggtgctggggcacaaggcgccgctcatggtggccggcttcctgggctgcctgaagagcgggcacgcgttcgtgccggtggacacggagatgcccgccgcgcgcctcatggacatcgtgtcccagctgggcgcgccgctgctggcagcgacggtgccggtgccggaggcgctgcgcggctgcgtgcctgtcggccgcatcgtggacgtgcgcgcgatcgcgtcggccccctgcccggtgcgcgcgcccgaccgcgggcgctgggtgacgggcgagcagacgcagtacctcatcttcacgtccggatccacgggccgcccgaagggcatcgaggtgagcgcgcgcaacgtcgcgcgcttcatggactgggtgcgcaccttcccggtgatcggcgagggcgggcgcgtgttcctcgaccaaccgccgtactcgttcgacctgtccgagtacgaggtggtgggcgcgctgtccacgggcggctgcctgcacgccgtcgagcgcgaggagacggaggacctgcgggcgctgttcaccgacctgcgcgcttcgggcgtggaggtgtggacgtccacgccgtcgttcgctgacctgtgcctggtcgaccgcagcttcgacgagcggctgctgcccgacgtgcgcctgttcctgttttgcggcgaggccctgcgccgctccacggccgccgccctgcgcgagcgcttcccccgcgcccgcatcgcgaacacgtacggccccaccgagtccacggtggcggtcacctacgtcgagatcggggacgccgagctcgccggcgagcgcccgctgccggtgggcgcggcgcgccccggcaccgagctgcgcatcgtcgaccccgagacgggcgccccgtgcgaggccgggcggaccggcgagatcgtcatcgtaggcgacacggtggccaagggctacttccgcaaccccgagaagacggccgcagccttcttcgacgcgacgctcgccgacggctcgcccgcgcgcgcctaccgcacgggcgacgcggggcacctcgacgagagcggcatgctgtactgcgacggccgcttcgactcgctcgtgaaggtgaacgggttccgcatcgagctggaggacgtcgaggagaacctcggcgcgctgccgctcgtgaagcaggcggccgtggtgcccgtgcgccgccgcgagcgggtggcgtacctgaaggcgtgcgtcgtgctgcgcgagcgtccggccggcaccgacttcgagatcgcgcggctcatcaaggcgcggctcgccgagcgcgtgcccggctacatggtgccgcgcgcggtgacgctcgtgggcgagctgccgctcacctgcaacggcaaggtggaccgcaaggcgctggccgaggcatgaggcatggcgagcatcgatgacgttctacgccgatccgagcttcttcgcgctgctggcgctgaccgtggcgggcgccgccttcctcggcctgcgcgagaagccgctcgcgcgctacggcatggccgcctcggcagcgttcctggcgtgcctgttctgcaaggacctgcccgggctggccgtggcgttgtgcttcgtggcggtggccgtgctctcgacgcgctgggtgctggcgaagccccgctcgaacaagcgcttcgccgtcgcgttcgcgctcatcctcgcgccgcttctctcggcgaaggtcggcgcggtgttcgaccagaacctgctgggcttcatgggcgtgtcctacatcacgttcaaggcgctgcaggtgctgttcgaggtgcgcgacggcatcatcgaggagctcggcctgttcgactacctgtacttcctcctgttcttcccggtgttcacctcgggccccatcgaccggtcgcgccggttcgccgaggatgcgcacgcggtgcgctcgcgcgacgagtacgcgggcctcttggcgcgcggcatcctgcttttgctggccgggctcgtctacaccttcgtcgtggccgcgtggctgcatcggttctacgcgccggcggcctggggctcgggcccgtttctggccgagctgggcgcgcaggtgcagacggcgtacgcgtacgggctgtacctgttcttcgacttcgcaggctacagcctcatggccatgggagccagctactgcttcggcatccggacgccgcgcaacttccgcgccccgttcgcctccatcgacatcaaggacttctggaaccggtggaacatcaccctgtcgttctggctgcgcgacttcgtgttcatgcgcttctcgcgcctggcgctgaagcgccgctggttcgacagccggctggctgtcgcgtgctggggcttcgtgttcgacatggccctcatgggcgcctggcacggcctcacggcggactacctgctgtacggcctgttccacggcctgctgctggccggcaccgaagcgttccagaagaaatcgaagttctacaaggcgcataggaaagaccccgcgttcaaggcgctgtcctggttcgtcacgctgcagctggtgatgttcgggttcgcgctgttctcggggcagatcacgatgctcgtgaaaggagcgttccatggctgataagacgcacgaggagctcgaagagaagatgctcgacatcctcgaggaggtgtgcggcgacgacgaggtgcgcgtgcgccgcgacgaggacctgttcgcgctcgggctgctcgactcgatgggcgccatcgagctgctcgtggacatcgaggacgagttcggcgtgttcatcgcccccaccgaggtggagcgcgccgagatgaacacggtgaacctcatcatccaccaggtggagatcaggctgtaggcgaccatggcgaaccggtcggacaccccgggcgcggctccgtcgggcatgcgccttctgcgcgcggtgctggcggggctgctggcggcggcgctcgtgctggcgggcgcgaacgccctgctgcccgcgcagaacgcgcacgaccccgcgcgcctgtacgactacgtgtactcgggcacgaagtccgagagcacggcgttcacgctggccaccatgagcgacgacggctacctggcgttcgggtcgtcggaattctacatctcgaaggacaaggtggcgcaatgcccgcagcaggtgctcggcgagaacgtgacgggcgtcgacctcacctacgtcggtgaggcgtacgaccagagcctgtggcaggccatcgccgcgggtgcgtacggcagccaggtgaagaacagaaaggcgatgatcgtcgtatcgccccagtggttcttcaagggcaacggcgaccagggcaagttcgcctcgaagttctcctacgcgctgtaccgccagttcgcggacaacccgagcatctcggatgagacgaaggcctacgtgcgctcgcgcgtggagcaactgggcgtggacgcgaagaccacggcgtcggcgcatcgcgacacgccgctcgacgcggtgaacgacgcggtgcgcacggcggccgacgacctgcgattgcgctccgagctgccgagcgtggtgggccaggcgccgctcaagagcgccgtgcgcgccgcgggcgagcccaccggcgagcccgactgggacgcgctgctcgaggaggccgacgcgtcgggcgacgccgcctgcaccacgaacgattacggcgtctacgacgcgtactggcagaagaactccggctacgacgccgagcgcggccagaccttctcgcaggccgacgaggagtacgccgacctcgcgtgcttcctccaggtatgccgcgagacggggatcgagccgctcgtggtcatcctgccggtgcacggggcctggtacgatcgcgaggacgtctccgccgacgagcggcaggcgtactacgagcgcgtgcgcggcatcgccgacgcggcgggcgcggcctacgccgacttctccacctgcgagtacgagaagtacttcctctgcgacaccgtgcatcccgggtggcgcggctgggtgcgcatcgagcaggcgttctacgacttcgtgcacgatcgcgacgacgccttcctcggcggcggctcgttcggcgcggccgagggcctcgacgcggcgggcaacgcgggcgcgtcgctggcgggcgcgggggaggcggcctcgtgatggcgcgggcgatgcgggcggcggccgcggtgcgcgccgcggtggaggcgcggccccggctgctcggcgcgctcgcggcgctggcgacgtcggcgatggtcgcgctgctcgcgtggttcctcgtgttctcggggctgaacgggccggtgcagttcgtgtacagcagcttctgatggcgcgcgacgacgacaggcgggcgcgcgcgtcgcgcgcgggacgggttgcgcgggcgctcgccgcagcggcgctcgcgctggcgtgcgcgctgccgctggcatcgtgcggggccgaggcggatacggcggatgacgagggcttcgccgccgaaacggcggcgacggcggacgagggccccgccgacgacgaggaggggcccgaggacgcggacggcgccgcgcccgcagggctcgagccgacgggggaggacctcgccgcgcgcctggacgcctacctgtccgcgaacttcccgcaggtgggcatgcccggggcggcggtcgccgtggtcgacgccgacggcgtgcgctacctcgccacgctcggcgactgccccggcgccgacgcgccgttcgtcgtgggctcgcttagcaagtcgttcacggccgtggccgtcatgcagctggtcgagcaggggacggtggacctcgacgcccccgccgcccgctacgcgcagggctacgacgtgcccgacgaggtgacggtgcgcagcctgctcaaccagacgagcgggttcggctcccgcgattcgctctcggaggccgccgacgggcggctgggcgacacgttcggctcgttctcgtacgcgaacgcgaactacgacctgctcgggcgcgtcgtcgagggcgcgtcgggcgagccgtacgcgcgctacctcgacgagcacgtgctgggcccgctcgggatgaccgcttcgacggccgatcccgttcgcgccgagacgctcggcatggcgccggggcaccgcgactggttcggcctccatctggccgacgggttccggcacgcgcagggcgacgacgcatggggcggccccgcgtcgggctacgtggcgtccagcgtgcaggacatgaccggttacctgcgcatgtacctgaacggcggcgcggccgacggcggcgggcgcgtgctgtcggccgacagcgtgcggcgcatgttcctcgaccgcgtgcccgatccggagggcgacacgtactacggcatggggtggacgtcgtttaactgggacgacggcgagctcgtgctgtcccacgacggccaggtggagaactacgtggccagcatgtgcctgctgcccgagcgcggcatcggcgtggtggtgctggcggacgccaacgacaacgccggcggcaacagccgattcttcgacctggtcagcggcgtggtgaccgcggcggtgggcggtgtgcccgcgccggttgacgcgcagtggaccgcgctgtggcgccagcgcaccgacgtgctgtacgcgtgcgcggtgctggtctgcgccgccccgctgctgctggtacgccgctggccgcggaggctggcctcggcgcctccccgccgcctgctcgcgcagggactcgcgctgcacgcggcgctgcccgccgtcctcctcgcgctgccgctcgcacggggcgtgccctggcgcgacctgctcgcgttcgcccccgacgcggcgctcgtgctcgtcctgagcgccgcgctgctcgtcgccgcgggggcggcgaagctcgcgtgggtcgcgctggcgcgaaacgctgcgccgcccgcgaacttgcggtaagatggctccttcaccgatgagatcgcagcgcaggctctcgccatgcgcacggcgggaagggatgtcgtggagatactggtcgtcatggtcgcgggggtgctcgtgggagcaacggtgttccccgcgcggctcaaggggctgaacgagaagctgacgctcgcggccaccgggctgctcatcttctcgatgggcgtgctgctggccgggcgcgagtcgtttctggaggagctcggcaccgtggggtgggccagcgtcctgttctgcctcgtgccggtggcgttctcgacgatcgccgtgtacgcgctgacgagcctgttcatgtccgacatcgcccgccgcccggccggtccgcgcgtggccgctgcgcaggacggcgccgagggcggggcgggcgtgcgcggcgaggccgcgatgatcggcgtggcagtgggggcgctcgcgctcggcgcggcgtacgggctggcaaacgtgccgatcgcgccggtcgacttcgtagccggccattccgaggccatcctctacgcgctcatgttcttcgtgggcatcagcgtgggcggcagccgcggcctgctgggcaagttgcgccagtaccacgtgcgcgtgctcatcgttccggcgggcatcgtgatcggctcggtgctgggcggcctcgcgtgcgcgccgcttgcgggcatgccgctgcccacgggcgcggccgtggcgtcgggcctgggatggtacagcctcgcgggcgtcatgatgaccgacatcgccggcgcccaggtgggcagcatcacgtttctggcgaacctgctgcgcgagctcgtgtcgttcttcagcatcccctggatcgcgaagcacctcaactaccccacgtgcatcgcgcccgccggcgctacgagcgaggacaccacgctgcccatgctcatccgctgcacgaacggcgagaccgtggtgctctcggtgctcaacggcgtcatctgctccgcgctggtccccgtgctgatcgaggcgttccatcagctgatgtagggggtggggccaagggccgcaccgtgccggcttgccgcatggatccctcgtcctgccccgggtccgttcctgccgtcccctggccgcattggtcctccgccccctggccgcgtcggacctccggcccctggccgcgccgattccccgtcccctggccgcgtcggacctccccgcgcggctccgccgcgccgtcgcaagaatgtttcacgtgaaacatttgttcgggaacatccgtccgttttctgctacactgtacctatggaacagacgatcgagacaacgacgagcgtacggcaggacgaagacgacggccgaacgcgcctgaacgcggcccagcgcgaggccgtcgaggcgaccgaggggtacgtgcgcgtgatcgccggcgccggcacgggcaagacgcgggcgctcaccgagcgcttcgcctacctggtgaacgagttgggcatcatgccgggcaccatcctgtgcgccacgttcacgaacaaggcggccagcgagatgcgccgccgcattcgacggctgatcggcgacagcgacacgggctacatcaacacgttccacggcttctgcgtgtcggtgctgcaggaggactgccacgccgtccagtacccgaagagcttcctcgtgctggacaacgccgacgtggacgccatgctgcaggtcgtctacgaggagcgcgggctcacgctgcgcgacatgacgttctcgaaggcgcgcgacatgatcgagatcgtgaagctgaaggagcgcccggactactaccgcgacatgctggccctgccgctcgagggcctgcggcagaagtacctcgatgcgaccgccgcgaaggacgtcatcttctacggctacctctaccaggagaagaagtgcttcgggctggactacaacgacctcatcgtgttcgtgctgcacctcttcgagcagaaccccgacatccggtcgaagtggcagaagcggctcgagtacattatggtcgacgagttccaggacatcgacggcctgcagcacgagctcatggaggtgctcgccggctaccacaagaacctgttcgtggtgggcgaccccgaccagaccatctacacctggcgcggcgcggacgtgcgctacctgctggacttcgaccgcgcgttcccgggcacgcgcaccatcatgatgctggagaactaccggtcggcgccgcgcgtggtggccgtcgcgaactcgctgatcgagaagaaccgcgagcgcatgccgaagaggctcgtcgccgcgcgcgcggcccatgggcccacggtgtggcatcacgccaagagctcggccgacgaggccgcgtggatcgcccagggcgccctcgcgctgcacggcgagggcgtggcgtaccgcgacatggcggtgctctaccgcgcccattacgcgtcgcggccggtggaggaggcgctgctgcgcgccgaggtgccccacgcggtgtacagcggcgtgccgttcttcggccggcgcgagatcaaggacgcgctgtcgtacctgcggctcgtcgcctaccaggacgacctggacttcgcgcgcgtggcgaacgtccccaagcgcaacctgggccagcggcgcatggccttcctgcgcgagaaggccgacgaatggggatgcagcctcatcgaagcgctcgcgcgctcggcggacgacgagctgttcaagcgcacgaaggcgcggcagctcctgcagctggtcgatcgcttccgctcgtcgtacgaggggcgtcccgtgtccgaggtgctggcggccgtgctgtcggaaagcggctacgagggcatgctgcgcaccgagggcggccaggagcggctcgacaacctggccgagctgaagcagtccatctacgagttcgagtcgacatgcggggaagaggtgaccctcgagcactacctggcgcacgtggccctgctcacgaacgccgacgcgatggacgatgcgcaggacaaggtgcggctcatgaccgtccatgcggcgaagggcctcgagttcgcgcacgtgttcctctgctccatgagcgagggcgtgctcccgtcgcgcaagacgagcacgccgcagggcatggaggaggagcgccggctggcgttcgtggccatgacgcgggcgcgcgacgggctgtacctcactgaggcggaggggcgctcgcacgagggcgcgccgcgctacccctcgcgcttcctgctcgacatcgacccggcggcgctcgagttctcgaacaagcccgacgagcggcggatcgaggacgcgcgcgccgcctacgcgctgaccgaccgctggatcgccgacctcgtccgcgacgcgcgtttctccccgggcgaccgcgtggcccacgcggtgttcggcgtcgggcgcgtggcggccgtcgacaccgagaagcgcgcctacgaggtggagttcgacgacatggacacgccccgcaccatctcgttcaaagccaagctggaaaaagcctgacggcttttttcgccatacgcaggctgcgttgcgcagcctgcgcctgcgtcccgttcgcggcccgtattccgcgcggctcgtgcgcccgcatccgtgccccaaacgtctgctttccgcgcctcgagcgtccgatgcaggatgtttcacgtgaaacatttgttctgaccctctccttatcgcgcaggaccgcggacaaccaccccggccccctgcgcgtggcggcgccgatccggcaagtgcccacgtgaaacgtcgccgaggcgggtgagggccgccctgcaaccccgcgcggcgcctgtcggcatcggggcagcgcgcgaaaccccccgttcgtggcgtatttcgacgggaaatgatcatcggctcgggagccggtcggcgactcgaagccgcacgccctgccgacctggggcgatgccgaaggggcggtttcgccgcggcgctttcggcccggtgcgggcttctcgatgatcattttccgtcgaaatctgccacgaaacacggtttcgcgtgcgctgggcggtcgggaaggcccgaacggcgtccgccctgtgcgcgacgagcagcgccttccccgaacacccttcctctcgcgtttccggcgggggctcgggtggcggatcgcccgtcgtcggggggggggggcttccttttgcattccgcgtggagcggagcgtgcccaggggaacgcttgtgcggtttgctatactggcggtatggacgaactcaacgaaaccaacaacggagccgcctcgtttgacgtggacgacggcctcgggcctgccgacgcgggcgggttcgagcgcctggatcccgagcccgcgctcgatcccgaggacgccgagcgcctcgagcgcgagggccggcggcggcccgcgctcaaccgcgccgtgcgcgagcgcggggatggctccgccgccgacgatgcgctcgccgccaagctcgagcgcatcaagcaggagctgaacgccgtgcccacgctgccgggcgtgtacctgtggaaggacaagtccggccaggtcatctacgtgggcaaggcgaagcagctgcgcgcccgcatgcgccagtacgtgaactaccaggacgagcgcgcgaagatcccgcttctggtcgaccagatcgacagcttcgactacctcgtggtggagaacgagcacgagtcgctcgtgctggagaagaacctcatcaaccagcacgctccgttcttcaacgccgacttcaaggacgacaagtcctacccgttcatcgcgctcacgaagggcgacgtctttcccgccatcaagtacacgcgcgagaagcaccgccccgacaccaagtacttcggcccctacaccgacagccgcgccgcccgcgacatggtggacatcgcccgccgcgtcgtgccgctgtgcgccacgtcgtgcgccgactggcgcgggctcaagcgccgcctcgacaaggacccgctcgccctgctcgaccgcgacgcgcgcccgtgcttcgacgcgcacgtgggcctcggccccggcgcgtgctgcggcggcatcacgcccgaggagtaccgggtcaacgtcaagcgcatcgagcgcttcctgtcgggccagcaccgcgagttcgtcgaagagctgaccgaggagatgcagaccgccgccgccgagctcgacttcgagcgcgcggcgcgcatcaaggcccgcatcgacacgatcaacagcctcaccgacaggcagcacgcggtgtcaacgcgcaacctcgacgcggacgtcgtgggcctgttccgcgaggagacggtggcgggcgtgcacgtgttcatggtgcgcgagggacgcatcatcaactccaacgagttcgtgctgaaccgcggcaaggacgtgcccgaccaggacctgctgcacatgttcctcctgcgctactacgacgccaccacctccatcccgcacgaggtcatcctgcgcgacgagcccgaggacaccgaggccatggaggcatggctcacggagaagctggccagcccccatggcgccaaggtgcgcatctgcgctccgcagaagggcgagaaggccgagctcgttggcatggccgagacgaacgcgaagcacacgctcatgcgctacaaggtgcgcacgaactacgacgacaagcgcatcaacaacgcgcttctgcagctggagagcgcgctcgccctcgacgagccgccgatgcgcatcgagtgcttcgacatctccaccatccacggctcctacacggtggcctcgatggtggtgttcacgaacggcaagcccgacaagaaccagtaccgccgcttcaagatcaagacgccgctcgacgaggcgaacgacttcctgtccatgcaggaggtcatgagccgccgctacgcgcccgagcgcatggccgacgagcgcttcggcagcaagcccgacctcatcatcctcgacggcggcaagccgcagctgtccgcggcgctcgagatgttcgaccggatgggcatcgacgacatcgcgatgtgcggcctggccaagcgcgacgaggagctgttcgtgccgtggcaggacacgggccccgtcgtgctgccctcgggctcggcgtcgctctacctggtgaagcaggtccgcgacgaggcgcaccgcttcgccatcacgttccaccgggagctccgcggcaagggcatgacggcctccatcctcgacgacgtggtcggcatgggccccgtgcgcaagaaggcgctgctcaagcacttcaagtcgttcaggaacctgaaggccgccacgctcgaggagatcaaggaggcgcgcgtcgtgccgaacgaggtggccgaggagctctaccgcgtgctgcagcagtataatagggatcgcaaggacgagcgcgtcgtgggcggcggagtcgggagggcggagggccctggcacatccgaggccgcgtgcggcccggacgcctccgacgcgctcgacgagcgtgcggccgcctgcccgcccgcgggcacggggccagccgccacgtggtcgcccgccgtggacgaggcggtgcgcgcggccgtgcagggcagggagcccggcagggaaggaaacgagggaaggacgatcgcatgaccgacgagaacaccgagctggcgagcatgcccgaactggtcatcgtgagcggcatgagcggcgccgggcgcaccgaggccatgcactcgttcgaggatctgggctacttctgcgtggacaacctgccctccagcctcatcggcaatctgctcgagctcaccggcatgccgggccagcccgacgagcaccgccgcctggccgtggtgtgcgacgcgcgcaaccgcgacttcttcgccaacctcacggccgagctggcgaagctcaaggcccagggcatcggctaccgcatcctgttcctggatgcggccgacgagaagctcgtcgcacgctacaagtccagccgccgccggcacccgctgtgcgccgacggcgcctccatcgcgcagggcatcgaccgcgagcgcgacctcctgttcgaggtgcgcgaggcggctcaccacgtggtggacaccaccgacatgctgccggcgcagctgcgcgcgaccatccgcgcgctgttcgcacccggctccgagcagcagggacttgccgtgacggtgtactcgttcggcttcaagcacggcgcgccgctcgacgccgacctcgtcatggacgtgcgcttcctgccgaacccttactacgagccgcagctgcgcgcgctcacgggcctcgacaagccggtgcgcgactacgtgctctaccgaccggagaccgaagagttcgagcagcgctggcgcggcctgctggattgcgtcatgcccggctacgtggccgagggcaagcagcagctcgccatcgccgtgggctgcacgggcggccagcaccgctccgtggcgctggcggagtccacgggcgactacctaaagacgaagggctaccgggtgagcatcgcccatcgcgacctggcgctcgccgagggcgccgacggccgcctcgcagcggacccgcaggcggcggcccccggccccgacccggcggccgccccgcagccgccagccccggcccccgacggccccgtggccgccccgcaggcgtagggcgcccccatggcgaagcccgcgttcacccacgatccctcggccaccgccgccttcgcggcgctcggctccacgcctcccgtggtcgggcccggcgagcacctgcgcgccgtggtcatcggcggcggtaccggcgcccccgtgtccatccgcacgctcctgtccatgggcctggacacggccgccgtcgtggccatggccgacgacggcggctccaccggcgtgctgcgcgaggaggcgaacgtcacgccccccggcgacgtgcgcaagtgcctggccgccatggcggccgatcccgccgacccgctcactcgcgcgttcaagtaccgcttcccgttcgcgggcaaccacacgctgggaaacctcatgctctccgcgctcgaggacgcggccgggtcgttcccggaggccatcgccatatgcgagcggctgctgggcgcccagggccgcgtgtacccctccacgctcgaccgcgtgacgctcgtggcgcgcacgcgcgacggccgcgagctggagggccaggccgtcgcctgccattcgcgcacggcgctcgagcgcgtgacgctgcgcgccgaccgctccatcgaggcctacccgcccgccctcgaggccatccggaaggccgacctcatcgtgctgggccccgggtcgctcttcacatccatcattccgaacctgctggtgccgggcgtggtcgacgccatacgcgcatcccaggcgagcacgctcttcgtgtgctcgctcgccgacatgcagggcgagacctggggcctcacggcccgcgagcacgttgaggcgctcatggaccacggcctgcgcggactcgttgactacctgctggtgcacacgccggtgccgctgcgccccgacagcccggccgccggcgtgttcggcgccatgaccggcgccgaacccgagcacgcctccacgtcgggcctcgacgatgcggagctctcgggccgtatccgcccggtgaggatcagctaccatgacgtgcaggccatccaggcccagggaccggtggtcatcgcgcgcaacctcgtggacagcggcagccccacgtggcatgatccgcaggccctgcgcgacgcgttctcgggggtgttgaagctatgtcgttcacggcagaggtaaaggacgagctcgcgcgcgtgccgcccacctgctcgcactgcgagaaagccacgctggcggcgctcgtgcgcatcgagggcacgctgttcttcagcgggcagggaacctaccgcatcgagatagccacggacgtgcccagcgtggcgcgcctcatcattaagctgctccacgagctgtaccacctgaagaccgagctcaccgtgcgccgcagcgtgctgcacaagacgccgaactaccttatagaggtgccggcacagccccatctggccgatgcgttgcgcgacatgggcgtgctctcggaggagggcggcctggagctgggcatcaaggagagcctcgtggcgaaggagtgctgcacggcggcctacctgcgcggcgctttcctcgggagcggcttcgtttccgacccgcgcggcgacttccacttcgaggtcaccgtggagagcggggacctggccgaggggctcgtggatctgctcgaccgcaagggcatcaacgcgcgcgtcatgcagcggcgcagctcgcacatggtgtacttgaagagcggtgccgccatcctcgagttcctcgcgttcaccggcgcgcaccagagcgcgctgtccatggagaacgcgcgggtcatcaagagcgtgcgcaacgacgtgaaccgcatgacgaacgccgagattgcgaaccaggcgaaggcggccagcgcctcggtggaccagatctacgccatcaaggaggtgctggaggcgcacggcatggagaacctgcccccggcgctgcaggagttcatacgcctgcgcgtgacctatcccgacgccaccctcaaggagctgggcgagcgcgcgaccccgcccctgtccaaatcggccgtttaccatcgcgttcgccggatcgagcagatggcgaaagagttacaccgctagaatggtttgcgtacgtgttgtatcatcgtctcagcttcagcgagcaagagtatcttatgaaaggggatacgcatggcaatcaaagtaggcattaacggattcggtcgcatcggccgcctggcgttccgcgcgatggtggaggatcccgagatcgaggtcgtggcagtaaacgacctcggcgacattccgacgatggcccacctgctcaagtacgattccatccacgggcgcgccttcgacacggtcgaggtcaccgaggacggcttcgtggccgacggccatgcggtcaaggtgctctccgagcgcgagccggccaacctgccctggggcgagctgggcgtcgacgtcgtcgtcgagtccacgggcttcttcaccgacggcacgaaggccaaggcgcacctcgacgcgggcgccaagaaggtcgtcatctccgcgccggccaagaacgaggacatcaccatcgtcatgggcgtgaacgacgaccagtacgatcccgagaagcacaacatcatctcgaacgcctcgtgcacgacgaactgcctggcccccttcgcgaaggtgctcatggacaacttcggcatcaagcgcggctacatgaacaccatccactcctacacgaacgaccagaagatcctcgaccttccccacaaggacctgcgtcgcgcccgcgcggccgccatgtcgatgatccccaccaccacgggcgccgcccgcgcggtgtcgctcgtgctgcccgagctcaagggcaagctcgacggcttcgccacccgcgttcccacgccggacggctcgatggtcgacctcacggttgagcttgagcgtgacgccaccgccgaggagatcaacgccgcgatgaaggccgccgccgaaggcccgctcaagggcattctggagtacaccgaggacccgatcgtctccatcgacatcgtggacaacccgcactcctccatcttcgacagcaagctcaccatggtgctgggtggcgagggcaacttcgtcaagtgcatctcctggtacgacaacgagtggggctactcgaacagggttaaagatctggtgaagattttgctctaacgagcaaaatctctgtcgacgctgcggggcgctggggcacccgatcttcgcacgatgccgcggactcgcgtacccaagtacgcatcgcccgcgccatcccgcgaatctcgggcaccgcagcgcccctcgctgtcttactacgccaacctgtgcgcctgttttcacgcttcgcgcgaattggacgcgcttcgcagaaggagggccctatggccgatatcaaaaccatcgacgagctggacgccgccgggaagcgcgcgctcgtgcgcgtcgacttcaacgtgccggtgaaggacggcgccgtcgccgacgacacgcgcatccgcgccgcgctgcccaccatcgagaagctcgtcgcgcagggcgcgcgcgtcgtgctcatgagccacctcggccgcccggcgggcgagggcttcgaggaggcgttcacgctgcgccccgccgcgcagaagctctccgagctcttgggcaagcccgtcgtgttcgcaaccgacacggtgggcgacgacgcgcgcgcgaaggccgcctcgctgcgcgacggcgacgtgctcgtgctggagaacctgcgcttcgacaagcgcgagaagaagaacgaccccgcgttctgcgaggagctggccgcgctcggcgacgtgtacgtgaacgacgcgttcggcaccgcgcatcgcgtccacgcctccacggccggcgtcgccgcgctgctgccggcgtacgcgggccacctcatgcagcgcgaggtgtccacgctctcgggcatgctcgaggcgccccgccgcccgttcgcggccatcctcggcggctcgaaggtgtccgacaagatcaaggtcatcgacgcgctcatggacacgtgcgacacgctcatcatcggcggcggcatgtgcttcacgttcctgctggcccaaggcaagcaggtgggcacgtcgctcaaggaagatgactgggtggagcgcgcggctgccatgatcgagaaggccgaggcgcgcggcgtgaagctgctgctgcccgtggacgtcgtcgtcgccgaccggttcgcggaagatgccgagacgctcacggtttcggtcgacgacatccccggtgatatgatgggcctcgatatcgggcccgagacggcgaagctctacgccgacgctgtggcagaggcccagaccgtgttctggaacggccccatgggcgtgttcgagatgcagccgttcgaggccggcacgaaggccgtggccgaggccgtggccgccaacgccgacgcggataccgtcatcggcggcggcgacagtgtggccgccgtcaacaagttcgacctggccgacaagatgacgttcatctccaccggcggcggcgcctccatggagctcgtccagggcgaggcgcttcccggcgtcgaggcgctgcggtaggacccgttccgtgcggcccctgtaacgtggacgggccgcacaacactcgaaggaaaggataccccaatggcacgcaaacccatgatggcgggcaactggaagatgaacaacacggtgggcgaggcggtggtgctcacgcaggagatctcgaaccagtacgagaaggagtggcctgagtcggtcgacatcgtcatctgcccgccctacgtggacctcaagccggccaagaccgtgctcgacttcgacaagacgaagatcgccgtgggcgcgcagaacgtgtactgggagccgaagggcgcctacaccggcgagatctcggtgcccatgatcaaggagatcggctgcgcgtgctccatcgtgggccactccgagcgccgcgagctgttcggcgagacgaacgaggacgtcaaccgcaaggtgaaggcgctcgtcgagggcggcctgtacgccatcgtgtgcgtgggcgagtcgctggccgtgcgcgacgagggcacgaccgacgagtacgtcaccgcccaggtgcgcgccgccttcgccggcgtggatgcgagcgatgcagcaggctgcgtcgtggcctacgagcccatctgggccatcggcacgggccggacggccacgcccgagcaggccgaggccgtgtgcgccgccatccgcgcgacgctcgccgagctcttcggcggcgaggcggccgaggagatgcgcgtgctgtacggcggctccatgaaccccggcaacgtggagggcctgctggcccagccgaacatcgacggcggcctcatcggcggcgccagcctcaagtgcgagtcgttcgtgcagctgatcgaggcgtgcctgtgatggagcgcgctcgtctcacgctgccggcctgcctcgtcatcatggacgggttcggcttggccgagcccggccccggcaacgccatctcgcaggcgcgcacgccgaacctcgacgcgctgttcgcagagcgtccgtggacgcgcctcgaggcctcgggcgaggccgtgggccttcccgagggacagatgggcaactcggaggtggggcatctcaacatcggcgcggggcgcgtggtgttccaggagctcacgcgcatcaaccgcgcctgcgccgacggctcgctggcggcgaaccccgtgctgaacggcgcgttcgccgcggcgcgcgagccgggcgcggcgctgcacctcatggggctcgtgtccgacggcggcgtccattcctccaacgagcatctctacgcgctcgcgcgcgccgcgaaggaggccggggtcgggcatatcgcggtgcattgcttcatggacggccgcgacgtgccgccgaagagcggtgcgggctacctggaggagctcgaggccgtgctggccgagctgaccgacgacgcgtgcgccgccgagatagccagcatctcggggcgctacttcgccatggaccgcgacaaccgctgggagcgcgtcgagcaggcgtggcgcgccatcgtggccgccgatccgtgcacggacgcagcgccggccgaggtcatggcggcctcctacgccgagggcgttaccgacgagttcgtcgtgcccacggcgctctccgggcgcggggtgcaggacggcgacgccgtcgtgttcttcaacttccggcccgaccgtgcccgcgagatcacgcgcgcgctggtggacccggcgttcgagggcttcgggcgcagccggttcccgcaggtgagcttcgtgtgcctgaccgagtacgacccggagatccccgcgccggtggcctaccccaaggagttccccggcaacgtgctggccgatgtgctggcggcggcgggcctgcgccagtaccacatcgccgagaccgagaagtacgcccacgtgacgttcttcctgaacggcggccgcgaggagccgaagacgggggaggagcgcgcgctcatccccagccccaaggtggccacctacgacctcaagcccgagatgagcgagccggacgtggccgccacgctggccgccgccatcgacgccgacgaggccgacgtctacctcgtgaacttcgcgaactgcgacatggtgggccacaccggcgtcatcccggccgcggtggccgccgtcgaggcggtggacgcgggcgtgggcgaggtgctcgccgcgctcgagcgcaagggcggcgtggcgctgatcacggccgaccacggcaacgccgacaagatgctcggcgaggacggctcgccgttcacggcgcacaccacggctcccgtgccgctcgtgctcgcggacttcgccggaaccggccgcaccctcgacggccgcgaaggtgcgctctgcgacatcgcgccgacgctgctcgagctcatgggcttgccgaagcccgccgagatgacgggcaggagcctgctcgcgtaacccggcatgatcggccgaccacgagaggcgttgcggcccgagccgcggcgcctctcttcttggtcgcgggcggccctgtgcccatcgggctgtagcgtaaaaagcccccttatgccaaaaaaggagcggtttggcaatcgtgggaagtggttcgccgcctgtctttcccaaatcgtccgtgaaaggccaggtcgcgtcttgcgacttggccggcgagggcggcctcccttgccaaaccgactcatttttggcaggggaggcccgaaatggcgacaagggggctgcacgtaacagggcttcgtcgtgcgcgacgtaactctgccaggcacgacagtactctgtcgtgcctggcagagttacgtcgcgcacgacagggttcttctgcgtacggcagggtccctccagacgcggcaggcggagccggccgtccgaaaccaaggtacggccggctccggaccaaagccgggccgtcaggccgacggcagggcggcgtcctgcatgtcatcggcgcgctgttctggacgttttgcgatacccgcgccctgtgacccatcccgcttgccagggaaggcgcttttcaggtatacttcatgacttgtgtaaacgatcgttctcaatggaaagaagagagacgccttgaacccgttccttatcatcatgctcatcctgctcgtcgtctcgggcttgggcctcatcgtgttcatcctgctgcattccggcaagggcacgggcatatccgacatgatcgccagctccgtgtactccacgcagacgggcacgagcatcgtggagaagaacctcgaccgcatcaccatcatcttcgcggtggtgttcctgctgtcgctcatcgtgctgatgatcatctacccgcagggaacgatcgcaaaatagcgaaaattcgctcttcacaagcggcgagggttcgggtagaataaccaacgttgcttgtgagcagcatatgtcggagtggtggaacggcagacacgctagcttgaggtgctagtgcccacacaacgggtgtgcgggttcaaatcccgcctccgacaccatcgaagctagaaggagagtccgagtggctctcctttttcgtattctggcccctgacgagaagatgcggaggaatcgaacatggcgaaggcgcttgctgccaaggacgcggtctccacgcgcatgcggtcgatccgccgggtgctgtggatcgtgctcgtgctgaacctggccgtggcggctgcgaagtacgtgtacggcgccgtcaccgggtcggcgtccatgcaggccgacggcatccactcggtgttcgactccgccggcaacgtggtggggctcgtgggcatcgccctggcctcgcggccggccgacgaggggcacccctacggccacgcgaagttcgagacgtacgcgagcctcgtcatcggtgtgctgctgctcctggccgccttcgaggtgggatcgagtgccgtggccaagctcgcgtcgggctcctatacggcagaggtcacgccgctgtcgttcgtggtcatggcaggcacgctggccgtgaacctgggggtcaccacctacgagcggcgctgcgccaagcgcctcaagagcgaggtgctggcggctgacgccaaccatacgctctccgacgcgctcgtgtccgtcggcgtcatcgtgggcttggcggccgtggcgctcgggttccccatggccgaccccgtcatggcgctcgtggtgacgctcgccatcctggccacggcctgggacgtgtttaagcacgcgctggccacgctctcggaccgggcgcgcattcccgaggaggacgtgcgcgcggcggccctggcggtgcccggcgtgcgcgacgcgcaccgtatccgcacgaggggcacggaaggggaggtctacgcggatctgcacgtgctcgtcgcgccggagatgacggtgaaggacgcccacggcctctcggagcgcgtggagcgcgccgtggaggagcgcttcccgaacgtggcggaggcgctcgtgcatatcgagcccgacgacgggcacgtggactaggaggggagccgcatggtggaggccgttttcttcgacgtgggatcgacgctcatccggccgtgcccgtcggttgccgagacgatggcgcgtgcagccgccgagcgcgggcacgcgctgaccgtgcgcgacttcgagctccacatgcccgccatggacgcctactacgaggcggagtacctgcgcgacggggacttctggtgctcgcacgagggctcgacggccatctggctggaccagtaccgctacgtgtgccacctggcgggcatcgggcacgacgcggaggggatggctgccgcggtgaacgaggcgtaccgccgcgcggcgagctgggaggtgtacgcggacgtcgcgggctgcctgcgcgccctcaaggagcgggggctcgccctgggcgtcgtgtcgaactgggacgccgagcttgaggacttgctccgcgacctgcggctgctgccgtacttcgacacggtggtttcgagcgccgcagtgggctaccgcaagccgaaccccgtgatcttcgacctcgcctgcgagcagctgggcgtgcggcccggcgcgtgcgcgcacgtgggcgaccgccccgacgcggacggggacggggccgcggccgccggcatccgccccgtcatcatcgaccgtcacggcgccgaacctgactgcccctacgaccgcgtggaaaccctcggagacatcccgagcttcctataaggaatcccccacaggtcgacccctctcgccccgcacgggcgcccgggcccccggttgcaaaagcacaccacggcaccgagaggccctgtaggtccgtggagcttcttccgccaccccgcgttaggcccgctcgtccagtgcccctcctcccacaggcgctgcgccacgggctcccagcggtcggctgcggcgtgcgtcttcgcgcagagcgccgccgcgtcctccggctcctccaggtcggtggagcgggcgcccgaggcctccaccatctgggccaggcggtccttgttgtccagcacggggcagggccgcaggtggttgccgttgaagggctggttgtcgtggtaggccatgcacagcggccgcttgagtgcctccagaaggggggtgtcgcggatgttcgcgtccgagtagtggatgaacgcgcagggctcaatgtcgccgttcgcgttgatgtgcaggtagcgccgcccgccggcgatgcacccctgcgtgaactcgccgtcgttccagaagtccatggtgaacaacggcttcgtctcgcgaaacgcgcgtatccggcggtacatgaacgcgcggtcctcggccgtggccaacaggtcggtcggtgcggaggcccctacgggcatgtaggtgaagaaccaggcgaacttcgccccgcgcgccacgaggtcgtcgaagaacgcctcgctgccgatggaggcggcgttcgcatgcgtgtagcagcacgacacgccgaagggcaggcgatggcgcctcagcacgtccatggcccgcacgacggcggcgtaggtgcccttgccgcggcgggcgtccgtggcctcctcgaagccctccaccgagatggcagggatgaggttcctcacccgcagcatgtcctcggccagcgcgtcgtcgatgagcgtggcgttcgtgaacgccgtgaaggcgcagtcgtcgtgcttctcgcacaggcggatgacgtcgcgcttgcgcacgagcggctcgccgcccgagaacaggtagaagaacacccccagctccttgccctgctccacgatggagtccagctcctcgaacgtgaggttgagccggtcgccgtactcggctgcccaacagccggtgcagtgcaggttgcaggcgctcgtggggtccacgagcagggcccatggcacgttgcagccgtgctcggccgccgcggcgtcctggcggcgcagcccgatgaggctcgcgttcacgaggaagttctccagcaccttctggagcacgccagggtcgatgtcgtcccacaggctcttcagcagcaccatccagttgttgtcgggatggtcgatgacctcgtggaacagggcgcgctgttccacgaggtagtccttgggaaccagcgcgtccacggctttgagcatcttgggcagctgcacgtcggggtcgcctccctgtgcgtacgccagcagcttgcgcgcgactgccgactgcgcgccctccgcgatggtcttcttcgtggatgacattggtctgctcctttccgggggatatcgcagaacatgatggcagaaggcctggaacagggggcggtttgtcatccggttggaacggggaggttgtcgagctgttggagtgcagctgcatcgaggggggggggctggccgcgggatgctgccggagggagcccgtcgccgtatgccgcaggataagaaaaaacccgccggatcgatgtccggcgggcggggtttcgtggagcggacgacggggttcgaacccgcgaccccgaccttggcaaggtcgtgctctaccagctgagccacgtccgcattgtgaagcgtgcagtgcttttggtcatccgtcctcgcaaggaggagcgaatggaggcgacgcccggattcgaaccgggggtgaaggctttgcaggcctctgccttaccacttggccacgtcgccgtgttgcggcaaaaccgtcatggaaaaggccggccaaaactttggagtatgaccggcctcgtgatgacgatggagcggacgacggggttcgaacccgcgaccccgaccttggcaaggtcgtgctctaccagctgagccacgtccgcgtcgcgaggagatataatactggaacggccactttcgcgcaagcccccatttctgattttttcacatctcgatgacaactctttccaaaggccgcgctttccgctgcgctgcgggataccgcgtccacgccaagcccgcaattcgaaacttttcgtccgaaaagtgaaaaggccctttgacacggcgccgtgttctggtaacataccaattcgtcggtacggacggcgtccgaaccgcggaatgtgcgcgattagctcagggggagagcatcaccttgacacggtgggggtcgcaagttcaaatcttgcatcgcgcaccatcgaaactcgaaaggcacccttgcgggtgcctttttcatgcagccgcccctcgcgggcgcctgtctggcgcggatctcgcgcaggccggcacccttgcgggcgctggcctgccatcgtttcggcccgcgcgcgtcagtcctcgtcctcgagcttctcgaactcgtggtggccgcagttggggcaggcgggcagcttctcggtatcgctcgtaatgcgcacgatgtagccgcagttcttgcagcggtagcgcccttcgccgggctggtctccggtatggaactccatgtcgcgctcctttcgcttgtcggggggatccttcggcaagcagcctaccacgcggccgcccctgggcggtggcggccctgcaacggcacggcgagcattcggcgacgcccctgcggcgggcaaggcgcgccgcaggctcctgcgcaggcgcgcgcgggccgaatgtcgtgcaacggcacgcgaaataggggataatggggaagagcaaggggaggccgtttcgcggagacggcggcagctgcatccgcaccgaggcgagggggagaggcatgggggcgtcgaatttctgcgaggacgtgcttgcgggcaggagcgaggtctacgcgcgtgtcgtggaggacctgaaggagcgctacgggttcgacttcgtgggcttggggttgacggcgtttttgggggcgccgctcaagtggatctacagcgcgggcgccaccgacgagcggcaccaccgcatcgtgctcgcgcccgggcacggcatcggcggcatcgtcatcaaggcgggaaagcccatgctgttcacgaacatagatgccgagatcgacccgcgcgagtactcgtcgtaccccatcgtgttcgccgaggacctgcacagcttctgcgccctgccgctcgtgaaggagggccgtgtcgtgggggccatcctgtgcgcgttccgcaccgtgagcgacgcgcaccgcacgagctacagccgcttcatagccgaccagaagggccggctcgccgacttcgacctggtatcgagcgacttcatggacttcgagcgcatcgccgaggagaagcgcgacgacgaggcggacagcccgctgctcgtccactcggaagtgtcgcgcgtcatcgccgcccaggaggccgagcgcaagcgcatctcgcgcgagcttcacgatggcatagcccaggagctcctgggcatctcgttcgtgctcaagcgccttgagccgtacctgagccgcgacgcggaggcgcgccagctcttcacggaggccaacaacgacatcgaccgcatcctggacgagcttcacaacatctcggtggagctgcgcccctcggcgctcgaccacctgggcttcatcccggccctgcgctcgcaggcggccgtgttcgagaagacctacggcgccgagatcgtgttcgaggggaacctgtcgcgcaagcgcttcgaccccgcgctcgagacgcaaacctaccgcatctgccaggaggccgtgctgaacgcctgcaagtactcgggcgccgacaaggtctacgtgacgctggaggacgccgacggctggatgcacgccaccgtcgtggaccatggctgcggcttcgacgtggagcaccccgaggtgaaggggagcggctgcgggctctccggcatgcgcgagcgcgcacgtctgatcggcgccaccctcacgatggcctccgacgggggcggcaccgtcgtgacgctcgtcgcgcccatgaagatggcggaaggcggtgcggcatgatacgcgtggtgctggccgacgaccacgaggtggtgcgcgccgggttcaagatgatcttggagcaggacgccgagatcaaggtggtggccgaggctgcggacggcacgcaggcctatacgatagtctcgcgcgagaggcccgacatcctgctcatggacatctccatgccgcccggccagagcggcctggtggcctgcgagaagatcgcgcgcgacttccccggcacgcgcatcgtcatcctcaccatgttcgccgagcccgagtacctgttctacacgctgcgcgggggagctgcgggctacgtgctgaagaactccacgtcagaggagctgctctccgccgtccacgccgtggccgggggcggcagctacatccacccgaagatggccgcgctgctcaccaagcaactcgtgggcgccggcgaggaggaggaccgctcctaccagcagctgtcgaaccgcgagctggagatactgcagcttctggcgaaggggtacacgaacaaggagatatcggagcaggtgtacctctccgtgaagaccgtggaagcccatcgctcgaagatctacaagaagctcgggttcaagacccgcgccgatttggtgtcctacgccctggagcacaagctgctggacgtgtgagcccttgtggccggccggaggggagcttgcctgttgggggaggtgctgtccggcgcatgcgatcgacctcggcgggaccgccccgcgtgctgggcggtcccgcatcgcgccggtgccttcgaccggctatgggagcgcccttacgctttcgcggggacctcgtcggcggaggcttcgggcgcctccttggcgcccttgcccaggcccagcgacagggcgcgggtggggcaggcatccacgcaggagccgcaggccatgcagtcgccggcgcgcacgtacgtctcgtctccggcgagcaccgggttcaggatggacgggtcggccaggcacgccttgcggcacgcgtcgcagtggatgcaggccgtgcggtcgtacctcgcgttcaccacgcccacgcggccgatggcctcgtagaagccgccgagcgggcagagcgcgcggcaccacacgcggtggccccagaaaagctccgccgccacgatggccccgagcgtccagagccccgccacgctgccgaagaggatgcccttgttcacggcgccgatgggcgagaacgactcgaacagcggcacgctggtggccgccgacagcacgagcacggccagcgcgaccccgatcttcgcgcggcgcggcacgggcgcctcgcttaccttgatgcccagcttgcggcgcagcgcgtccaccagctccagcagcaggttcaccgggcacacccagccgcagaacgcccgggcgcgcacgagtccgtagaacgccacgaccggcagcgcgaaccagagccactcgagctcgaatgtcttggaagcggcgacgacctgaagaaccccgaacgggtccaggagggtgacccctcctatcgatgaagaggaaaggctgccgaaaaagggaaggtcggcaggagtgggaacagggtcgtcgccgccgacggacaccccgaacaggccccagccggcaacgagcagcggcgcggcgaacagcagcagggccgctatctgcaccgcgtgccgcagccaggaccacttgagtgaatgcgaggtgttcggggtgcgcatcatctctcggctgccttctgcaccgtggggtcgtcctcgaagttggcgtacaccaggttgatgccgatgacgccctcgagggcgacgaacgtgctggcgatgtcgtgcgactcgtcgagcgtctcggcctctatggtcaccacgaccttgtagccgttcgtctcgtgcacctcgacgccctcgatgcggccgaggtcctcggccacgcgcgccgtggtttcgggcgtcgtctccacgacgaggcttgatatgaccatgctgttctccttgcattcgggtgccccgcatcggggcacgttccgtttggctgtccgcgaaagcggtcgcagggaacgctttcgcggacagccaaggtggcgaagggggttggggcggcggagggagccgccccaacggggaagggtgctttctcgacgtgctagccctgcacgtggcaggtgttgcactggtcgtgcgtgggatcgagctcgagcgtctgggacgagccgtccgcatagtggtcctcgggcatggccttggaaccgttcagcatcgggttcgagcgctcgctcgcgccgtggcagccgtagcagccggaggcgcccaaggtctcgaaccggtcctgatgggtggcgggcatgagcggcggcgcgccgaccggcacgttcgcgttcacgtcctccgcgggcgcggggcccgagcatccggccgcggccagcgtaccgaacgccatcgcaaccacgagggcgccggcaaccaaatgtttcctcatagcgatcacccctcgaccttcgtgatagagacgcaggtcttcttgtagtcgggctccttcgacagcgggcagtacgtgtcctgcaccgccaggttcaccagcgtctcctcggcgaagaaaggcgcgaacacgatgccctcctgcggttcggtgcgaccggccgtggaggccttgatgtcgaactcgccgaagcgcgatttcacgtgcacgaggtcgccgtccttcacgccgagcttcgacgcgtcgttcggatggatgttcagcagcgcctcgggcagcgcgcggtcgagctcgggcacgcggcgcgtcatggtgccggtgtgccagtgctccaggaggcgccctgtgcagaagtagaacgggtactcgtcgtcgggctcttctgccggcggctcgtaggggcggaacaccaccgagggcttcaggttggcggacttgtagaacgacaggttgttggccaggccctgcttgccgtacttcgccacgcctatctcgtcgaagccgtcggcttgcttgccgtcggcgaagcgccagtgcgtctcgagccactttccgtccacgttgcgcacgggccaggtcatgccgtggcgcgccaggtactcctcgtagggcgccagctgcttggcctccatcttcagcttcgcgttgaacttcccgtcggcgtcgtcgttgatggccttggccttctcgttcatctcggggttcgagaagatgcggtactcctcccacagcaggcggttcgtctcgcgcccgtcgttcttgaagtcgtgcgcgcccttgtcgtagatgaagccgaacaggtggtcgaaggcgtccttgccgtcgatctgctcgccgtcgagcacgcggtgcgccacctccatgaacgcccacaggtcccacttggcctcgcccggcgggttcacggccttctcgaacaccgccgtgcgccgctcggcgttgccgaactggccctctcgctccacccacagggccacgggcagcacgacgtcggcgtactgggtggacagcgtcgggtacacctcgttcaccacgatgaacgtgtcgaagatgcccttcttgtcgccctgtcccaggaagcgggtgaggttcggcatggactgcgcccagttgttgtgcgcggtccacaggaagtcgaggttgcccttcgacatctcgcggaagatcttcaccgtgtgcatgccgggcttctggatggcgtcgaggtagccctcgggcagatcccagatggcctcggtgtagcggcggtgctgggcgttggccaccaggaggtcggcgggcaggcggtgagagaacgtgcccacctcgcgggccgtgccgcaggccgtgggctggccggtgagcgagaacgggccgcagccggggcgggcgatcttgccggagagcaggtggatgttgtagaggttgtggttcatccaggtgccgcggttgtgctggttcacgcccatcgtccacagcgacatgatgttcttgtcagggtcggcgaactcgagcgcgagcgccttcaggtcctctgccggcacgccggagagctccgaggtgtactcgaaggtgtagggcgccaggcgcgcggcgtactcctcgaacgtgatggggctcacggcgtcgacggtcttgcccacgtcgctggcgtcgtagccgtcgtcggtggcattgccgatgttctcggtgccctgcttgaactgcaggtggtcgttcacgaaggcctcgtcgtacttcttgttctgcacgaggtagttcgcgatgcagttcgcgatggccaggtcggtgttcggcttgaacagcatgaccgtatcggcgctaacagacgtgcgggtgcgcagcgtgcccaggtcgtagtgcttcacgttcttgcccgagagcttgcgggccgtgaggcgcgagtacagcatggggtgcgcctcggccatgttggcgccccaggtgacgaacacgtcggcgttgtcgaggtcggcgtagcagccggccggctcgtcggtctggaacacgttcatgaagcccaccacggcgctggccatgcacaggcgcgcgttcgggtcgacgttgttggacagcaggcccgccttgatgaacttggcgcaggcgtagccctcggtgatgggctgctggccggagagccagaacgccaggcgggtcttgtcggccttccacgtttccttgagcttcgcggacacgagctccagcgcctcgtcccacgtggcctcgcgcaggccctcgtcggtgcccttcgtggccttgtcctcgcggatgagcggcttggtcagacggtcgtcaccgtagaggatcttgcccaggtagtagcccttcacgcagttgagtcccttgttggaaaggttctccgggtcgcccgtcacgctcacgagcttgccgtccttcacctcgcagatcacgccgcatccgcagccgcagaaccggcacacggccgtgtgcttctgcccctcgccgcccgacgcggcgcccgtggagcccgaaccgccgcccgcgcagccggtcatcgacgctaagctgcccgccgctgcggcgctcgccagcgcgacggccgtcgccttgacgaatgctcgtcttgagatgtccatgacacccctccttctctcccttttagctcttagcttttagctcttcgctcttctatcccaccgttcctcgaacggattggcagtgcttgggtcaggcgccggcacggggatgctcggcgtcggtcctgatgcggatggcgacgtccggctcgtccaccacgcagcgctcgacgcacaggccgcagcccacgcactgctcctcgtcgatgacgggagcgaacacggaatggatggcatcgccctcgcgcaggcggtagtcgatcgagatagcctggtcgatgagcgggcaggtgcggtagcacacctcgcagcgcatgccctggaacgcgatgcacagatcctcgtcgatcacggccgtgcccatgcgtacgtcggagcgctcctcgatgccgcgcagcgcgttcgtggggcaggcctcgacgcagggaaagtcctcgcacaggcggcaggcctgggcgcgcgcgtcgaccatgggggtcccggcggcgagtccctggttgccgggtgcagggaagagggcgacgtacgggcaggtctccatgcacttgccgcatttgatgcagcgggccgagaaatcggcctcgccctgcgccccggggggtcgcaacaggctctttgcggggccctgcacggcataggcgacgccctggaaggccacggcagcggctgacaggccggctatgacgcttgatagtctcattcgctccctctttcctcacctcgtatgatgcgccgaaggcgaggtcctgccaatcggggtagccccgaggatgcaccggggaagcccctcaagggggcaagggttttcttctattttttgcggtggataattaaagaggagacaggggagacagggggacggggataacgtcatcatttttggcaaacaaaaatgatgacgttatccccgtcctgtgtcacgctgcgtcatgtcctgtgtcatcagggaggtaccgcccttggctgcgccgcagaacgaggcatcgttcccgtccccctgtctcacctgcctcctgcggcggggcgtctaggcgtacaggcggatgcccacgtacacggcggtgtccggcagtcccttgatgtcgtagacgctcgagagcttgatggcggacacgcgccagtggtacgtggcgtcgcctgcggcgaccgtgccctcctggaacgtgttgcccgactcgtcgacggccatctcgccggccgtggccggatcgaagccctcggaggcgatggccgtctgcacggcggcctccacgctgccggacgagaagtcggcgtacttcacgcgcatgttcacggaaccgcccgcctcggacgtgaactgccatgatccgttgagcagcagggtggcgtcggccgcggacaggctggatacgttgctgtacatgagaagggcctgggcctcgctcacgtcgtcgggcagcttgatgaggtccaggttgccgctttcgtcgccggagagcgcgcccttgtcggcgatggaccagccggattccgcgaacgcggtcttgacgccctcggcatcgaggccgacgagcgaggcgaggttcggcaggctggccatggaggcggggcgtgcgaggttctgctcgaccgtcgcccgcgtgcgctcggccgagtgcgtcacgttgtcgatgacgttgaacaggaagaccccgccgatgacggctgcggccaagacgaacgcggccatggcgagcatctggggccggggcgcctccagcgggcgggtgagcgagctgccgtccaggtagcggacggggccgtcgcccgcgtcgtagccgttctttcgcgcgttgaaaaacatgagcgtactcctgaggggtttgtgtgctttgggcattatagcattgtccccacaccgctccgtgataggatacgtctcgcccgtgggggagtagttggctcgcgctctggaagcgcgagcggcacgttcaacatcatggccgaaaagcctggcgtgtcttgaataacgagactcatggcgcagcttgcatgcatgcagccgcgccatgagtcttttttgtggactctgcccgcctgcggtacggacgaggaacccgacaaaggagctagcaacccgtggatctgtcaatcttcgcatcgcccgaggcatggatcagcctggtcagcctcatcttcctggaaatcgtgctcggcgtggacaacctggtgttcatctcgatcaccacgaaccgcctgcccgaggacaagcagcacatcggccgcaagctcggcctggcgggcgcgctcgtcatgcgcatcgtcttcctgtgcttcgcgtcgttcctcgtgcatatgaccacgccgctgttcaccatcgacctcgggccctacgcgcacgggttctcggtgcgcgacctcgtgctgctcgtcggcggcgcctaccttatctacaagggcatcgccgagctgcgcgacacgctcaagctcaccgagctcaaggccgagcactgcgaggagcacaaggcgctccaccgcatcgcgctgccgcaggcggtgggcaccatcatggtcatggacctcgtgttctccatcgactcggtcatcacggccgtgggtatggccgaccacctcatcatcatgatcatcgccgtcatgctggccgtgttcctcatgatgatcttcatcgaccccatctccaacttcatcaacgggcaccccgagatgaagatgctcgcgctcacgttcatcgtggccatcggctgcctgctggtcatcgacagcgcgggcttccacaccggcatcgagctcatgcacatgccgctcgagaagctgatcgtgtacttcgccatggtgttctgcatcgtgctcgaggtcatccagatgcgctataacgcgaacgtcctcgcgtggcgcaaggagcgctggcagaacgagacggccgcgcagatcgacagcgtgcgcgccgagatgatggagcagatgaagcgcgatgccgacggcgatgccgccgcaggggcttcggccgagggcgcgaaggcggccgccgccgagcgcatccggcccgtcatcatcggcaacaacgtgtacgtgatgatgccgatggccggagaggacgccgcatcgttcaaggagctcatggcctcctcgagcaccgcgagcgccgccttcgacgccccgctggagataggcgcccaggtggaggacgtcgagccgacgtacgaggagcccgcggagaagtagg

SEQ ID NO: 77 - DNA, 1218775 bp, Gordonibacter urolithinfaciens
  source 1..1218775: mol_type = genomic DNA
gacgaccccttcgcgaacgtgggccgcaacgacccgtgcccctgcggctcgggcaagaagttcaagaagtgccacggcgcgaaccagtaggacgaacatggcagacagcgaacacgatatcgagcatatggccgcgcgcgtgaccgacgcgcacggcttcctgcacatcgacgacaagacggccgagctcgcgaagctcgacgaggagatagccgcccctgggttctgggacgatgcggcgcatgcccagggcgtctcgaagcaggcctcgaacctgcgcgagaccatccgcgagtacgacgaggctgcggcgctcttggaagacgcccgggcggcgctcgagctggcgggggaggacgaggccttcgccgcggaggccgacgacgccctggcgcgcctgtccgacctgctggacgcgctggagatcacctcgtggttctcggagcgcttcgacggcggcgacgccatcctcacggtgaaccccggctccggcggcctcgaggcccaggactggaccgacatgctctaccgcatgtacgtgcgctacgccgagaagaaggactggaaggtcacgatcctcgacgtggtgcccggcgagggcataggactcgacaaggccaccatccagatcgagggccgcaacgccttcggcatgctgaagagcgagaacggcgtgcaccgtctcgtgcgcatcagccccaccgacgacaagaagcgccgccacaccacgttcgccggcgtggaggtgctgcccgtactgcccgacgacatcgaggtggacctcaaccccgccgacgtgcgcgtggacgtgtaccgctcgagcggccccggcggccagtgcgtcaacaccaccgactccgccgtgcgcctcacgcacatccccacgaacatcgtggtgacgtgccagaacgagaagtcccagctccagaacaaggaggcggcgttccgcgtgctcaaggcgaagctctacgagcgcgaggagcagaagcgcgcgcaggagctggccgagctgcgcggcgaccgcatggacaacacgttcggcagccagatccgcaactacgtgctctacccctaccagatggtgaaggacgtgcgcagcggcgtggagaccggcaacgtggacgccgtcctcgacggcgatctggaggagttcgtgataggctaccataaatggagggtgtcccaataatggaaggaaccggtatgaccgagcttgaacggcgggcgaacgacatgcgcgccgacatcgtgcgcatgatcgcggaggcggggagcgggcaccccggcgggtcgctgtcgtgcgccgacatcctggcggcgctgtatttcggcggcgtgctggagcacgaccccgagaacccggagtgggaggggcgcgaccgcttcatcctggccaagggtcacgcggcgccggcgctctacgccgcgctcgcgcaggcgggctacatcccacgcgaggagctggccacgctgcgcaagctgggaagccggctgcagggccacccggactcgaaccaggtgcccggcgtggaggtgtccacgggctcgctcggccagggcctgtccatcgcggcgggggccgcggccggcttgaggctggacggcgccccccagacggtgttcgccctgctcggcgacggcgagtgccaggagggccaggtgtgggaggccgccatgttcgcggcgcaccgcaagctggacaacctcgtggccatcgtcgaccgcaacggcctgcagatcgacgggcgcacctgcgatgtgtgcgaccccggcgacctgggcgcgaagttcgcggcgttcggctgggacgtggacgaggtcgacggccacgacctggacgccctcgtggcggtgctcggggccgctaaggccggccgcgacggccggccgcacgcggtcatcgcccgcaccgtcaagggcaagggcgtgccgttcatggaaaacgaggcgggttggcacgggaaggccccgaacgccgagcaggccgccgaggcgctcgccgcgctcgagggcgatgcggggaaggagtcgagccgtggttaagcttgcagacggggcccaggcccagcagaagaaggccacgcgtgcggcctacggggcgacgctcgccgagctcgcgtccgagggcgtgcccgtcgtggcggtggatgccgacctcacgggctccacgaccacgaagaagctggccgacgccggcttcgccgaccgcctgttcaactgcggcatcgccgagcagaacatggtggacgtggcggcgggcctggccatcacggggcatgtggccttcaccggctcgttcgccgtgttcggcaccgggcgcgcctacgaccagatccgcaacacggtgtgctactccaacctggacgtgaagatcgcccccacgcacgccggcatctcggtgggccccgacggcggcagccaccagatgctcgaggacgtgtcgctcatgcgcggcctgccgaacatgcgcgtgctcgtgccggccgactacgccgccgcccgcgccgcgctgcgcctggccgccgccacgccgggcccggtgtacgtgcgcatgggccgcgcgagcgtgccgtgcgtgtacgccgacgacgtggagctggagctcggccgcgcctacgtgctgcgcgagggcggcgacgccaccatcgtggcatgcggcgtggaggtggagcaggcgctcaaggcggccgagctgctggctgccgagggcatcgaggccgaggtcatcgacgcgttctcggtgaagccgctcgacgaggagacgatcctcgcctccgtgggcaagacgggctgcgtggcagttgccgaggagcacagcgtgatggggggcctcggctcggccgtggccgagacgctggcgcgcacctgcccggcaccggcagagttcgtgggcatgcgcgacgccttcggcaaatcgggcgagttcgacgagctgatggcgtacttcaacctggatgcgggggcgattgtcgaagctgtgaagaaggttatggcccgaaagcaagtctgatagaatcgagccgtctcagtacatcactattcgaacggagcattctgtgacgaacgataccagccaaggggttcctgcgcgccaagcccggcgcggcggtgcccatgcggcgccggcgcccgtgcgccagacggcgtcgcagctctcggcgtcgctgcccgtcttggaggtcgacgacattccccagcagacgggcacgccggtcatcaccttcgaccacgtgacgaaagtctaccccgcgcagcccaacaagccggcgctcaacgacatatccctgcagatctacgcgggcgagttcatcttcctcgtgggccattccggctccggcaagtccacgttcatccgcatgctcatccgcgaggtgaagccgacgcagggccatatctacgtggccgacgaggacctgaccaccatgcgcaactggcgcgtgccgtatttgcgccgcaacatcgggtgcgtcttccaggacttcaagctcctgccgaacaagaccgtgttcgagaacgtggcgttcgcgctcgaggtcatcggcaagagccgccacgtcatcaagacgcaggtgcccgaggtgctgcgcctggtgggcctgcaggacaagctcaacaagcgccccgaccagctctccggcggcgagcagcagcgcgtgtccatcgcgcgcgccatcgtgaaccgcccgccgctgctcgtgtgcgacgagcccaccggcaacctcgacccgcagacgtcgcgcggcatcatggacctgctcgagcgcatcaaccgcacgggcaccacggtgctcgtggccacgcacgaccgcgagatggtggacaacatgcgccggcgcgtcatcgcgctcgaccgcgggcacctcacccgcgaccaggaccggggggtgtacggcttcgatgtctagtttcgcttacttcatacgcgagtcgctcaagggcttcacgcgcaacctctcgacgacgctcggctccatcgtcaccatcttcctgtcgcttatgatcatcggcgtgttcctcgtgggcggcctcgtcatagagaacgtggtgtcgggcgtggagaacgaggtgtccatcgcggcgtacgtcgccgacgacgcctcgcaggccgacatcgacaaggtggaggactacgtccgcggcctcgagggcgtggcgtcggtgaccttcacggacaaggagcaggcgctcgagaacttccgctcctcgaacaccaccgatatcatcgatgccctcgacggccagaacccgctgcccgcgtccattgacgtggagctgtccgacccccagctggtcgagcaggtggccggcgcgatctgggacaattccacgtaccagcagatccgggacggcgagacgaaatccgagtcgctcaagtacggccagcagacggtggagaagctgtttacgctcaccaactacgtgcgctacatcggcatcgcgctcatcgcgctgctcatcttcatcgccatggtgttcatcaacaacaccatccgcctggccatcctcgcgcgccgcaaggagatcgccatcatgcgcctcgtgggcgcgtcgaacggcttcatccgcgggcccttcctcatggaaggcgcgttgcatgcgctcatcggctcgcttctggcggtgggcgtgctggaactgctgcgcaacacggcgctgccgaagctgcagggcgcgctgccgttcctgtcgttcgacgtgagccttaacatgttcctgctcatctatgccgcgctcgtcgtcgcgggcctgctcatcggcctgctgggctcggctctggccatgcgccgctacctgaaggtgtagcgggcgctcggggcggcccctcatggccaagcatggcgacaacaagcaggttgcggcgtcggcgcgcaaggcgcggctccgcaacctgcgccttatgcgggcgttcgcgttcgtcgtgatactctgcacggccttcgtggccggcttcgccgtgcgcagcaacgacgcgctgctcgagtcgctcggcttcgcggcgctgctcgagagcggcgactccacggccggcacggcggcctcgaaggacaagaacacctacaacgcgctgtcggcgcgcgtcgccgaggtggaggacgcgctcgccaacgactcgctggactcctacgacctggacgcggccaccatgagcgtgctcgacgcgttcgccgacacgaccgaggacgcctacctgcgctactacgatccggcgcgctactcctcgctcatgcacgacagctcgggcagctacgcgggcgtgggcgtgctgttctcggagtacaacgggctggcgtacgtcgtggacgtgttcgacggctccgtggcccaggcggcgggcgtgcgccagggcgacttcgtggtggccatcgacggtgaccgcggccaggagtggtcgatgaacgaggtcacggcctcgctcgaccgtgccgagggcgacaccgtcgtggtcacgtggcggcgcccggccacgctcgaggccgagggcggggaggagttcaccactacgctggcctgctcgaagtacgacgtgaagaacgtcacgacgagcctcgagggcaccgtgggctacgtgaaggtgcggcagctgacgcagacgtcggccgacctcgtgaagcaggcgctcgctgacctgggctcccaaggagcgctctcgttcgtgctcgacatccgcgacaacccgggcggctacctcacgcaggccgtggatatggccagcctgttcgtgaagagcggctccatcgtgcagatcgagacgaaggacggcaagagcgtgaagtccgccacaggcaacgtggccacggacaagccgctcgtggtgctggtgaacgagaacacggccgccgcggccgaggtgctggcggcggcgctgcaggagaaccagcgcgccacgctcgtgggcgcctccacgctcggcaagggctccgtgcaggtggtgcgcgacctgagcttcggcggcgcgctgcgctacacggcggcctactacctaaccccccaggggcggaccatcaacgacgtgggcgtgacgcccgacgtgtcggtgggcctgggcggcgaggccggcagcgacaaccagagaagcctggccctggaaaccgcccagtcgctcgcgcgggagtagcgccatggcgcgcaaacggtcgcatacgcgacgcagcccccgcagcaacccgcgcggcgtgctgaccgtccatggcggcggcttcggcttcgtgcagacggccgagggcgcctacttcgttcccgcatcgaagatggccggtgccttcgacggcgatctggtggaggtggcgcccttgccgcccacgggcggcaagggcggcgcacgccagccgcaccagggcgctgcgcgccccggcgaccagccggccgcgcgggtgctgcgcgttgtcgaccgcgcgcacgacacgctcgtgggccgctacgaggtggccgagcccttcggcgtggtggtgcccgaggatgcgcgcataccctacgacatcttcaccatgcgctccgaccatccggacgtgccggacggctcgctcgtgcgcgttcgcatcaccgcgttccccacgcgccacaccgcggccaccggcgtggtggaggaggtcatcgggcaggcgggcgacgagggggtgggcgtggacctcatcgtggcgcgtcgcaagctggagacggcgttctcggacggtgcgctcgccgaggcgcgcgccgccgtgctggacgaggcgggcgcgctcgcggagggctaccgcgacctgcgggagcgcttcacgctcaccatcgaccccgccgacgcccgcgacttcgacgacgctctgtcgttggagcccgtcgttctggagagcggcaagatgccccgcagcgtgcggttcgtggacgagcgcgggccgggggccgtgcgctggcggctgggggtgcatatcgcggacgtgtcgcattacgtgccctggaactcgtcgatcgacctggatgcgcggcggcgggcgacgagcgtgtacctggccgaccgcgtgatacccatgctgcccgaggagctgtcgggtgacctgtgctcgctcaagcccggcgaggtgcgccgcacgatgacggccgacctgtacctggacgacggtgcgcgcctcgtgggctacgagctgtacccggcgctcatccgctcggatgcgcggctgacctacgacgaggcgcaggcccttctggaaagggcggcgggccgtgccgacggcactgcggaggacgacgcgctcgcgcgccggctcgcggggctctcgtgcctggcgaggaagcgcgcggcggcgcgcgaggcggccggcgggttggacttcgccacggtggaggcgaaggtgcgcctggatgcggaggggcaccccgtgggcatcgacctgcgccgcaagacggacgcgacgtcgctcgtggaggaggccatgatcctggcgaacgagacggtggcgcgccacctgcgcgatgcccggttccccggcatcttccgcgtgcacgacaagccctctcccgacagcctggccgcgctcgtgccggtgttccaggagttcgcgtggttcggcggcatcgaccagaaccggctcgtggccggcgacccgcacgtgctcggccaggtgctcgaggcgagcgcggggcgccccgagggcgagctcgtgtccacgctcgtgctgcgctccatgaagcgcgccgtgtaccgccccgcctgcgagccgcactacgggctggcgagcgcggcgtacacgcatttcacgagccctatcaggcgctaccctgacctcgtggtgcaccgcatgctcaaggcgcagctgacgcgccgccccgagcgcttcgatcaggaagtggcggcgctgccgtggatagccgagcattcctcgaacatggagcgcgtggccgagaaggcggcgcgcgagtcgcaggagctcaagatcgtggagtatatggaacgttcggtgggccaggcgttcccggccgtcgtgtcgggcgtgacgaactacggcgtgtacgtgcggctcgagaacacggcggagggccttgtgcccttgaagtgcctgggccgcgagtacttcgcgttcgacccggtgctgcaccgcctgacgggggaggacacgggcacggtctaccggctggggcagcgcctgcccgtcgtcttggcagcggccgacccgcgttccggccggctcgacttccgcccggcgcgcgacggcgggcgctgagcgcggcgccaggaggcgaaggaggggaagatggggcgggtacgcgagaaggcgcaggccatgggacgcgtcatgcgccgcagcaagaaggcgctcgcgctcttcgtcgtgctgcgcctcatcgtgctggcctgcgcggtgggcgcgctcgtgttcggcaactacgaggcgttcttcctgtgcctgctcacgctcgtgctgttcctggtgcccccgttcatcgaggcgagcttcagcatcaccatccccgagacgctcgaggtggtcatcgcgctgttcatcttcgcggccgagatactgggcgagctgttccacttctacaccctcatccctttttgggacacgctgctgcacacgttcaacggatttctggcggcggccatcggcttggcgctcgtgtccatcttgaaccgctccgaccgcatcgcgttctcgctgtcgccgttcttctgcgccgtggtggcgttctgcttctccatgaccatcggcgtgctgtgggagttcttcgagttcggcatggactgggtgttcgggctggacatgcagaaggacaccgtgctgggagggatcgcgagcgtgcttctggaccccgaggggctgcagcggccgtttcgcatcgacggtatccagaccgtggtggtgtacggacaggacctgggtttgggcgggtacctggacatagggctcgtcgacgcgatggaggacctgctggtgaacttcatcggcgcgctggccttctccgccatcggctaccgctacctgaagagcaagggcgccggcacgttcgcgcgccgcttcgtgccggtgctggccgcgccgggggagggcggccgggctggcgatgccggcggttcgggcggcgcggcaggatgcggggaggctgccgcgggcgacggggagggcggcgcgggcgctgcttgaggcaggcgcgcgggcggcgaggcctggggcgccccggttcccggtggctggcgcaaatgctttgatcatctaactaattgcggtatgatgcaggggatgagaacgaaggatgagaaggagggagggctgatggacggttccgccagggatgccgatgccgtgtccaagcggcgcgaggagatcgacgatctgctgtccggcacgttcaactccatcctgcgcatcgaggagcagtcgctcgacaaccgcctgacgcacgggctcaccatcaccgaggtgcacaccatcgtggccatcggcctgcacgagcgcaacccgatgaacgtggtcgcggcacgcctgggcgtgacgctggccaccctgaccacggccgtgagcaagctggcgggcaagggcttcgttgagcgctcgcgcgccgaggacgaccggcgcaaggtgctcgtgtcgctcaccaagaagggccggcaggtgctgcgcgcccacaacctgttccaccaccagatgatcgacgaggcgctcgccggcctcaccgaggaggaggagcgcgtgttcgccgaggcgctttccaaggtgaaggcgttcttcgacgcgcaggcgtaggcgcccgcgcggcacgcggcctgctgcacgggacatgccgtgtgggacatgccgcgcgctgcacatccacgaatgtttcacgtgaaacattcgttcgcgcgtacaagtgtttcacgtgaaacatcgtgacggatgccgtgtgaaaagcgaggggcatcaagaccggccaacctctgcggggcggggagggcgatggtgccggcatgccgggcgccctggtcgccgttcgccatcccggtgcctcgcgacgtgcgggcgcgcagaaatcgtggagcgggcgccgcagcgcttgcattcgaaggctcctcaccataccattactcccgtagaaatactttgattatcaaactaaatggcatgacgcgaaaggaagacccatggctaccatcgacaccgtcaaggaagtgctcgtcgagaacctcgacctcgaggccgacaagatcaccgaggaggcgacgctcgagtcgctcggcatcgactcgctcgacatggtcgagctcatctgcgacctcgaggagaagtgcgacgtcgagttcggcgagcccgagggcatcgagacggtgggccagctggtcgcgcacatcgactcgctgtaacacgcgttggccgggccccgtacggggcccgttttgccgcagcccgcacggcgggcgctgggaagacgagcgtccccgcggggacgggacatgaagacgaagggaaccgcgaccgtgaaaacgaggattacggaactgctgggcatcgaggcgcccgtcgtgcagggcgcgatggcgcgcatcgccgacgcgagcctcgcaggcgcggtgagcgaggccggcggcctcggcatcatcgcgtgcggcggcgcgccgcttgcgtgggtggaggaacaggtgcgcatcgcccgctcgatgaccgacaagcccatcggcgcgaacgtcatgctcatggatccgaacgcgggcgagacggccgagcttctggcgaagctgcgcgtcgacgtcatcacgacgggcgcgggcagcccggcgaactacctgcagatgtggaaggacgccggcatcaaggtggtgcccgtggtggcctcgagcgcgctcgcggcgcgcatggaacgcctcggcgccgacgccgtggttgccgaaggcaccgaggccggcggccacatcggcgagctgaccacgatggcgctcatccctgcggtgtgcgacgccgtgtccatccccgtgatcgccgccggcggcatcgccgacgggcgcggcatggccgccgccttcgcgctgggcgccgaaggcgtgcaggtaggcacccgcttcctcacggtggaggagtgcaccatcgccgacgcgtacaaggagcgcgtgatcgccgccaaggacgccgacaccatcgtcacgggccgcggcagcgggcatcccgtgcgctgcctcaagaacaagttcgcccgcacggtgcgcaagctcgagggcgacgtggcggccaacggcgacgagctggaggccatgtacgtcggctcgctcaagcgcgccgtcgagggcgacgtggacaacggcaccatgatggcgggccagtcggcggcgctcgtgcgcgagcgcgcgacggcggccgaggcgatcgcctccctagtggccgaagccgaggagctggggggactggggctcgaggccctggctgcgcgcaacgcggcgcgcggggaagcgcgatgatcgggccggtgcccgcgggcgcgcccgtgctcatgctctcgggccagggctcgcagaagcccggcatgggcgccgacctcatggatctgcccgaggtgcgggagaccttcgcatgcgcgtccgacgtgtttggcttcgacgtggccgaccttgcgttgaacgccgagcccgagaagctgaacgacacgcgcaacgcccagcccgcgctcgccgcgctgtcggtggccgtcgcccgcgcgctcatggcgcgcggcgtggagccggcggcggtgctgggcttctcgctcggccagataagcgcgctcgccgtgtcggggatgctcgccgacgaggaggcgttcgcgctcgtgaaggtgcgctcggagctcatggccgaggccgccgccgcgcatcccggcgcgatgagcgcgctgctgaaggccgacgaggagaacgtgcgcgcgctctgcgaagagtgcgccgagggcgacgtgctcgtgcccgcgaacttcaactgcccggggcagatcgtcgtcgccggcacgccggcggccgtcgagcgcgccgaggcggcgtgggccgaggcggggaagcgctcgtcgcgcttggccacgtcgggcgcgttccacagcccgctcatggccgacgcggccgcagggctcgacgcgtacctcgaggacgtcgcgttctccgaggcgcgcatcccgctcgtctgcaacgtcgacgccgcgccgcttgccgccgccgacgcgcgcgagcacctggttcgccacctcacgagccccgtgcgcttccagcagagcgtcgaggcgctcgccgcgtccggggccgacacgttcgtcgaggcgggcttcggcggcgtgctcgcgaacctcgtgaagcgcatcgacaaagccgcgacgcgcgcctgcgtgcaggatcgcgcgagcttcgacgatttcctggccgcccaggccgcaaccgataccgaataggagcgacgggacccctatgaccaacgttaccgaaaccccgcgccgaagcgcggtcgtcaccggctcgagccgcggcatcggccgcgccgtggccgaggagctcgcgcgcgcgggcttcgacgtgtgcgttaactgctcgagcgagcgcggcctgtccggcgtgcaacagctggccgaccagctggccgccgagcacggcgtgcgcgccatcgccgtggccgccaacgtggccgacgccgccgaggccgaggcgctcgtcgcggcggcccatgaggcgttcggccgcgtggacgtgctcgtgaacaacgcgggcatcacgcgcgacgggctcatcgcccgcatgaaggaggaggacttcgacgcggtcatcgacgtcaacctcaagggcacgttcaactgctgcaaggcggcggcgcagcgcatgatgaagcagcgctacgggcgcatcgtgaacctgtcgagcgtcgtgggcgtggcgggcaacgcggggcaggcgaactacgccgcgtcgaaggccggcgtcatcggcctcacgaagtcgctcgcccgcgagctggccgcgcgcaacgtcacggcgaacgcggtggcgccgggcttcatcgccaccgacatgaccgacgcgctgtcggagaagcagcgcgaggctattctgggccgcatcgccgccaagcgcctcggcgcgcccgaggacgtggccgcgctcgtccgcttcctggcgagcgaggaggcgggctacatcaccggacaggttgtctgcatcgacggaggtatgtcgctatgagcgagaacagcacgaacgcgggcgccacgcgccgccccgacggcacgcatcgcgtggtcatcaccggcatgggcgccgtgtcgcccgcaggcgtgggcgtggaggcgctgtgggacgcggtcatgggccgcgcctgctgcatcggcccggtgacgcgcttcgacacggccgactacgacgtgcacctcgccgccgaggtgcacgacttcgacccggtcgagcacggcatcacgaagaaggaggcgcgccggttcgagcgcttcgtgcagtacgccatcgtcgcgtccgacgaggcgatcgcccagtccgggctcgacctcgaggccgaggacacgacgcgcatcgcatgcgtgttcggcacgggcatcggcggcatcgacgagctgcagagcggcttcttcacgctggccgagaaggggccgaagcgggtgagcccgctgttcatccccacgatgatcggcaacatcgcggccggcaacctctccatccgctacggcttgcgcggcgagtgcctgaacgtggtcaccgcctgcgccaccggcgcgcactccatcggggcggccgtgcgcgacatccgccacggctacatcgacgcggccttggccggcggctcggaggagagcgtatcgcccatctgcctggccgggttcgcgaacctgggcgcgctgtcgaaggccgacgacccctcccaggcctcgctgccgttcgacgcgcgccgtgccggcttcgtggcgggcgagggcgcgggcgcggtggtgctcgagtcgctcgagcacgcgctcggccgcggtgcgacggtgctcgccgagatcacgggcttcggctccaccggcgacgcctaccacatgacggcccccgagccctcgggcgagggcgtcgcgcgcgccatgcgccaggcgcttgcggagggcggcttcgcgccggaggacctcgggcatctgaacgcgcacggcaccggcacgcccgccaacgacgccaccgagtccaaggcgctcttggcgctttgcggcgaggaggcggggcgcgccgttccggtgacgtcggtgaagggcacgacgggccatacgctcggcgccgccggcgcgatcgaggccatcgtctgcgcgctatcggtcatgaacgactgcgtgccgcccacggccggcttcgccgaggccgacccggagtgcccggtcagcgtcgtgacggaagccaagacgggctacccgcagaaggtggccctgtcgaacagcctcggcttcggcggccacaacgcttctctggcgctatcgccgttctgcgagcggcgatagctgccgacgctgcggccgtctgcggcacccgatctcgcggcgaggccgagggctcgcgtacccaagtacgccacgccctcgccctccccgcgatctcgggcaccgcaggcgccctcgctgaccgactagcgccaacctgtgagttcgttatgcgcctttcaggcgcatggcgcgcaaagcgcgcaccgttgaaaggagccatcatggacatcgagtatccctgcggcaaggacgtcgtcgaggcggtgctgccgcatcgcgacccgttttgctgggtgagccgggtagtcgcgtgcgagccgggcgtcgaggtgacggccgagctcgacgtggaccctgcgctgccgctgttcaagggacacttcccgggtcatccggtgctgccgggcgtcgtcatcatggaggcgctcgcgcaggcggcctcgttctgcatcctcgtggagcgcggcgccgagggttccatcgggttcctcaccggcatcgacggcgcgaagttccgccgccaggtggagccgggcgagacgcttaccctgaaggggcgcatcgtgaagtcctcgtcgcgcctgtgcgtggccgaggtggaggcgagcgtcgacggtgcggtgtgcgcgacagccacccagaagtacgtgctggcgaaggcggaagcgcaggcatgaggcgcaggcgtcccgaggcaagaggcaaggagcatccgatgaggcaacgcaagcagaactacatcacgctctcctgcgacggcgaggtcgtcccgcagcgcggtgcggcagcccccgcgccggagtcggccgacgtcgcctaccgcctgtcgcgcatggtggaggaggctgcggctgcgctgccgctcgccccgaatgcgctcgaggcggccgacgcgcccgagtacacggcggtcgccccgggcgaggcccaggccagctcgcgggcgcgcgtcgcggccgatgcgcaggccggcgcccccgcgacggccgcccagcccgtggcgctcgtgatggcccgctccaaagcggccaagcgcctgctgcaggccgtggccgatgcgggcttctgtgcctgcgccgtgtacacgcaggaccgtcgcggggaagggtacctcaaggcggctcagcgcacggtgtgcttgggcgagcgctactccgacgcgctcttcggcaacggccatgccgtgctgcaggcggcggacgaatgcggcgccgcagtggtgcttctctccgacgaggcgcttcccctggccgaggtggacagcttcctcgcccgcgccgccgcgcggggcgtgcgcgtgttccgcgcgatgagcccggacgcgccggccctcggctggatactctgctccaccgacaagccgccgctcgacgacggcacgtggcgcacctgccagcgctgcgggctctcgttcgacgaggcgagcctcgcatcggggcactccacgtgcccgtcgtgcggcggctacttccgcatgtcgtcggccgagcgcattgacgacacgctcgacgcgggcagcttcgaggaatggaaccgctccgtgcccgagaccgatccgctgggcttcccgggctacggcggcaagctggcggcgcagcgcgccaagacggggctcgaggaggccgtgcgcacgggcgagggccgcatcgcgggtctgcgcgtggccgtgggcatcatggagtcgcagttcttcatgggctccatgggctcggtggtgggcgagaagctgtgccggctggtggagcgcgccaccgacgagcgcctgcccgtcgtgatcttcacggcctcgggcggcgcgcgcatgcaggagggcctcgtgtcgctcatgcagatggcgaaggtgtcgtgcgcgctggcacgccacggcgaggcggggctgccgtacctctcggtgctcaccgaccccaccacgggcggcgtgaccgcgtcgttcgccatgcagggcgacgtggtcctggccgagccgggcgccctcatcggcttcgcgggccagcgcgtcatcagggacaccatcaagcaggagctgcccgagggcttccagacggccgagttcgcgctcgagcacggcctgatcgacgccatcgtggagcgctcggagatgcgctcgatgctcgctcacctgctggccatccacctggccaccgcgaggtcgaaccgcggcgcgcacgagccgggcgactgcgccatcctcgtggacttccagacggtgcgcgacaacctggagcatggcaccgacacgtacaacacggtgacgtacggcctgctggagcccgagggcggcctgccgttcggcgagtcgtccccctggcgtccgcgccgcgcccagcagctgctgggcggcctggcggggcgcctggagcggaaggcctccggcgccgtgtcgccaaagcgcctggggaaggttctcgcccgcggcggcttcgacgccgagggtggcgcttcgctcgaggtgaacggggcgcccgctgacatctccgccgccgcggccgtcgatcccggcaaccgcgcctggcagagcgtgcagctggcgcgcaacgtgcaccggcccacggcgcgcgcctacatcgacgcgttcgttgacggcttcatcgagctgcacggcgaccgctccttcggcgacgacgcggccgtggtggcgggtgtcggctggatcggcgggcgggccgtgacggtgatcgcgcaggagaagggggccgacctgaaggagcgcatccgccgcaacttcggctgcccgcagccggaggggtaccgcaagtccctgcgcctcatgcgccaggccgagaagttcggccgtcccgtcgtgtgcctcgttgacacgcagggcgcgttctgcggcatggaggccgaggagcgcgggcagggcaacgccatcgccgacaacctgctggccctggccggcttgcgcgtgcccgtggtgagcgtgctggtgggcgagggcggaagcggcggggcgctcgcgctcgcgctggccgaccgcgtggccatgcaggagcacgcggtgtactcggtgctctcgccggagggcttcgcgtccatcctctggaaggatcgcacccgcgcccccgaggcggccgccgtcatgaagatgagcgccgcggaggcgtgccagatgggcatcgtggacgccgtgctctccgagggtcccgcccccgcccacgagaacccggaggccgccgccgagcaggtgcgcgcctacgtgagcgccgccctggccgagctcgccgagcagccgacggaggctctgctgcaagcccgctacgagcgcttcgcgaaattctaacggccgcccggccggggggcgtgacagggggacggggataatgtcacgctcccgaacgtcttgcgcagccctgtcgcacaggggagcgtgacattatccccgtccccctgtcacctgctgccatgcccggatcctcgctacccctgcaaaaggtcgatcaggtcctcgcgggtgaggctggccagcgagacgccgcctgcgccgactatctgctcggccagatcgcttttcgcctcctggaggcgcatgatgcgctcctcgatggtgcccttcgcgatgaccttctgcacgctcaccaccttatcctggccgatgcggtgcgcgcggtcggtggcctggttctgcgcggcggcgttccaccaggggtcggcatgcacgaccacggaggcgcccgtgaggttgaggccggtgccgcccgccttgagggatacgaggaacacgggcgtgtcgtcggcgttgaaggcgttcaccagcgccaggcggcgcttcttcggcgtggctcccgtgatggtgaagtagcccactcctgcggcgtcgagccgttccgcaatgcggtcgaggaagctggtgaactgggagaacacgagcgttttctcgccggcgtcccgtgcggaggacacgagctccatgatggcgtcgagcttggccgcgcccttctcgtagttctcgtagagcaggcgcgggtcgcagcacagctgccgcagcttagtgagctcggcgagcacctccaccttgtgctggtcgaagctgcggtcgttcttgttcttgcgctgcgcggtcagctcctcgcgtagccgctgctcgtgcgcggcgtacaggcgctgctgctcgccttcgagcggagcgtacacgatggattccagcttgtcgggcagctcgcgcagcacgtcggtcttcaggcggcgcagcatgaacggccctgcgatggcctgcaggcgccgtgccgcctcctcgtcgccgcctacgatgggcagctcgaagcgctcgcggaagcggttgtacggtcccagaaggcccggcatgaggaagtcgaagatgctccagagctcgcttaggcggttctccatgggcgtgccggtgagcgcgaagcggtggcgcgcccgcactcgcttgacggcgcgcgtggtgagggtcgccgggttcttgatgtactgcgcctcgtccagcacgcagcagaacagttcgtgctccgcccaggcggctgcatcgatgcgcaggaggtcgtacgaggttacgagcacgtcgcacccgccgccttcgaaggcctcgcgccgcgactgcacgcgctcgcgtttcgtgcccgccacggcacgcacgtcgagctcgggcgcgaaccgctcgaactccgcgagccagttgtacacgagcgacgcggggcacacgataagggaggggccgaccgtgcgcgcctcctctcgccgggcgagcagcagggttatgatctgcaccgatttgccgaggcccatctcgtcggccagcacgccgccgaagcccgcgtcgcagcgcgccgagagccagcggaaaccctcggcctggtagggccgcaggacgcctgcgagcgccggcggcacgtcgtaggcgcgctcgtcggcggcgcggaagccctccacgtagcgcgtgaacgagcggtcgcgcgcaaggtcggcctcctcgtcgaggtagaacgcgcggtaggcgggcagctccaccgagcctgcggccaactccttggccgtgaggcccaagtcggctgcgaggcggtcgagctgcgagaggtcgaaatcctgcaaatcgaggaacatcccgtcgcgcagccggtggtaccgcttgcgcttgcggtagctcgccagaagcgacgcgagctcgcgggcgggcaggtcgcccgaatccaccgtgaggttgacgaggttgcccgcgagcgacacgccgagcgttacgcgcggcttcttgtcgcggatgaggcggtcgaacgcgggcgtggtgaacaccgtgcccagcgcgcggaactccgccaggccgccgaacaaaagcgcgcccacggcctcgtcgtcggcgaggggaagggtggcgtccaccgcatcgaggtacctcgccgccagctcgcccgcacgcgcctccaggcgctcgtcgcgcagcgggccggagggcttcggcggggtttccgtcttcctcgccgccgcttccgttcccgtgcctgctttcggcgcgcccgccccttccccctgcgtctcgaaaccgaacagcagatggcgcacctcgccataggctgcccaggcgtcgcaggtcacgcgcgtgtcgtcgcggtcgaagaagaactcaagctggcagggcacgggcttgtacgcctcgatctgggcgggcaggtccacgtgcaggtgccgctcgatggccggcagcgccgccgcgcagaacagaggcatgtcggcctcggccacgtagaggtcgctctcgctgctgtcgtagacgttgcgcaggaagtcggcgcattgggcgaactcgggcgagcagttgtggaagaggccgtccttccacacgtagaggcgctcaccctgcgcggccagcgccagaaaatcagtgcgctcgacgaagtagccgccccgatcggcgggcctcagggcgacggtgatgcgcgggtcctcatcgacgatgcgggtgcgcacggctcgtcgcgcgccgatctcgtcctcgtccatggcgaaatcccgaccggccaggagatcgagcagctcgacggcctcggcatccgtgagctccaagtcgcgcccaaccacgttcgaggagcggtagcgccagtacgccgccgcgctcgtctgctcgcgcagggccacggcgcggtcgaggaagcgcgcaatgtgacgggcgtgctcggtgagctgggccggcacatggtggaacgcgagcttcttgccgtaggagaagaactcgcccgtgcgcatgcgctcgacgaagtcggagatgcccttcatcacataggagccctgcggccccgaaaggcggaagcgcgccgaccacgagcggtagccgcaagcgagcgtcgtctcgatgtcgacgtttccgattgcctcctgcgcgccggccagccgctccgcgcgcttcatgaagtcctcgatgcaagccgaggtcgtgcgcgtgcgctgcgcctggtagccgaggaaccgctgaggtgcgcggctgtaggagagcatcagcgccgcgcagtgcttgcacatgccgtcgtgctcgcggtcggcggggcaggtgcaggaatagtccagcacgatgccgctgtcatcctcgaagcacaccgatgtgcggtagcggtcgtcccagccgctgctcgaggccacgaacgcggaaagcgtgatctcgtcgccatcgtagcgcacctgcttcgtgaggatgttgcggtcggaggcggctatctgctccgcacgtgcaagggtgcgcgcggagcagatagccgcaagggcgttctccgggatcatcggtgctttccccaccttcctctccgaacgggtgtactagttcatcatactacagcaccgtccgcgcgggggcggcggccggggcccgacgcgaaaacggcatcgggctcgcagtggccgggttggatcgcgcagctgcgcctccatggccgcgctatgcgcgttcgccgggggagagcgccgccatggccaccacggcgccgctgaacccgagcgcgctgaccggtacgggcgccgcgatcatcggttcgctggcggggggggggctgtacgcgccggcgatcatgcctctttccgttcgtccgggaggatcccgccctgtcagagcgcgacgcctgccagcttcccgataagcttgcggtagatgcggtccacgatccacggctcggtggacacggtgcagacgtcgtccagatcgacccaccgcacgccgctgttctcgtcgggcttgacgcgcagcggctcctccggcgaggccaccgccaggtacgtgacgttcaaatggaggtgcgagcccacgtagcgcccgcgcttctcgtggccgtccacggtgagcacctcgagcgagaagatgccgcccggcccgctcggcacgagccgggcgccggccacgcccgtctcctcctcgagctcgcgcagcgccacgcgcgccaggtcgcgctcgccgtccgcatgcccgccgatccagctccacgagtcgtagaggttgtggtacaccatgagcgtgcgctgcttggcagggtcgaccgtccagatcgagcatgccatatgcgccggtgccgagcggtcgaacacgtgcgggtcgttcgcgagcgcgcgcaggatggccagccggtcgacggcctcctgctcgttgaagggctcgtaggcgcgtatgtcgtcgatgagggccataggggcattgtacgcgcccagcgttggtggtgcaacggagctgggcatacatagttcccatcgtgatcaacccggtttctcgtcgggaaagtatcccaagatgtcccctggctcgcattcgagttctcggcagagtgcgttcagtgtcgagaaccgaatcgacctcaccctgcccgtcttgatgcgggagaggttgaccggggtgatcccgaccctcgccgcgagctcgacggtgcctgcgccgcgcttttccatcatgcggccgagcttggagacgacggccatgagcccctcctttccgatccgggacaacgggtgttcgacgataccgctccgggtgtcaaatagacccccaaagtggactattagagcagcagcgatgcgcaaacatgggcgaatgcgcacatcgtccgaaacgcagaggaggctcggccttaggatcaaggacctacgcgaggagcggggcctgtcgcagtacgcctgcgcccccttgctcggggtgtcgcggacctatctggccgacgtcgaatgcggcaggcgcaacgtgagcctggccacgctcgattcgatcgcccgcgggttgggcatctccctggaggagcttctcaaaggcgtctagcgagcaggtccgccgcctccccgaggcgcgaggcgcccgagcccagaacctcccttcatcatcgcgttgacgcggagggcaccgaacgtgtcgagtccctcgttttccagtcgcccgccgtacagctccaagcacacgacgagtcgctccagtacggccttcgccttgtcggcggctctctcggcatccgccgccccctccagctcgaccatgctgctcccctccgccggacagggcggaaacgattttgtcaaggtcactcacatgtgactatgacgaatagtctagcgcatagccttggcacatgggagtgacacaggacaacaaatacgagcggctcggaaagtcgatccgcgaggagcgcttggcgcagggcctctcgcagcgcacgctcgcgggcatgatcggccagcccaactcccacacctacatcacccgcgtcgagcaggggaagatcaagatcgggctcgagcagctgggaaggatcgcggacgcgctcggcgtggaggtgcgcgacctgatcgatttctgactgcgtctcggctcggtgccagaaactgcgcagaagcgttgagatggtgggcatctcgcctgcctccggcgcttcgggcatgcacggggctatcctcggcgcctcgtaggcgggctcatgggttcggttgccgcgcttggttttccgggagtccacgtcgattcggctcgattcctcctccatctcgcgtgcgtaccggccgatctccggtttgagcgattcggatgccgccgggctcgccttcgcgctggcaaagtcgtgcctgaccgtcaggttcggatacccgccatgcgagccttcttcacggccgtcatcgccgccgcgacctcgccggcagggggtgcttttcggcatcaaatgctctcttcgtcgggctccggcctgagaccatgcagcccgccgtgtgcatccggcgggcagtcgtcgtagcgaggcgttcgcccgcatcgtctccggccttatgttcgccgcgctgctccgtgctagaatgacgttcgcagctgtattccgccgacgaaaggcgcagacgttgaagatagccatcagttcctgcttgctgggagagccttgccgctacgacgggaggtcgtgcccgtccgaggccgcccggctcctgcagggcttggacggcgtcgagctcgtgcccgtgtgcccggaggtcttgggcggcctgccggtgcctcggccgccgagcgaggtcgatgccgccgagcgcgtcctgcgcgtgacgagcgcggagggcacggacgtcacggccgccttcatggtcggagcgcaggcggcgctcaaggccgtgggggagggcggctgcaagctggccgtgctgaaggcgaagagcccgtcgtgcggatgcggcctggtgtacgacggcacgttctccggcgtgctcgttcccggctacggcgccacggcgcgcctgctgcggacggagggcgtgcgcgtgatcgacgaggagcagctggcggccgttctcgccgcctctgccgtgcggcgccccggtgcccttccggccctgttcgccgagacgtccgccgcctgccccgtgctccagaccgagcggctcgtgctgcgtgccatcgagccggaggatgccgaggacgtgttcgcctactgctccgatcccgacgtgggcgccgacgccggctggcccgtgcatcgcacgctcgatgactcgcgcgcgttcatcgaggccgtggcctgcgagccgcacgtgttcggcgtgttcgagaagctttccgccaccgggactgacgggactgccggttcagacggcgccgcgtcggagctgcgcacgggcccctgcatcggctcggtcgggctcatccccgacccgcagcggcgcaacgtcgatgccctcatgctggggtactccctggcgaagcccgcctggggccggggctacatgacggaggcgtcgcgtgaggttatccgctacggtttcgaggagctggccctcggcctgatctcctgcacgcattacctgttcaacgaccgctcccgacgcgtcatcgagaagtgcggcttcgaacgcgagggcgtcatccacgccgccgagcccgcccccgacggcaccatgcaggacctggcgacgtactatctgacgcgcgcgtcatgggaggctgcctcgcacgagagcgcgcgaaacggcgcgaacccgaagctccggcaatccactcaagaggttcgcgcagaatgacacgttcaatggtgctgcctgctggttgcgcgaggtgctacgcatgttgaaaaatgaatactataagtgaaaaatgcactatcctgcataaactaccagtcgcgccccataggggcgcgtggattgaaaccgaaggcgcacttgatgacgaagcgatcatgcgcgtcgcgccccataggggcgcgtggattgaaacggccggcgggaggggcgccgcgtggcgctgccccgtcgcgccccataggggcgcgtgggttgaaacatgatgcaatcacttaccatctgcggtagctgctggtcgcgccccataggggcgcgtgggttgaaacaaaaacacgtcgccaacagtcattaaagatatggtcgcgcccctcgcgggctcgcgggttgaaactgggatttccgcaacgtgccgacgaggaagcaggtcgagtcctcacaagctcgcgggttggaacgagcactcccacagtggtttcttgcagaactggttgatcatggcgggctctttcgcgaaagcggcgccgcatgcgtcgatggactggacgggttattttccttcgaagacgatgcggttgccgaagctcgcccgcccgacttcgcgcaaatgctatggcgcactcctcgacgggcggttgcagcgagcggcgagccgactggtgcggtccctgcactggcaaggaggctcaacgaaggttggagcttgcggcgacctccaagcagttggtctataattctcgttcgtagaaaaacgggggaagggaatccatggcatcggagaagcagcaggcggggcgcgccttaaggcggttggcgcggaggagcccgcttgtcgccctcgccattgcggccgtgctcgtggtcggcgccgcgctcggatggttcggcgctgcaggcggcgggggcgcggaggatgtcgcgccggaccggaacggccaagcgactatcgcccccgtaggggacggcctccagcaagtccaggtcgtgcgcgtagtcgacggcgacacgctcaaggtgagcgtgcccggcgacgagaacgccacggtgcggctcatcgggatggatacgccggagagcttggcggccgacgaggcgcgcaactgcgaggagggccgcatcgcctcggactacgcgaagtcgctcgtggcgccggggcagacggtgtggctctcgcgcgacgtctcggacgccgaccgctacggccgccttctgcgctacgtgtggctcgagcggccggacgacccggcggatgaaggcgggatcgcggaaaagatgctgaacgctatcctcgtacgcgacggatacgcgcaggtcaagcgctacaaacccgacaccacgctgcacgacctcttccagcgctggggcgacgaggccaccgccgacggcaggggcgtgacccacaagtgggcgtaggcgggacgcaccccgagccggacgcggcgccgcaggagcagccggccttctacgtgtacgtgctagcctgcgccgacggcacgctctacacgggctatacgaacgatgtggagcagcgcacccgtgcgcacaacgccggcaagggggcaaagtacacgcgcagccgcacgcccgtggaagtggtggcgcaggcgcgcttcgccacgaagcacgaggccatgagcgccgagttccgcttcaagcacctgtcgcgccgcgcgaaggaccgcctgcttgcccgcgcccgcacggagggcttcgccgtcgtcctcgccgagctgcaggaggccgcgagcgccgatgcgggcgctgccgtcgatgacggcgggcatccgggcggtaaagcgtagggagatggcaggcgcatccagtgcccgatgctgctagaatggcaggcgatacccatcaagcttccgccccgcggcgctgcgcgccgcaggggtgcccgccgtcgaaaggaccttcccgtgctcgtgaccccgcttcccaccgccgacaagaacgactacctctccgcgcgcatgcgcactgccttctccttcctgcgcgaggccgacctggcgcgccttccgctgggacgcgcggacatcgacggcgacgaggtgttcgcgaacgttcaggagtacgacacggtgcccgccggccagaagcagatggaggcccaccggcgctactacgacgtgcagtacgtggtggagggcgaggaggtgctgcagtacgcgccgctcgcaggtctcgcgcccagcggggagttcgacgaggaggccgacttcggcctgttcgccacgcccgagacgccgagctccatcgtgctgcgggcgggggagatggccgtgctcgcgcccgaggacgcccacaagccgggatgcgcggttggcgagccggggcgcgtgcgcaagatcgtggtgaaggtgcgggcttgacggccggcgaggatgcgctcgtcgggcagcttgcgcgcctgctggaagcggagcgcgaccgcttgagcccacgtcgcgtgctggagctgctgtcgcttttgctgggagagcgcgcccaggcgggcgacgcctcgcactacgtctacgagtacggccgccgcgcgggctacagcctgccggcgtacccgctggacggcagcggggagttccgggagttcttcgccgaggagggcgtgcgcaacgtgcccgaatggtacgagcgaaagctcggcgtgcccccgcagctctacgcccagctgcccgcgcgcaccatcgtggcggtgcgcgacgcggcgaaccgccgccgcgcgttcgtgctcgacggcgtgcggcatgcccaggacgccgggttcgcgggcctggcgaagagcggcctttcgcgcacgctgccgccggaggggctggccgagctgctggacgctgtcatggcgtacctgctgggagagcccgtgcgcgagggcccccgtccgggcgccgtgcggttcgtgtcgcggctgttctaggcgatgcggacgggcgcccatccgcatcgcggccttgagcctacgcccgcgcgagcgcccgcgtgcgcggcatgaccgtcgccggcgcgcgcagcacgtcccggcgcccggcgcccggcgaggcgccgtccccgccttcggcgtcctcctcggcgcatgcgaccgccagctgctccagcagcgcgcgcatctcgcccgtgttcttcagcgcgtagcgcgcccgcgtagggccgtcgcctatcttcacggtccaggcgctctcgggcgcggcctcgaacacgtcctcgtcggtgcggtcgtcgccggcggccagaacgaagccgtaggccgggtcgcggaaccaccggtgcgccgcatggcccttgtccacgccgcgcggcttcacctccaccaccttgttgccgtccatgagcgcgatgccgcggtcggccagcccatcgcccagggcgttctttatctcgatgacgcgccgctcggccagctcctggctgcacatgcggtaatgccacacgagcgagaagtccttctcctccagcatcgagcccggcgtgcggtcaacgaagtcggccaccaccgggcgcacggcgtccttccagtcgtcgctcaacggctcctcgagcacccacgtgcgctcgtcgcgtccgcggaaccagatgccatgctcggccaccaggtccaccggcagatcgcccagccacgactccaacgtggcgcggtcgcggcccgacaccacggccacgtcggtgcgcgcggccgctcccagctgctgcagcagcgcgcgcagccgcgcgtcgggggccacgcgggccgggtcgtcggagaacggcatgagcgtgccgtcgtagtccaagaggagcgcccgccgccgcgccccgcggaacgcctcaagcagccgtcccgccgacgtgggccccagcagatgagcgctcagccccgcctggcggcgcttcacgtcggccgccgcgtccaggaactcgcgcgcccacttctcggacgtgtagcgggccaggcgctcctgcatgggggcgttgcgccgccgctgctcggcctccggcatctccagcgcgcgccgcatggcgtccacgacgccctcctggtcgaacgggttcacgcacagggcctcgtgcagctcgtaggacgcgccggccatctcggagagcacgagcgccccgccgcccccgtcgtggcaggcaaggtattccttgcacacgaggttcatgccgtcgcgcaaaggcgtgaccagcatgacgtcgctcgcggcgtacaggctgaccagccgctcgaacggcagcgagcggtagtagtagtccacgggagtccagtccatggtggagtgcttgccgttgatgaggcccaccagctcgtccacctgcttcttcagggccgcgtacgacgccacgttctcgcgcgacggcaccgtcaccagcaccagcaccacacggccgcgccactcggggaagcggtccaggaacgcgtcgaaggccagcaggcgctcggggatgcccttggagtagtccagccgctccaccgacagcatgagcttgcagccctcatggcccttctcctcgcccagttccgccaccaggcggcgcactgcggggaggcgcgcggcgtcgcggtagcgcacgtagtcgatgcccagcgggaacgcgtccacctgcgcgagtcggccgtccgcgaacagcgtgccgctctcgttctccacgcccacgatgcgccggcagctggacaggaagtggcgcacgtagtcgtaggcgtggaagcccacgaggtcggcgcccagcacgccgcgcatgagctcgcggcgccacggcagcatgcggaacgtctcgtagtcggggaaggggatgtgcaggaagaagccgatggaggcgtccggcagcgcctcgcgcagaagcgacggcagcagcatgaggtggtagtcgtgcacccagatggtgtcgccgggccgtgccagcgcgagcaccgcgtcgcggaagcgctcgttcacgcgcacgtacgcctcccatgcctcctcgtcgaagcgggtatgctgggggaagccgtggaacagcggccacagcgcggagttcgagaagccctcgtagtacagctcggcgtcgcgctcgtccaggcgcaccggtgcgcaggagcgctcggccagcgcccgctcgaaccgcgcccgccctgcttcgtcgagcccggccggctcgtcggcccagcccagccaaacgttgcccggctgggcgtgcagcggctccagcccggccacgaggccgcccacggtgcgcgtgaaggcgaagccctcgcgctcgtcgggctcgatgcggtagggtaggcggttcgatacgatgatgaggcggttgtgcgggttgtccatgcggttcaccttacctgttgccggtttccgtcccattgtacgggtgcgcccggcggccctgcgaagcggttgcggggccgttgcggggccgtggttctcttgtgaccgccgccgcaccgccctcgcgcagccggtcggcgggctattcgacggcgcatcgtggtatcatcttcgttaccgtttgaaagccgctcgaccgtgagggaaggacatgcagacctacatcgcccactaccgctcgcccgccgcttccgatgcgcgcgccacggggctcttcgagttccagagcgacgcacgtgccggcaccaaggcgaactcccgcgacgcgcgcctgcgcatgctggagctgtacggcaaggacgccgtatcgtggacggtggaccgcgtcgagcgcaagaaggcgtcgaagcccgtccaggacggccagcttgaactggacttccgtccgccgaagaaggagcgcaagcgagcgaagaagaaagagtactggtaggagggtggccgcgcccgcagccatagccgcaaccgtcgtcctcgccgtctgcgcggcgctcgccggttggggcctcgtccggcgcctgggaatcggcggcgacgggcgccggttcccgcccgtcctcctcgccgtcctcctcgccgcctgggggtcggccgcctcgcttgccgcggtgccgctcgtcgtgctgtgcgcgggcgcctgggctgcgttcgcgctggccttctgcctggcatccggtcgggcggcccacggcctgttcgcggcgaacctcgtgttctcctgcttcgcggtgtcggtgctgctggtgttctccgcggcgtccatcctcgtcggcggcatgccgtggcaggtcgtggaagacgactccctccgcccggccgtgctcgcggcgggcctcgccctgttctgcggtgccgcgctggcgttccgcggcctgctcgaccgctttccgctcgacgcggagggcggtcggtcgtacgccgcgctgttctggttcggctggttctcgctcgcctacatcctgttcgacgcgcttcccagcttgttccgcctcgacgtgccgctgttgtcggagttcttgggcgcgagcatgctgctgctgggcgtgtcggtggccgccttcgtggtagccacgtcgctgctcgggcgcgacgcgcacgtggaggaggagtacctggcgctcatggagcggcgcgagcgccaggaggcgcgcctcgggcagctgcgcgaccaggcgtcgcgcgatgccctcaccggcctgcggaccgtcgaggacctgctggagcacgggcgtccgttcgccgtcgcctacctcgacatgaacggcctcaaggccgtcaacgacacgttcggccacgaggcgggcgacgcctgcctcgtcaggctcgccgacgccctgcgctcgtcgtttcccggccgggcggcgttgtgccgcatgagcggcgacgagttcctcgtcgtgctccccgaaggcgacgagcgcgaggtcgggcggcatgccggggaggcgctcgaggtgctggccgcccagccggtcgagggcgtgggggctgtgtcgttctcgttcggcacggctgcatcgggctgcgagggggagtccgccgccgccctcgtcgcgcgggccgaccgcgccatgtaccaaagcaagcgcgcctaccacggccgggtttcaggcggtgcccgatgagagtcgcgcccttcgcgatcagcgccgtgtgctacttcttgttcaacgcggccatgttcgccggcctcaaggcccaggcgggcttcgccgccccgaggcgcggcgccgagattgccgtgttcgccgggaactacctcgcattcgcggcgctcagcatgctgcagttcaacctggtggccaactggctcgtcatctgcgtgctgttcctgttcgagatcaaatgggccttcaggtgctcctggcgggcctcgctgctctgcgcgctgctcgtctccctggtggggcttggcgccaacgagttcgcgcggtcgctgtgcgccatcgccttcgacgtgccgcagagcgcgttcagcaacgacatcggcgaggaggggaacttgaagacggttcccgtggcgctcgggttcctgctcggcgccctgctcctgtgcgtgcagcggcgcgtgctgcgccacggcgagacggccgtggtgtacgggaacgaccgctcgcgccggttcgtgctggccatgggcgtgctcgggtacctgtacctctgctccatcctgctgctgtactacgtggacgtcaacgcgctcgtggtgaaggtgtgggcgctcaaggcgtcggtgagcgttttcgccagcctgtcgctggcattctactacgcgtaccggacggccgcggtcatacggcgcagcgaggagcgccgcctgttggagcgcgaggtggccgagcgcgagcacgagggcgacaagctgcaggacatcgtccggcgcgacgagctcaccggatgctgctcgcgccgtttcgccgaggcgcgcatcgacgagctcttgggccgagggcgccccctctcgctcgctttcgtggacgtgaacgacctgaagggcgtgaacgatgcaggcggccacgaggacggggaccggtacctcacgtgcgtcgccgccgtgctcgacgacgtggcgagcgggcccgacgacgtgctcggccgcctgggcggcgacgagttcgtggtcgcgctccccgacgtgcccgccgccgtgctgcgcaagcgcctcgaggaggcgcggcaccgcctgcgcacgcagagcgattccgagcgcagcccgttttccatgtccgtcagcgtgggcgtggcctcggcgcggccaggggacgacgcggcctcgctcgtcgcgcgggccgacgccgccatgtacgaggacaagcgggccggtagggaggcgcgctgaggggcggccgcccgccgcgtgccgccgcctgttcgtgatgggcgggtgacggccttgcgtcatcgggcgaaagacgcgcgcgccgcgttcgcgaggcgctataatgaggcccgacatcagtggaagcgcgccgtgagcggtgcaggcggcaggtcggcctcggcctggcgcgctgcgggccggcgcgcgcgaaccagcagggagcgccatgaagaagaaacaggtgaggttcctcaaggagctgctcgagacgccctcggccaccggcacggagatagccgtcgcgcgcctggtgcgcgagcgcctggccgacacggccgacgagataaggaccgacgtcatggggtcggtgcacgccacgctcaagggtgccggcgcgggcccgtcgctcatgctgtccgcccatatggacgagatcggcctcatggtcacgtacatctcggacgagggctacctgtcggtggcctcggtgggcggtgtggacgcggccgtgctgcccggcatgcgcgtggacgtgcacgcctcggagtcggtggagccgctgcgcggcgtggtgggccgcaagcccatccacctcatagagcccgacgagcgcaagaaggtcacgccgctggacaagctggtcatcgacctggggcttccggggaagaaggtgcgcaagctcgtgcgcgtgggcgacgtcatcacgttcggcgtgggcttcgagcgcttcggcgcgggcatggccgtgtcgcgcgccttcgacgacaaggcgggcgtctgggtgggcgtgcgcgtgctggagcagctggcgcgtgcgggccgcgcgcccggcgacttcacgttcgccgccaccgtgcaggaggagatcggcacgcgcggcgccgagacgagcgcgtactccgtgcgccccgacgtggggctcgccttcgacgtgacgcacgccaccgactacccgggcatcgatccgacgaagcacggcaagatcgtgtgcggccagggccccgtcatcgcgcgcggccccaacatcaaccccgaggtgttcgagcgcctggtggccgccgccgaggccgagggcctgccgtaccagctggaggccgagccgggcgtgacgggcaccgacgcgcgcgccatccagatggcccgcggcggcatccccacgggcctcgtgtccgtgccgctgcgctacatgcacacgcccactgaggtggtgtgcctggccgacctggacgccacggtgaagctggtcgtgcggttcgcgcgcgacctgggcggggacgcgtgcttcgtgcccggcatggccggcgcgagcccgcttgcgcgcgaggaggccgccgacgacgccgagctggcggcccaggctgccgccgacgcccccgcgcacgagtcggccgcgcagcgccggttcgacgagacgggcgcggagtagccgccatgaaacgcgaagcctcaaccatcgccaagaacaagaaggccttccacgagtacgacatcttggagacctacgaggccggcatcgagctcaccggcaccgaggtgcgctcgctgcgcgagaaccactgccagctcacggactgcttcgcgctcgtgcgcgacggcgaggtgtggctgcacaacgtgcacatcccgccgtatgccaacggcaacctggccaaccccgaccccgaccgcaagcgcaagctcctgctgcacaagcggcagatccgcctgctgcgcgagcaggtgaaggagaagggcatggccctcgtgccgctgaagatgtacttcaaggagaactcgctcgtgaaggtggagctgggcgtggcgcgcggcaagaagctgcacgacaagcgcgcgaccatggccgagcgcgactcccgccgcgagatcgagcgcgcgctcaaggagcgcagccgctaggacgaaaccctgcgccgcccgagcgacggcgccttacgcgaaggaggccttccatgggcttggacgaggagcttgagaacatagaggacggcgccgagacggaggccgagcagatcgacgaggaaaccgagctggaagacctcgaggagttccaggacgacgaggagttcgaccccaacgccggggagaccgacctcgaggaggcctacgagagcttcttcgccgaggagggcccggacggcgagggcgagacgtcgccctccggcgacgacggcggcctggccgcggtggtcgagcgctccacgggcatcgacctttccgaggagggcttccacttggtggacggcgacggggaggacctcgaggcggagctaggcgaggaaggcaccgtggacggctacgacggcgaggagctggccgatgacacggaggacgtcaccgtggtggagccggccgacaacgaggacggctacgagctggtggagctggagctagacgaggacgacatcgtgcgctacctggaggacgaggacggcaaccgcataggcttcgtgctcatggaggacggcgaggagtgcgagtacctctacgtcgaggaagacggggacggcgcctcgggtgacgacgaggacaacccctacgacctgggcatcaccaaggagggcgttgccgaggccaccaacgacatgaacgccatctacaaggacggcatcgccgtggcggccgagctgaaggacgccttcgacgacatcaagagcgccttcgacttctcgttcctgaagcagaaatagggcgccggccgcacgtgcgcggcgcagcgggccgttcggtgccggtgtgctccgcgcggctcccgccgccgggggacgcaacgcaaaggagccctgccggcgcgctgccggcagggctcctgcctttggttggtggaggcgcggagaatcgaactccggtccatactacctcgtccatgaggctctacaagcttagtcggcgatcagcattcggttgcgcgcggcccgccgacgggcattgcgcttcctagccggttcagtctttgcccgggccataccggctacgtgcccgagcgcattcccctaagttgatgccggaccgaggggcggggaagtcccaaggccgacagccaggcgctattaagcagccatggcgagcgccggagcgctctgagtcttagctttgccaattaaattgacgttacccctgtttaacgtggcgaggagaccacgacctgctcctcatttcagacgtaccatgtcgaaaccagtcgcccccggatgcttgccgcgatgcccgtgccgggccggcgcagctgtcgggaggggatggccccaccttttcaaggatcgcgcccgatgccgggcgcccgccgcgccgaggcgctgcggaacgttcattctatcccgccgcgcgcgtttgtcaagcacggcggcacggccgttcgcctcctgcgaccttcagccggtcgttgaggctcggggaaaatgagacttttcccatggcgaatttgtggcgagtgtaacctccgggccatgttagccgttttgtttacgagggatacgtgcttctcttggtacaatgcaacggatagagaagaggcgtatctcgaacgagacaaacgagtgtatgagagtcgcacatgaacgataagaagaacagcaaggcccggcatgcgcgccatgccgccccgacgccgcagccgggcagcgatgccgcgcaggaagattcgtcgcctgccagccatgccgcgcaggaagattcgtcgcctgccagccatgccgcgccgccgaaatcggcggcccctgcaaagacgcccccggatgcgccggctcccggcaaggtcgctcccggcaagccggttcccggccagaccgctgtcatgccccaacccgtgcgccccgtcgcgccgaacgccaaggcgaaacccggcggccagccgggccagcccgcgttcgctggcggccccatgctgccggtggacgtgagcgaggcggacgccaagggcggccgcaagccgctcaaggtgctcggcatcgtcctcggcgtgatcgtcgccctgctggccgtggtgtacctggccggggcgctcgtgttcatggaccgcttcctgccgcgcacgaccgtgggcgacctcgacgtgtcgctcaagtcgtccgcggaggttcagggcatgctcgccgacgtcatcgacgactacgtgctgaaggtggagggccagggcttctcgctcaagctgtccgcggcggaggcgggcatgaggctggacggccgggccgccaccgatgcgatgcacgcctctgcgaacgcgtgggcgtggcctctcgagatactgaaggcccatgacgagagcgacaagctcgcagccacatataacgagagcggcctgggcgacacggtgcgcgccgcggtggacgagttcaacaagaccgccacgccgcccacggacgccgtgatcgcctacagcgaggccaagggcgcgttcattgtggagccggaggctgtgggcacggcgcttagctacgatgccgtcatcaaggccgtggacgacgccgtgctggccctgcagcccacggtgaagctgggggcggacgtcctgcagcagcccaaggtgctctcatccgacccgaagctcacggctgcggccgagcaggcgaacaccatgatcaaggccgacctcgtgctcacgatggccggcggcacggccggcgaggtgaacgccgacctcatctcgcagtgggtgcgcctgggcgacgacctctcggccacgctcgacgaggccgcgctcacggcctgggtcgacgagctggcggccgcctgcaacacggtgggcacgcagcgcacctacacgcgtcccgacggcaaggtggtcacggtggcgggcggcgtctacggctggagcgtcgaccgcgacgcgctgctcaacctggtgaaggagtccgtggcggccggcaccgtgcagaccgcggagattccctgcacctcggtcggcacgggctataacggcgccggcgcgcaggactggggcctgcgctactgcgacatcgacctggccgagcagtacgcgcggttctacgacgagacgggggcgctcatatgggagtcgcccatcgtgtcgggcattcccgacggcgtgcacgatacgtcggtgggcgtgtactggctcaaccagaaggccagcccctcgaagctcatcggctacgagaacgggaagaagatctacgagtctgacgtgcagtactggatgccgttcgtgggcaacgtcatcggcctgcacgatgccgactggcagtcgtcgttcggcggcacccgctaccgcgacggcgccggcagccacggctgcgtgaacctgccgccgtacaaggctgcggagctgtacggcatcatccagtcgggcgacgtcgtggtaagccactggtaggaggcgccgcgtccgccctcataccaccgtcaggtcggcgcgcacgagcggcacgacgcgcgccaggtcgtcgggcgccatctccacctggcagcccaggcgacctcccgagaacgcgatgcgctcgaaaaggtccgccgtctcgtcgatggcggtggggaaggggcgcctcatgccgatgggcgagcagccgccgtgcacgtagccggtgagcggcagcagctcgcgcgcggggagcatggccacggccttctcgcccacggccgcggcggccttcttcaggtccagctcgcaggctacgggtatcatgaacacgtaatgcccgcccgacttcgcttgcgtgacgagcgtcttgaacacgcggtccggatcgaggtccagcaggcttgccacctccacgcccgagagcgcctcggggcatgtgaagaaccgcgcctcgtatggcacgcccgccgcatccagctcgcgcagcgcgttcgtcttgcggtcgtggtccttcggcatgggttcttccttcctgttcggtcgctctcggggtccgtcgggtcggccgcggtgtcgtctgtcccgcagcatagcacgaaaccggccggcccaaggctgctcgcaggtgggtgccgcgccgttcccccggcatcctgttactcaattgttgtttttatacaactataggttataatcgggtagccgaggtgcggaaagcatcgcgggcctctactcgcggggatcgatgcgggggatgccctcgaagaactccgacaaggtcatgtcgaagccgttggcgattttggcgaggttctgcagcgtgacgttgcgcccgcccacttcgatggaggcgagataggtgcggtccatgccgatcttcagggcgaaccgctcctggcttagcccggcagcggcgcgcaggtccttgatccgcaacccgacttttgtttgcagtaagtttcgcatgaacgaagactacgggcgtgttgtatgtataacaacggactatatacaacattgcccaaccgttgaccattcgaagggcgcgaggcgcctttctttggctccttgatgttgtataaaggcaacagcgaggcaacttacatatcttgagatggcgtaatcgtcgctaagcgcgttccgccgatcgacaagaggatgaataggtgcaggcgatctctctcgcggccatgggtcgggaaagcagaagcgtgcagctgttcatcctcttttcttttggcggagcatcgacgcggcgggaaaggggctggcgatgtggtacgtggcgcaggtgcaggcggggcgcgagtccgcgacgcgcgacctctgccttcgcctggtgtccccggacgtgctcgaggagtgcttcatgcccgagtacgagaccatgcggcgcgtccgcggcgagtggaagttggcaaggcgcctgttgttccccggctacctgttcttcgtcacgggcgatgccgaggagctcaacaaagagctgctgcgcgtgcccctgcccatccgcctgctgggcaacgaggagaactccttcttcccgctgacgaagaaggagcaggactggttcctgtcgttcatggacggcgagcacatcgtccgcatgagcgagggctacatcacaggcgacaaggtcacggtgacgcgcggccccctcatgggcttcgagggcgacatccgcaagatcgaccgccacaagcgccgcgcctacctcgacgtcaccctcttcggccgcaccgtgccggcaagcgtcggcctggaagtagtaaggaagaccgcgtgagccacccgaaccggacggttatggggaagagtgtcgaacctgtcggcggtatttttgcaggcccgcgatcgaagggaagagcgcatcattttcttgggtcttcgtccgaatggcaggctgtcaatctgaaacgcgccattgcgatcatcgttttcgtgctgtcggcactcgccttcttctttctcgtgttcaacggtcttttcgtgatatacgccgaaacctgtcacccggagctgacttgggagcaggttgccgaagttgaggtagacgggaaacccgcgtctccttccgaaggcgaagaggcgcctcaaagcatgcgcccgcagatcgagctggccttgtcgctgttcagcgcagtggtcatgcttatttcggccaggcttgtctggcggtattaccggaagggctacgaaatcaaagaggagccggtcgtattcccccaaaaggggagcgagattcggtggcggaaaatttttggctctcagacagatatgaatgagaacgtccaagcgtatgcggacgagttcctcgtcaacgcgtttgtggagccccgcatggtgttctcccgcatcagcgagagcgtgagcccgggcaggcggatgctggacagcgttgtgagctacgaggttcttcctcccactgagcgggggttgagctttttcgacgccgacgacttgatgttgaagaaggataaggagaaccgcaagttccggtcctgttccttggttgtgccagtgagttttcagaaaaggggcaagctggtcatgaaacaggaagtgcggaacgcgtccggaaccattctgccggtgttgaagcaaagcgagttcgttgcccgcattctcgagttgatccatagtttccttgctagtgtatgtgtcgacgctgatgcgaagaatcgtcccattgggaatctgccccaatgggacgatttgctatctgatttagaggcggcttttcggagctggttcatcgccgatgacggtcggaatgagctgcaaaagtctggagattcaaactccagaagacaaatagctcaactacctagccggagtatttctgcaggtaatcttgttttttcgtcttgacaaaagggatgtccacggtgggcccgcgcccggagttctctgagaaatctatgggtgcgttcgcgcttcccgccaaatctagcacgaacaaagtaaaggtgttttcgcaggtcgtgagctgtttcgcgagcggcctgcgggtgcgccgcgtctctgagtgtaattgtaaccgcatcgacggtatggggccccaatttcttgcaaaacctgttttcggtgtgtctcctgtgcatacgggagctctgtttcataagccaaataatgggctggctaaagcagcatggtaattgatagcgataaagcaattggaggcggtaggccggaaatggtgacacgaacctcgagagccttgggagtctaaagtctcttatatccgttgacacgctgaaggccatgcagcttctcggcttcgattataagtggaaggagcgcgaggtatactgcgcgccttggtcgtcatggaagacaaggctgccgtcgtctggcggaccctccctgccaaccgcctgctctatcgcatcggtcgcaaccttctcggtgatgcgctcggacatcgaccagcccacgaccttgcgggaggaggcgtctatcacggccgcgagatagagccacccttctcttgtgggtatgtaggtgatgtcgcccacccaaagcctgttgcgctcgcccacggcgaaggcgcgctctaccaggttcagccgagggtgtcccggctcgatcttcttctggatgcggcgttttcgggtcgcgccctttccggcgagtccgagcttctgcatgatgcggagcacgcgcttctcgctcacggcgatgccgctttttcgcagttcgcggtcgatgcgccggcagccgtaacggcccttgcgccgatggaaggcctcgacggcgaacccttcgagctcctctcgctctatctgggcgttggacttcttccgggagagatactcgtggaaaccggatttcgagaccttcatcagcccgcatgccttcttgatggggccgatctcgccccctatgctcttcgaggaacccgcgcctcgcgcatggccttgactcaagaaggcccggaaatttttcagtatctcgttctcgcgctcgagctcctcgaccttcttctcgagcttcgcgatctcgtagtccttgttgatcttcggagagccgtttccggggaacgcgtcgtatcccatctcctcgtattcgcgggcccatcttctcagcgtcgtccctttatgccgagttcctccgataggtctttgaccgtcatttccccggacagggccgccttttccgtcgagaccttgaactgcctgtcgtatcgctttcttctttgggtcatcctaaacacctttcgctcttaacctggtgtccaattcatcatacccactccacttccctgaagataatgcgaacatcgtttatggtggaagtcttgcgcgctggggtacgtatccatttcataacgatgcgcctgcagcgcagagcggcgagcacgaaggagaaatgcattgccgggtggcgcgcgcgggctgtgcggtctggggagcccgccccgttcggcgttacgcgggtgcgtgtatgctttgctgcaggcaacctgcgggatagtgagggcccggtctcattgcgctcgggaatctcccgctttcgctctacgcatctgccttgctgctctaatggctattgggaatcctccgatgcgccttcgcacgctcgcatgacctcgataccatgcgagcgtgcgaactcgacgagctcggcgttgcgggcgtttatggtgccgaaggcggcggggcacacgataaggcgcgcgcagtggacgaggagctctttggcgcgggctatggttttatccccgatcggctcgaaggcgcgctcggccacgcattccgccgccaggtcgcgcgcgagctcgcaatcgatgtccccttcgtgcagaacgcccgcgtagaacgccttgccctgccggatgagctggcgaaacacagccgaccctgtacctgcgccggcgatgacgaacgtgtgcgcattgccgtgcgggcgcccaatttccacgctgccgaagcgctcgttgaaggtgccatgttgaaggccgtagagctcgtcgatcgtctcgcgcgtgaatatgtcctcgggtgcgccggcgcggaagacccggccgtccttcacgcaaatcaccttgtcggcgcttttttgcgcgagctcgagttcgtggatggacatgatgacagccacattccgcgatttcgcaaggtggcgaagtattcgcagcaggtcgatctggtagcggatatcgagatacgacgtgggctcgtcgagcacgagcacacgcggatcctgcgcgatggcgcgtgcgagcatgacgcgctggcgttgcccgtcgcttatctgcatgaagtcgcgctcggcgagctcttccacatgcgcggttttcatggcctcgtcgacccgactatggtcgtcgggcgagagtgtgcccattcgcccggtgtagggatgccttcccgcctctacgatatcgcggcaggtgaggagctcggtctgggggcgatctgtcagcataacggcaaggttccttgcgaactccgccgtcttccatcgggaaatctcccgcccgtcgagctcgaccgcgccggcaagcggtgccagatggcgtgtgatggttttcaagatggtcgacttgcccgagccgttcggcccgatgagcgccacgacgtcgcccgcgcgaacctccagatcgacgccttcgactacgaccttcttgtcgtagcccgccgacaggtcgcttatgcggaaaagcggcgctccgtcagcctgcgtttcgaccggggtttcgaggttcgactccgctcggagggggcgttccacgcgcagttccgcacgagccgaaagcgccttctggcgctttcgtgcgagctcaggactgtctaagcatggaatgtcccctccgagcgttttgggccgcggcacgaatttccccatctacctcacccgcttcttcaacatgagcgcgataaccaccggcgcgccgaagatggcggtgacggcgctgatggaaagctcgacgggagagaacagcgtgcgcgcgatcaaatcgcagcccgcgcagaagatggcgcctcccaagaagcacgcaggaatcacgcggatgggcttcgacgacttcagcgccgacttcacgagatgcggaaccgcgatgcctacgaacgacaccgggccagcgaacgcggtcacgcaggcggagagcatgctcgctagaaggacgagcaccacgcggaagcgtgcgacgttcacgccgacgcttttcgcgtaggcttctcccagctggaaggcggaaaggggcttcgatatcgcgaatacgcatgcgctcacggtgatcaccacgaccgctatgaccgcaacgtcgtcccagctcgaacccgagaagctacccaaagaccagttgtgcaggttcacgatggactggtcgtcggcgaaggcgatgaggaagttcgtcgccgccgagcagatgtatcccaccatgacgcccgccacgatgagcatggccatggaacttatgcgccgtgcgatgaggagcacgaagccgatggtgataagcgagcccagaaacgctgcggccaccatggccggcgaggacatggcctggttcgcgcccagaagcacgatcatcgtaagcgcgacgacgaactttgcgcccgaggagacgcccaagatgaacgggtcggcgatggggttgttgaaaaacgtctgcagcaggaacccggagagcgaaagtgccccgccgagaagcacggctgaaagcacacgcggcaggcgaatctcccagatgacctggctttccatggaattggccgcgccgcccgaaaggatgccggggatgtggtctgcgggcacgagcacgctcccgatgcacaggttggccccgacgagcacgatgagggcaacagcgagcagcgccgtcacgatgcgacaccgcgcggcgcgccccgattcgtcgtatgccatggaaagccggcttctcatggcgctagccgagcttcctcagataatggaagtcactcgcgtcatcgccggtgaacgccccgtgcagctcgtcgataatgtcggcggtagaagtcatctgctggtacatgtcggcgcttgtgacccagacgttgccgttcttcacggctttgaactgcgacaatagcgcgtttttgcctacgaagtcgttcaaggtggcaaccgattcgtcgatggtgccgttgtagacgatgatgtcggcatccttcgccgtcgcgtagaagcgctccatttcgagcgttactgacgaacctgacgtcgacgccgtctgcgcgtcatcgagcgcgtagctgccgcctgcaagctcgatcatctgcgccacgtagtcgcccgcccgccgcgtgacggcggccccgttcgagttaatgtagaaatacgccacggttttacctgacgacgcgagccccgacgtttgctcgacgcgggccttctgctcgttgaacaggtgcgcggcctcgtcttccttgtcgaacaggacgccgaaaagcttaatccactcgacgcgcccgagtgcttcgggctcgctcgacgactgttcggtgagcacgacgagcccgagcttttgcagcttttccttcacatcgggcgtgtggttgatcatggcgttctcgatggcgagcgtgcagcccgaggccgatattcgctcgtagtcgggcgcgctgtacttgccgccgtaggcgatcgccccgctttcgagcgcgcttttgaagcccgcgaccgagcaatcgtcggccttcgtgcccgacatgaagatattgtcgttcgcatcgagcgcgtcgaccaggcacatcgtcgccgacgacacgaggtacaccttgtcggcggggcgccttatgaccgcgatgtcggagctcaacccatcaggtaccttcgcatcttgcggcaccacgaggaagcgctccccgttcgaaacgcagataagccgcaggccgccttcgaactcgtcgacagtgaagtgctcggcgtattcaagctgaagcgcccccgtcggctcccagccgcagcccaaatcggcgttgtggaagtcggccgcggcgcttgaagccgttcccgcaggggagccgccgcttgcatcgtcgcccgatttctccttcatggtggatgagtcgaagtagagcgtgtagtcgatggtgtgcggcgtcgacatggcgacggtctcggccgacacggcgatgtcctcgtcgagcgtgacgggtatcttgaacgtggagttgccgccgtcgtttacgggcgcgtagtccacgccgtcggcggtcatcttgtcgtagttcgaactcgaccaggtaatggtcgcggtgtaggtgtcgccatccttcacaattgtggtgggtgaggcgatgcttgcgcgccctgacccgccggaaagcgagacgctcacagtgtattcctgagagcccgccgtgccaccggtcgcgttcgggctcgcactgcaccccgcgaagggaagcgcgagcagggcgacgagaatgcaggcgatcgcgcgcgccgcgatgctgcggcgcttcctgctttcccccttgggaagaatcgaccgcatggcgttacttcagcgcgtcggcgcgcagatcgacgccggcggattcgaacacgagcgtgcggtcgtaccactgctcctttttaatgctccaggcggcgcaggcgatgtcctcgtcgagcgcttcaacgggcacgtcgtaggtgtacttgccttccgcgttttccacataggggatgaagtcggcctcgctcgcggcggcagcctcatcgcccgtgcccatgaagagcttgccgtagcccgtgccggaaagcgtcatcacgcagtgcatggagccgttttccacgatgagctgggcgtccacgatcttgaacatgttcgagctggaatctacggtgatcggataggtgccgtcggccaccttgtcggcggtgatgggggcagcgcttgcgccctcgggcgcatcggccgcctgttcggtcttttcctgggaatcggcatcgcttgcctttgcgctgccgcttgaatttccggcgcagccggcgagcgagaacgcgcaaagcgccgccgacagggcgaaggcgagggttttcttcaacatggaggggttccttccaatcggttcgaccgcccgcgccgtgcggtgggcgggcgggatgcgaatgcaacgggcatgcgccgtcagtcggggaaggcgcatgcccgttgcacggggacgcgaccggcgcccccgtgcgcggcgagtttacagcttggcgatggcgtcgtccacgtgcgagacgtagatgtcgtcgaccgcgacgttctgtcccagaccctggagcaggcacgtcacttcgaagccggcggccacgaacttcgcagcccagctgtcggggtcggtctcgtctgccatgtcgttgttcgcgtggtcgcccgcgaccaccatgaacggtgcgagcacggccttcttgtagcctgcggcgctcgcggcggcgataacatcctcgcaggtcggttcagcctcgacggtgccgacgaagaactgcgtcaagccctcgttcttgaacacttcctgcatcttggcatagtcggcgttggaatcggcttcggtgccgtggcccatgagacacagcgccgtcttgccgtcgtcgaaggacgccatgttctccttaatggctgcggccaccttcttgtagtcgtcgtcggaggtgagcagcgggtcgccgagcgagatcttgtcgaacttgtcggcgtacttgtcgagctcgtctttcacgtcggtgtattccaggccagccatgagatgcgtcggctgcacgacgacttccttcacgccgtctttcacgcagcggtcgagcgcctcggtcatgttgtcgatcgtgatgccgtcgcgctccttcagcttgtcgatgatgatctgcgcggtgaaggcgcggcggatgtcgtagtcctgccagtacttctcgcggatagcgtcttcgatggcgccgatggtgatgtggcgcgagtcgttgtagctcgtgccgaagctcgtgacgaggatgaccggcttcacggctttctccttttcgctcgatttctcggaactcgcggaggtgctggagcagcccgcgagcgcgactccggcgagcgcgacggctccggttgctgcggcgcccatgaagccgcggcgtgacatctggtcggacatggttttccctttcctcggtttgccggtcccccggcgacagttgcttatcggcacaagcgaaagaaaagcgcgctcgtccgcaaagggatagcgcgcctgtttcttgccggctgcggccggctcattcgaaagggaagcgcactcctcggggttcacaaggagctaacgccacggcgatgccgtgaggaaaaggcgaagcagtctggcttggggcgcgaggcggttcgcccgcgcgtcctatacagtaatgtcccttgcccaggattcccacctggttccctccgcaagccagcgcgggctgtgcgggcgccgcgccggtcgtttccttttattcgattgtcatatgctcgttgccgaaactgctactatgatagcgggcgcttgtgggcgtgtcaaagccagggcgggcggcattgcgcctcctgcctacgtatttgcgccgattgccgctgcgggcgccgtgttttgcccgctgcgcgaagggcggcgtaaacggttgcgatgagaaacgggaagggaaggctcggatgatccatatcgttggcgcaggttcgggcgccgccgaccttatcacgctgcgcggggcgcgtcttctgcgcgcggccgacgtggtcgtttgggcggggagccttgtgaaccccgagctgctcgccgagtgcaaggaatcctgcgtcgtctacgacagcgcgcacatgaccttggaggaagtgctcgacgtgatgtgcgcggcggatgcgcggggcgaggaagtggtgcgcctgcacacgggcgacccgtgcctgtacggcgccatccaggagcagatggacgcgctcgacgcgcgcggcgtggactacgaggtggtgcccggcgtgtcgagcttttgcggtgccgcggcggcgcttcgccaggaatacacgctgccgggaatcagccagtcggtcgtgatcacgcggctttccgggcgcacccccatgcccgcgggcgagggcatgcgcaccatggcggaaagcggctcgactatggtcatcttcctgagctcgggtatgctcgccgagctttccgccgagcttttggccgcgggccgcagctccgacgagccggcggcgctcgtgtacaaggcgacctggcctgaggagcgcgtggtgcgctgcacagtgggcacgctcgccgatgcgggcgcgcgagagggcatcgaccgcacggcgctcgtggtggtgggccgcgtgctcggagctcgcggcgggcttgcgcacgacggcgcgcaagcggagccgtacgagcgcagcaagctttacgacccttcgtttgccacggggtatcggaaggcgagcagctagcgtggccttcgagcactacatatataccgggacgacccgcctgcgctgcggctacaccacggggagctgcgccgcgctcgcggcgaaggcggcctgcgagatgctcttgtcacgaaagcccgtcggccgcgtgtcgatcgtcacccccggcgggctgcccgtcgaggcggacgtggtcgacgcatgcatcggcgaggggtgcgcccagtgcgccgtgcgaaaggacgcaggcgacgatgccgatgtgaccgacggcgtgctcgtgtacgcgcgcgtggaacatgcggggtcgggcacgggcgctgcgggcagcaagggcgtgcccgcgcgcgaatcggaagtttccgtcgatggcggcgtgggcgtggggcgcgtgacgttgcccgggctcgagcagccggtgggggcggccgccatcaacgcgacgccgcgcgcgatgatcgcttcggcggtgcgcgaggtgtgcgccgcgcacggctcttctggaaatatcgctgtgacgatttcggtacccgagggtgttgcccttgccgaaaagaccttcaacccgcacctggggatagaggacggcatctccatcctgggcacgacgggcatcgtcgagccgcgcagcctcgctgccttgcgcgacagcatcgagctcgagatccggcagcatgcggctatggggcggcgcggagtcgtgctcacgcccggcaactacggcgagcagttcatctcggggcatttccacctaaacggtgcgccggtggtcgtcatctccaacttcgtgggcgatgcgattgattgctgcgttcgcgagggatttaccaatgtccttcttgtgggacacatcggcaagctggtgaaggtcgcgggcggcatcatggacacccattcgcgtaccgccgactgccgcgcggagattctggccgcccacgcggccttggccggcgcgggcgcgaagaccgtgcgcgagatcatgtcgtcggtcacgaccacggcggcgctcgaggtaatcgaggccgccggcgtgggggacgccgcgcgcgcctcgctcgctgcggcaatcgaggacaggttgcgccgccgcgcggcgggcgcatgcgacatcgccgcggtcgtgttcgacgccgagcgccgcgagcttttccgcacgtcgggcgccgatgcagttatcggggaattgggggcgacgtatgagtaaaggcgtgctgtacggggtgggcacggggcctggcgaccccgagctgctcacgatcaaggccgtccgcacaatcgaatcgtgtccggtcatcgccgcaccgcagacggcggacggggtcatggtcgcgctcgacatcgtgcgcggcgccgttgaccttacaggcaagacggtgatccccgtgcgattctcgatgacgcgcgacgccgagcgccgcgcggctgagcatgcctcgcttgttcgcgagcttgtcgcgcacctggatgcggtccgcgacgtcgcgctgctgaacctgggggacccgagcatctacgccaccttccagcgcatagcgcccgacgtgcgcgcccgcgggttcgaggcgcgcgccattcccggcgtgccgagcttctgcgcggtcgccgcggcgctcgagcgcgacctcacgcccgagatgtcgtcgcctctgcacatcgtgcccggcggctacgacgacgtgcgccgcgcaatcggctggccggggacgaaggtggtcatgaaggcgcgccgctcgcttgcggacacgaagcgcatccttcgcgaggagggcgccttcgacggtgccgagctcgtagaggactgtgggcttccgagcgagcgcgtgtaccgctcgctcgacgatgtgcccgatcggggcagctacttctcgacgatggtggtgcgctagatgagggtttcctgcatagcgttcactgagagggggtatgcgttagcggagcgcaccgcacgcgcgctttccgattgcgcgcagacgggtgaagatgaccctggctggggcgtttccgtttcgcgcgggttcggcgaggggaaggtcgacctgcgcgcatggacggcgctcgcgtgggaagcgtcggacgcgcttctgttcgtgggcgcggcgggcatcgccgtgcgggcgatcgcgccgcatgtcgcctcgaaggcaagcgatcccgcggttgtggcgatcgacgaggcggggcgctttgccgtcccgcttttgtcgggacatttgggcggtgcgaacgagcttgcgcaaactgtggcacgcgcggcaggggccatccccgtcatcaccacggcgaccgacgtccgcggcgtgtgggcggtggatacgtgggcgcgctgtgcggggctcgccgtttcgaatcccgaggccatcaagcgagtgtcggcgcggctgctttcgggcgggcgcgtggcgctctattccgacatgccgatttcgggacagccgcctgagggggttgacattgcgtccgaccgcgctcgggccgatatcgtcgtgtcgccgttcgctggcgcgaatgcaggtgcgtccgttcgcgcggcggagacaacgggcgaggtcatgcccgccggtgagacggggaagccggcgggcgtgcgggcgcaggcgcctgcgcccgagccgcttcgccttgtcgtgccctgcatcgttgcgggcatagggtgccgtcgcggtgcgtgcgccgaagcgatcgaggaggcgtttcttctcgcgtgcgggcaggcgggtatctcgccttcggccgtgcgcgaggcggcgacgatcgacgtgaaggcgcacgaggagggtctgctcgccttctgctgcgcgcgcaatatctcgcttgcgacgtattccgcagaggagttgtcgcaggtcgaaggcagcgtttcgccatctgatttcgtgcgcgcgacggtgggggtcgacaacgtgtgcgagcgcgcggcgctcgcggacgggggcaaacttatcttcccgaagctcgctcacggcggcgtgaccgtcgcgttttccaaggtaactatcgaactttcgtttaaggagcggtgatgggaaatctcttcgtggtggggatcggcccgggcggccccgacggcatgacgattgcggcccggcgcgcgctcgaggcggccgacatcgttgtggggtacacgaaatacgtggagcttgcgctcgccgccgtgcccgacgcggcgcatctcgcgacgccgatgatgcacgaggtcgaacggtgccgcctggcgctttcgcgcgcgcagagcggagaggccgtggcgctcgtgtgcagcggtgacgcgggcgtgtacggcatggcgagccccgtgctggagcttgcggaggactaccccgatgtagacgtggaagttatcgccggggccaccgcggctcagagcgggtcggcggtgctcggcgccccacttgcccacgacttcgcggtcgtgtcgctctccgacctgctcacgccgtgggaggtcatcgagcgcaggctcgccgccgtggcgagcgccgacttctgcatctgtttgtacaacccgcgcagcagaaagcgcgccgacaggctctcgcgcgcggcgaggatcatgctcgaatggaaggcccccgacacgctctgcggctgggtacgcaacatcgggcgcgaggggcagcagtcgggcatgtgcaggctctccgagctgggggagttcgacgccgacatgttcaccaccgtgttcgtcggcaacgcggacacgaagcgcgtaggcggccgtatggtcacgccgcgcgggtatcgggagattccatgcgaaaggtaacgatcatcggggcggggcccggaaaccccgatttgctctcgcgcgcggcgctcgatgcgatcgacatcgccgacgtggtcatcggcgctcatcgcgcgcttgccggcatcgacgtgccgcccgacgtggtgagatgcgagctcgtgaagacggcggacatcgtcgccgcgctcaccgatgtggcgtcgtggcagcgcgccgtggtcgtgatgacgggcgatgtggggctgttcagcggcgcgcgccgcctggtggaggcgctctccggcgacgcgcaggtggacgtgcgcgtcgttcccggcataagctcagcgtcgtatctcgccgcgcacctcgcgcgtccatggcaggattggcgcttcgcgagcgctcacggcgtggcgtgcgacatcgtggccgaggccgagcgcgcaggtgagctcttcctcgccacgtcgggcggggaagacccctcgcggctttcgggcgagcttgtgcaggcgggcttcggggacgcgcgcgtgacggtggccgagcgcctgtcgtaccccgacgagcgcatcacctgcgcgaccgcaagtgaaatcgcaggtcagacgttcgacgacttgaacgtgatgcttatcgagttcgcaggcggcgccgggtcgcccgcgggctctagcgcagcctccgaggcgccggccggcgcgtctgcgcccgcggcggcttcttccgcggcggactctgcgggcgcatcccgcgccgcgagctcccgctggccgtacgcttcctcgggcattcccgacgagctcttcatccgcggcgacgttcccatgaccaagcaggaggtgcgcgccgtcgcgctcgcgaagctgcgccttgccgcgaccgacaccgtgtgggacgtcggcgccggcacggggagcgtgtcgatcgaggcggcgctcgtcgcgcgagcggggtcggtatgggcggtcgagcgcaacgcggccggcgtgcggctcatccgagagaacgcggatgcattcgggtgcggcaacgtgcatgcggtccccggtgtcgcccccgaagcgctcgcgaaactgcccgtccccgacgccgtgttcgtcggcgggagcgcgggcgagcttccctccatcgtggaggcggcgctcgagaagaacttgcaggttcgcctgtgcgtgccatgcgtcaccgttgagacgctcaccgaggcgtgcgcgctcctctcgggttcgcgctttaaggggttcgaggcgtgccaggtgtctgccgcccgcgccgaggctgtaggctcgcaccatcttatgaaggcgcaaaaccccgtgttcctcgtcagcgcgcgtggtgcgggcgcggatgccgaggagcttgccgaagtcggggcgcttgctgagtcgcctgtcggggaggacccctctgccgaggggaacccatccgttgaggtggtctcgcttgctaactgcaacgccgcagatggggaaggcggcgcccggtgagcacgtccatcccgcacttcatggtcgctgcgccctcgagcgggagcggcaagacggtcgtaacgtgcgcgctcctgcgcgcgctcgcgcgccgcggccttgcatgcgcggccttcaaatgcggccccgactacattgacccgctctttcatcgccgcgtcgtgggcgcgcgctcgggcaacttagacggcttcttcaccgacgccccgacgctgcgcgccctgctcgcacgcggcgccgcgggcgcggatgtcgcggtgctcgagggggtcatgggcttctacgacggcatggcgcccggcgtggccgacgcgagcagctaccaggttgcgcgcgacacggaaacgccggtcgttttagtggtgaacgggcgcggggcgtctttatcgctcgccgccgtaatccgcggtatcgccgagttcctgccttgtgcgaacgtgcgcggcgtcgtgctgaacaagacgagcgccgctgcctgcgcctacgcggcgcctgcgatcgagaagcacacgggcgtcgcggttttggggaatatccccgccgacgaggcgttttcgctcgaaagccggcatctggggcttgtgaccgccgacgaggtcgagcagctctccgcgcgcatcgacaagatggccgagctggtggaaaagagcgtcgacgtcgaccgcttgctcgaaatagcggcgacggcacccgatatccgcgaggaaccttaccggttggagccgatcgcgggagcgcggcccatcgtcgccgtcgcgcgtgacgaggcgttctcgttctactacgaggagaacctgcgcgcgctcgaggacctgggttgcgagctggcctttttcagtcccctgtgtgatagcgggttgccccgggggacaagcgccctctatctggggggcggctacccggagctccatgcgcggcagctctccgagaacgcgccgatgcgcgaggcggtgcggcgcgcggtggaatccggcatgccgacggtcgccgaatgcggtgggtttctgtacctgcagcgcgaaatcgccgatagcgaggggcggcgctggcctgttgcgggcgcccttgagggcgcaagcgagaacgggggaaggttgtcccatttcgggtacgtggagctcacttcccaacgcgacgggctctacgggccgcgcggcacacgcatccgcgcgcacgagttccactactggcagtccacctgcccgggcggcgacttctgggcgcagaagccccggcgcgacaagggctggccgtgcatgacgaccactccgtccctggtggcgggcttcccgcatgtgtactatcctgcgaaccccgacgttgcgcgcgcgttcgcgtctgccgcagcgtcgttcgcagagaggagacggcatggctgaagcagccgaaaccgcgcttgcctgcatccgcgaggaagtcgagcgtgcgttctcatcggcgcctggcgccgtgctcgaagccgcgctctcccggatcgcgcccgcagacgagtgcgcccgcgccgccgcgtacgccgcgtgggactccatcgcgcaccccttggggggattgggcgactttgaagacgccgtcgcgtgtatcgccgcagctcaggggagcgccgaggtggccgagtttccccgtgcgctcgcggtattcttctccgacaacggggtcgttgccgaaggcgtgtcgcaaagcgggcaagacgtgacgcgagtcgtcgcgcgcaacatgtgcgagggggccacgagcgcctgccgcatggcggcgttcgcgggtgccgaggtcgtgcccgtcgacgtgggcatggcccggggcatagaagacgcgcgcatggtgcgcgcgaacgtgcggcgggggagcggcaacatcgcgcacggccccgctatgtctcgcgatggggccgtgcgcgcgatcgaggtcggaatcgccgtcgcgtgcgggcttgcccgcgccggcgtgcgccttctcgccgcgggcgagatgggcatcggcaacacgaccacctcggcggcggtggccgcagtgctcctccgggcggacgcgcggagcttcgtcgggcgcggcgcggggctctcggacgcctcgctcgcgcgcaagcgcgacgtggtcaagcgcgctatcgacgcgaattcgctcgatcccgccgacccgatcgacgtgctctcgaaggtgggcggcttcgacatcgcggcgatgtgcggcttctacctgggggccgcggcctcgaaggcgccggcgctcctcgacggggtcatatcctgcgcggcggccctgtgcgcggcgcgcctgtgccccaacgccttgggctacctcgtgggcacccacgcatcaagcgaacccgcaagccaggagctccttcgcgagctcggcataaaggcacccctcgacgcaggcatgcacttgggcgagggcgcgggcgccatggcgtatctgccccttctggattcggcgctgcgcgtgtaccgggatgggaagacgttcacggcgactggcatggctgcttacgagcatttcgaggccgggaaatgacggtgacgctcgtcatcggcgccgccgcgagcggcaagagcgcctacgccgagtccctgtgcctcgggcacgacggcccccgcgtgtacctggcaacgatggagcccttcgggggagagggcgcccgccgcatcgcgcgccatcgggcgctgcgcgagggcaaggggttttccaccctcgagcgcacgcgtgacgtgggcgccgcagtgcccgggcttccgcgcggctgcacgcttcttttggaggacgtgggcaacctggttgcgaacgagctcttcgcggaaggcggcttgtccccacgtgaccccgatgctacggcgcgcgaggtgctcggaggcatcgaacggctcgctcaggccgctgcgtatacggtggtggtcaccgtcgacgtgttcgccgatgggatgcgctatgatgaggggaccgaggcatggaggcgcgcgctcgcgcgcgtgaacgcgggcgtggcggcgctggccgaccgcgcagtcgaagtggtatgcgggattcccgtgtggatgaaaggcgaaggacctgcaaggtgaagatagcggaggcgatcggcgcggcgttcggaacgttctcgcgcatccccgtcccgaaatcggcctggaccgatttcgggtcaacccatgcgcttgccgcgtttcccctggtgggccttgcggaaggcttcctcatgacggcgtgggggcacatggcgaacctgctcggcgtgcccgcgaccatcgtcgcggccgtgctcgtggcgctgcctgtggcggtgacgggaggcatccacctagacgggctctgcgacacctccgatgcgcttgcaagttgggccccgcgcgagcgaaagctcgagatcatgcacgacccgcgggcgggcgccttcggggtcatcggtgttgtcgtgtaccttattctgcagttttccctgttcaccgcgctgccgcttacggcgggggcgttcctcgcgcttctgtgctcgctcgtgttctcccgcgcgctttcggggctcgccgttgaatgctggcctgccgcgcgggcggacggcatggccgcggggctctcgcctgcgaagaagcgcgcggcgatcgtcgtgccgctttgcgctttcgctgcggcttcggctgcagggatggtcgcgtgcgctcaggccgtcggcgcccttatggcggtggcggggcttttggcgctcgcgtggtaccgccatgttgccctggcccgcttcggcggggtgacgggggatttggccggatggtttctgcaatgggccgagctcgcgatgctcgccgtgctggtggcggggggcatgctcctatgatgctcgtggtaggtggcgcgcattcggggaagaggaccttcgtgcgcgaaaagctcgggttcgcggcggacgatttcgtcgacgcggcgcagcttgcggagggcggcgtgcccgcggcttttgccggccgcgtcgcgtaccgtgctgaggaactcgtacgcgcgctcgacgctgaccgggcgctcgagcggctgatcggcttcgacgcagtgattctgcccttggtcggctcgggggtcgtccccatgcgtgcggaagacgcccaatggcgcgagcgcgcggggcgcctgggatgcgcgctcgctgcgcgcgccgacgtcgtcgtgcgcatgacgtgcgggattccccaggttatcaaaggaaaccttgccgatgcgcctcgagggacgcagggcgcgggcgcgcctttggaagtcgtctttgtacgccatggtgccacggcgggcacggaagaccatcgctacagcggggcgggcgccgacgagcccctgtcgagcgcgggcgagcgcgctttgcgcgacctcgcgtgcgatcgtgacgtgttccgtgttatcacgagcggcatggcccgcaccgaccagacggcgcgcatcctctttccgaacgcggagcttatggcgtgccccggtctgcgcgagatggatttcggcgacttcgaggggcgaagcgccgccgagcttaaagaggatgcgcgctaccgcgcctgggtagactcctggtgcgagacgcgctgcccgcatggcgagggcaagagcgatttcacccgccgcgtcgtcgcggcgtttcgggaggtgtgcgaatcggagcgcgcccaggggagtgggcgcgccgtcttcgtcgttcacgcgggtaccgtgaaagcgctgctctccgagctagctgtcccgaaaatgggatacttcgacgtgcataccgagccgggtggcgcatgggccgccacctgggatgggcgctgccttcgcgacgttcgccccgcttcggggggcgatgcccggtgatgacgattcttgccgtcgccgccgggttcgcggccgaccttgccttcggcgacccgcgctggcttccccatcccgtcgtcgctatggggcgcgcgatcacgtgggccgaaggccgcctgcggggcgcattcccgcaaacgtccgcgggcacgcgcgccgcagggcttgtgctcgccgtggcgcttccgcttgcgtgtgggcttttgacctggggaatcctgcatctttgcggcatggttcactccggcttgcgcttcgtggccgaggcatgggcgagctatcagattctcgcggcatgcgagctgcgccgccagagcctggccgtggcccgcgcgttctcgaagggcggccttgtcgcggcgcgcgaagccgtcgggctcatcgtgggacgcgacacgtctgttctcgacgagcagggcgtcgcgcgcgccgtcgtggaaacggtggcggagaacgcgagcgacggcgtcatcgcgccgcttttctaccttatgatcgggggtgcgcccttgggcatggcgtacaaggcggtgaacacgctcgacagcatggtgggctacaaaaacgagcgctacatcgacttcggctgcgcctcggcgcgcctcgacgatgcggcgaactggattccctcgcgcttatcggccctgctcatgatcgccgtgtgcccgatcgtcgggctcgacgcgcgcggggcggcgcgcatctggcgccgcgacaggcgtcgccatgcgagcccgaacgcggcgcagaccgagtcagcgtgcgcgggcgcgctcgggctgcgcctggcaggacccgcggtgtatttcggcaagctcgttgagaaaccgacgataggcgacgcgtcccgcgaaatcgagtggggcgacatcgcccgggcgacaaggctcatgctcgccgcgtccgtatgcgcgctcgtcgtcttcggcgccgcgcgcgcggcggtcgtgctcgccgtgggggcgatggcgtgagggaagaccacgccgcgccccgggctgctggggggatcctgcgcgcccgtgcgcatgggggcagcgcgcaatcgctcggcatcgcttgcgaagggggcgcctccgacctcattgacttctcggtgaacgtgaatccggcaggcccctcgccgcgcgccgtcgccgcagcttgcaaggcgctttctcgaatcgacgcctaccccgatagggaaagcctcgccctcgttcgcgccctagcgcgcgcccagggcgttcccgaagatgctatcgtctgcggcgcgggcgcgtccgacatcatctggcggctcgccgcggcggtgcgcccgaaacgcatcgtcgtgtgcgcgccgacgttctctgaatatgcggaggcggcatcgtactacggcgcatgcgtgcaggagttcccgctctccgaggcggacggcttcgacgtgcccgcctccttcgcccgcgcgatcgaggggccgggagatgtggcgtacctctgcaatccgaacaacccgacggggcgcctcgtcgacccccgcgtgatcgatgccgcggcttgccgctgcgagcaggcgggcgcgctgctcgtcgtggacgagtgcttcctcggatttgcgcccgacgcccgcgaaaggagcgtggccgcacgcgccgcgtgttcgcgccatgtggccgtgctctccgcgttcaccaaactctacggaatggcggggttgcggttgggatatctgatcagcggaaacgcccaactcatcgaggggattcgccgggcggggcaggcgtggcccgtctcctcggtcgccgaggctgcgggcatcgccgccctggaagacgtcgaatacgtctcgcgcacgcgcgatgtattggcgggcgagcgagcgtggctttcccacgagctctcctcgctcgggctttccgtcgtgccgtcggatgcgaacttccttttagtccgcacgccggcgaaagacatccccgagcgcctgtataatcagggggttttggtccgcacgtgcgactcgttttcggtactgtcccgtttctggtgccgcgtcgcggtgcgcacgcgcaaggagaacgctcggcttgcgatggcgttcagccgcgcgcttcgggcggaaggcgcatcgggcgaaggcgaacccgacgaacggggcggcgcttcttgcagcggcgctatggcgggcgcggatggccgaggctcggcgaaggaggtcgatacccgtgggtagggcgaagcccatcatgatccagggcaccatgtcgaacgcggggaagagcctgcttgcggcggggctgtgccgcgtgctttcgcaggacggcctgcgcgtgactcccttcaagagccagaacatggcgctcaacagcggtgtcacggccgacggactcgagatggggcgcgcccagatcatgcaggccgaggcgtgcggcatcgcgcccgacgtgcgcatgaaccccatcctgctcaagcccgaaagcgaccaccgaagccagctcatcgtggccggcaaggcgcagggagccttcgctgcgagggactacttcgcgcgaaagaaggcgctcatgccgcagattttggaggcgttcgattcgctcgcggaggaaaacgacgtcatcgtcatcgagggcgccggcagccccgccgaaatcaaccttgccgaaaacgacatcgtcaacatggggctcgcgcgcgccgtgtcctcccccgtgctgctcgcgggcgacatcgacccaggcggggtgtttgcccagctctacggcacggtcgcgctccttgcgcccgaggaccgcgcgcttttgcgggggcttgtggtgaacaagttccgcggcgatgtggaaatcctgcgcccgggtttggccccgctcgagaagatgtgcggggttcccgtcgtgggggtcgtgccgtatcttacgctcgacctggacgacgaggactcgctcgcgccgcgcctatctgcccgcgaggcgcgcggcgtcatcgacgtcgccgtcgtgcgccttccgcatctgtcgaacttcaccgacttcgacccgctttcgcgcgtgcccggcgtgggcgtgcgctacgtttcctcgacgaccgatctgggccgacccgacctggtggtgctccccggctcgaagaccacgctcgacgacgcgcgctggcttgcggctagcggcatcggagcctgtgtacgcgcgctttcgggcgcgggcacgccggtgctcggcatatgcggaggctaccagcttttgggagacgagctttccgacccgcacggcagggaaggcgctggcaccgcgcgcgggctcgggctcatccccgcaagtacggtgttcaaggaggaaaagcgcctcgcccggtcggagctgcgcatcacgggcgcccaaggcgcgttctcggtgtggaacggcatgacggcgcgcgggtacgagattcacgacggcgaaacgaccgtctcctgcgcccctgcgggcacgattggcggcaaaccggaaggcgcggcctgcggaaacgtgttcggaacctatctccacggcctgttcgacgaaccgggggtggcgctcgccctcgcgcgctcgctcgcgcgcatgcgcggcctgcccgagagcgtcgtgggtgctgcgggcgcggcgtccgcggccgatcaccgtgcgcgcgagttcgaccgcctggccgacgccgtgcgcggggcgctcgacatggagtatgtctaccgcatcatcgaggagggcgtatgatccacgtgtatcatggcgacggcaaaggcaagaccacggcggcgatgggcctcgcccttcgcatgctcgccgcaggccgccgcgtcgtcgtcgtgcagttcctgaaagacggcgaaagcggggaggcgcgcctgctcgccgagcatttcggcgtgcccgtgttcgcggggaaggcgtcggacaagtttacctggtcgatgacgtcggaagaacttgccgcgacgtgcgagctgcacgatgggaacctcgcttccgcgctcgccgagctcgagggcgcgcaggaggggctgctcgtgctcgacgaggcgctcgacgcgctttcgaaggggcttgtcgacgaggcgctcgtggaccgcgcgctcgatatgtccgcgcgcggcgtcgaagtagcgctcaccgggcgcgcgccttcccgcaagatcgtggagaaggccgactacataaccaagatgcggtgcgagaaacacccctacgagcaggggatatgtgcaagggaaggagtggagtactagatggattccaaggagatggcgcccggcgacatcgagcggcgcagcttcgagatcatcaccgaagagctcggcggccgcacgttcccgccgctcgaagagcccgtcgtgaagcgcgtcatccacaccactgccgacttctcgtacgccgattccctcgtgttcacccatgacgctgcgcactgcgcgctcgacgcactgcgcgcaggggccacggtgctcaccgacacgaacatggcgctcgcaggcataagcaagcccgcgctcgcgaagctcggctgcaaggccgtgtgctacatggccgaccctgatgtcgccgcggctgcgcgcgccgcgggcacgactcgcgccgttgcgagcatggacaaagcttgcggcatcgagggtccgctcatcgtggccgtcggcaacgctcccacagcacttctgcgcctcgccgagctcatggacgcggggaagatcgcgcccgcgctcgtcgttggggtgccggtcgggtttgtgaacgtggtcgaggcgaaagaggagctactcgcgcgacgcgtgccggccatcgtcgcgaggggtcgcaagggcggctcgaccgtggcggccgccattatgaacgcgctgctctaccagatcacgcgcccaggcggcccgaagtgacggcgcccgcatccgcgccggcgctgcgcatcttcgccggcaccaccgagggccgccttctgtgcgaatgggcgagcggggcgggcatccccacccgtgcctacgcggcaaccgagtacggaggcgagcttttgggcgagcttccgggtatcgaggtgcatgcgggcaggctcgacgaggccgacatggagcgcgagctttccggcgcgcgcatcatcgtcgacgccacgcaccccttcgctacgctcgcaagcggcaacatccgggccgcttcgctcgccgtgggtgcacgatgcctgcgccttgcgcgcccggccgaggcgctgcccaaaggcgtcgtgtcggtcgcgtcgatcgcctgcgcggcgcgctttctctccgagaacccgggtcgcgcgcttctcacgacggggagcaaggagcttgctccctacacgcgcgtcgccgatttcgcggagcgcttcttcgtgcgcgtgctcccgctgcccggcgctataacgaagtgcatcgacgcggggttttctccgtcgcacgtcatcggcatgcaggggcccttcacccgcgagctcaacgaggcgatgcttcggcaggtgggcgcccagtggcttgtgaccaaggactcgggaaccgtaggcggcacggccgagaagctcgccgccgcgcgcgacgcgggagcgcgctgcatcgtggtcgcccgtcccgccgagggaggcggggccctttcgcttcgggaagtggaagacgcgctcttacgggagttcgcgcgctaggcgctcgccgcgcctgctgtattcgctacgataaaactcgacacatcgctacgtaggatttcgacacttcgctagcgaacatgccgaccaccccaatcggttaccttggtcatcgccatcgtagatcgaccaaggaggccaggaaggaatgatcagcatgtccaaggcatattctatacgccagctcaggatggagggcgactcgatcgccgagatatccaggaagctcgaggtttccagggacaccgtctacaagtacctcgcgatggacgacctctcgcagaggccgcccgccccgcgcgccaagggcagcgtgctcgaccgctaccggccgctcatcgagagttggctcgacgaggacgagcgcaactggcgcaagcagcgccacaccgcccgccgcatctgggcccgcctgcgcgacgaggccggcgccgacgtcgccgagtcgaccgtgcgcaactacgtcaggcgcatcaagctcgagcgcggcgcgagccgcgagcagtacctcgacctcgactgggagccgggcgacgcgcaggcggacttcggcgaggccgacttctacgtcggcggcgtgcgcacgcgcatgagcttcttcgtcatgacgttcccctattcgaacgtgggcatcgcccaggtgttccccggcgagaacgccgagtgcgtgtgccaggcgctgcgcaacatattcgagcacgtggcgggcgtgcccaggcgcatcctgttcgacaacgctgccggcgtgggccgccgcgtcggcgacgccgtctgcaccaccgagatgttctcggccttcgccgcccactacgggttcgcctactcgaagctcctatgtatgtcaacttgcttttttcgcctgagatttcagccaagcatcgtattcttccaggaactggacattcatcagacggccggtctcggcgtagcttaccttttggaatccgacgttgagggcctttcccgcttccaccaaagtaatgcccagagcttgtcttgcggggcgcagatccttccacgacggccctttgatttcgaacgggttgcgcaacgcccggaacacctcgcgggcgatgtagcgcttgaggcacctgatggcctccttcttggactttccgtcgcgcttgcgcttcccgacgtaatccttggtcctctgatcatacgacatcctggtcaccgcgatctggtaaagcgccctgttggcgcgcctgtcgccccctctgttcaggcgatggcgctccgttttgcccgagctcgccagcagcggggcgacgccgcatagggaggcgaactcggcctcgcttttcagcctttcgggattccctccgccagccacggccagggcggcggcggtaacggtgccgcagccgtagatggcgagcagggcgggggcgttcgcctccaaaacccgcttcatcctctcctcgatggcgtccgcctcccgatcctggagatcccaggcttttcccaaggaccccagggccataacgatgccgccggcggcggggtcgagcgtcgagagagcgtttctgaggttcttcctggaaaggccctccaacgaccttctcaggtcctctggcgccgtcactatcagggatttcgcagcgtttatcatggccgatgtggcctgcacgaggcgaccgcgggctatcatgagctgcctgagttcctccgtccatccggactggtccttgggcttcgacaggttgaccctggcgagaacctgccgcgccgccacctcggcgtcggccggatcgctcttcggacggcccgacttgcgctcgcccttcccggcaccatcacctcgtacacgcagtaccaaagctcaaggagccttcgcgtcaagccggcgccgtacgagccggtcccctcgacgccgacgccgacgcacgttgccgggcctcctatcttgccggcgagggcatcgtagcctttcgcgtccgcggcgaacctgaacgtcccgatcgctctccccatgtggtcgaggagacagagggtgtgggtgtctttgtgggtgtcgacgccggcaaagacgaggtctttctccaactcgctcatacgcagcctttcagatcaacgcttgcgatacggtccgaaccgaaggctggctagacagaacactgatgggggctgtaccatgcgggttgctaggtccacgcgctcgagcccatgctcctattaggccattggccggccttggtcggggccgacgcgaggctcttcgagttgaggccagtcgctggaatcgacggcagttctttaatgggccatcgcgtcggctcatgcgcattttcgccgatagccctcgtcgatagcgcgattcccattatcagtgtcctaccgcacagataccctggcgatttccgacgcgcccctcgatatccgaaaggcgtggcccctttacgccgacctagtcgacatcgaaagaccgtcgacgcggcctgtcatcgatcatcgcctgaaaggcgagggaaacgggttcatcaggtttctcaccttgctcgagacgaaacagcccgacggtaccgaccgcaaaggccgcccggaagaggacagatggtgctatctggtcgtaagttcagatatcggcgtcaagcccgtgaaagatcagatgcggatagcgaaccgactgctacaggcatttgacggaaggctctttcgcccgcgcgtcgcatattccggtgtgaagatggccgagatcgcgcccgagcaaaagcctagaaacataatggatgccatgtggttacttgccagagaccatcccgaccgctacctcctgacttgcaggagatgtatgcggaccgtgctctcgggaacccagggcggcgagcgttcattttgcagcaactcatgccgtgcgacctggagcaaggagcactcggctaaaaagcgatagcggcagtatcgcagctccgccggaaatcggcggggcccacaaccaaatcgaccctagaaaggcacccggacaccgggtgcctttctagggtcgataaacctccagctcaacgattaaatcttctcccctccgggtacaagatgggcaattgtgcacctgatggataggggaggaaatctatcgtttcctccgcgaccgacagccacagcgcccggacaccgggcgcaacccgcacgaataaccgccacgaaaagagaaagaggcatcgcaaatggatgcaatggtagaggccatgaagccgtacatcggcatgattttcgctatctggttcatatcggaggtgatcaccgccatgttccgcctgcaccgcaagaagtcataccaagaccgccgtatggccaacgacgccgagcatgccaaggtgacccgcgcgatgcactacgacgttcttcaccgcgacggcttccactgcgtccgttgcggccgaggccgcgaggatggcgtgaagctccacgtcgaccatatcgttcccgtatcgcgcggcggcaagtcggtgatgggcaacctccagaccctatgtgaggtctgcaactgcggcaagggaaaccgctacctggaataaacacgcgatagaatggcagaaatacaagaactctatcaataactctatcaataactggcaattgactctctaggaaaaggcaactcaatgcaaacagacaaatacgatcgagaactcatagacgcgattgacaaatgggaacccaaattagttgaacaggtaaaaacgatagaaaatgagtgcggctttcccactgtaatataccgttcgccaagcaggctcattaaagaatgcgaagatgcgtacgattgcgggtgtgtcatagctgcccttaccttggttttaacgattccagatgtatgctcgagattggatggcactgattatcgaacctggagtgcaagatatctccagctgaaaagacctaaaggttccaaagagaaagagcgcgcaccggagaaaacgcaaaaagaggttgcagaagattttaaatgcatcgagagtgaaggcatattcacggcagcagatttatatcaactcagatgctcgatagtccatgcaggttcgtcggtcataggcaaagaagaaaccaaagataaagacaaagataaagacaaaaagaaaaagaaagatggagccaaattcagcccatacagaacgataggggtgggcttgacgggaaaccctgaaaacctccttatcagttatgggcatgatggagtaggcatagatgagatgacaaactgctcctatagttgcacagtcaatcttgaaggcttgattcgtcgaatggcaaaaggtgtcgagaaattcattttggaagatccgacaagagatgatgaatactcatttgagaaagctgaaagcatagaagataaggaaacgccagtaaccacccgtaaaggaatagtcgactatagaacaatcagcaattaaatcggaaagttccccgaaaaccgcccgaaccccgacgaaagtaacccggcggcaaccagaaccgtcttggctactgggttgcacccgacgaagtgcggaaagcctccacccatctctttaggaaagcacaagattccttttcggcatgccggtggccgaaatcaatcccgacgatatctcggttgcgagcctgcgcctggcatgctcgacctgatccgagatgccgagtgaggcggcgacgcggccgtagcacctttcgacgatagcgttgagggcatcgcagtggttatcgaaatcgtgcgtgcggtcgagaacggcaggggataggaagcgctgcatctgcccggtgaatgacccgtcggcatagcagacgtgcgctcgttgcatgccgacggcgatcattctggcaaggggcacgggacagcggtagtcatcgtgctttgccgcgacgagtgcggctacggcagaaaagtcgatttcctgcgcacggacgatccagggaatgtcccagaggtcgcggtgcctgatatgcgtatcggtggcggagaatgagatcagcttatcggccaagatttcctcgagtgtctggcaccggattgtaaggtcgtcgtacattccggcgagctcgggataattgaccgcgacgcggcggaccgtggatgtatgcgccggaacggacgcgatctcgagcttgattcgctgtttcggcaaatcggggcgcgcgatgttggtgtttaccgagatcgtccacctccgcatcccgacgccatcgagaccgttgacgaccttcggttccctgacgctcacttcggtatcgtaggatctcagcaggtcgcagcgcaaagtccttgagaaatcgtccaagggaagcgaatcgaacttatcgccggcgacaaaatcgaggtcttcgctatatcgttgcgatccgtagcagaggcgcagtgaagtcccgccctgaaaggtgatgtcttgaagcaggccgttcctcccgagggaccggatgatctcgtaatggacgatttctttttcgatgacgggcgtgagcccggcgccatcgaccttgctggcgatctccccggcaagttcttcaaggtcaatcagcatccacttcatcccaatcgataagctccaggctgcgcttcctcgagacgaggtcgtgcaggcagcgctcctcggtcgcgatcggcagccgattcctcggcatacggtcgagtattccccgtttgacgtcgttcaaaccatcgttcgtgtgaacgaactcgatggcaccgaagcgggtatcgacgagaccttccgcgcccgtcgtcacgcatgagatgcgtccgagcgggatctgcgagatgaagccccactgcgatgccgcggactcgaggctttcataggtgacctcgccggggcgcaaaaacgccgcgatatggccgagcaggtcgcagccgttggggtggaaaagcaggtagaggtacgcgtcatgggcgatgcgctcgaggatgccgtccgcggtgagcctcttgatggtcgagcggagcgtatcgccggactcaccgaaaagcccccccagctcgcggctgcggaaaaggattcggccctccaggtcgcacccatgcagaatcttgattgcctcgacgcttttcacagaaaccctcctgtctccctaccgacaactataccaatgtggtctaaatataaaccactcacccgaaaataccattccataaaacccaacacgatagcgcccgccggaaaccggcgggcgctgcgcatcacatcgccacgacccagaaagcgaaagaaggcgccctcggaaaccgagggcgccttaccgaccgcacctattgtaccgcacgccgattacgctgaataccatgctcgcggtaatcggtacccggagcgctattccccgcggcgacctttgctgcggcagctatcgccgcagggctcttgccgcctttgaccttcgccggcttgaagaactccggcgcaggtttcggctcgtcgccatggtagaaatggagcccgtttacgggcgatccgtagcggacggcctggctgatcgcggtgggcgatacatgcagagggcgggccgcggccgggttgcccacaaaggtctcgccggtttccaggcagacgatggggcgggtcttcgaatgacgctccctgaagaactcgggcgcgggtttcggctcgtcgccgtaatagaagtgcagcccgccacgctcgacgcccgtgctggccgatgtgcgcacgcctccgggcgtgatgccgaacgcgcggcccgcctggaatgacgattcgaacgtctccccggtatcgaggcacaccacggggcgcggcgccctgttgggcgggatgaagaactccggtgccggcttcggctcgtcggcatagtagaagtgcagcccttgggtgcaggtgccgcgctggatggagcggaaaatgttgcgcgagtcggcgaaaccgagttccttggccgcccggtaggcggagtcgtaggtcaccccggactccaggcacgtgatgggcctcttgcgtttggcatcacgattgtccatggcggcacccctactgcctgatcccggcgccgcgcgcacggccgccggcggtcgagctggccgcgactgaggcgcggtgacccagttcgacgggatcgggcttcaccgcgacggcgatttcgggcttcttctcggaatactcgatgcgccctccgaaggggtcggagaagccgaagcagtcctggggggtgtacaggtcgatgcggtcggacttccactcgccgcgcacgggttccatcatcgtgtacgcgatgtcgtgcgggtcgatctcgaaatcgcagtcgagcacggtgcccatggtgccgccgcacccgccgacggggtcgtagatgcccaagatgggttcatacgttccgggcttgaccgtgaacgtgccggcgttttcgccctcgccgcggcagatcatcgacaggctggcatccaggaacgcgtcgagcggcagcgtcgcgaggaccgcgagcccgacagggcgattctgcggcatattgaagatatcctcgcggaagctgcgctcgaaaggcgtaacggggtcgttgacgaccttttcgacggtcgtgccctgcgaggcgcacagcttgtcgaagatgctcttggggatgtccgcgggacgcgtgaaaggcctgtagtcctcggcgggctcgtactcccacctgtcatcctcgccctggccgcccctatggcagacgcaggggaggtaatcttcctgccagtcgcgcgccgcatcgatgacgtcgccctcataatacaggtcgttgacggacagtatgagcgaggtcttgaaggtgagcccgctgaaatcgatgtcgtaggagaacccgaacttatcggtcagatcgtcgcggaggcagtcgccgtcaacgtagagcgcccgcccgagatgccccgacccgagtcgagattcgattgcccgggcgaactcatcggcgatattcttgcaatccgcaagtctcgcctcatcgagcccgtcattgaacctgtccgtgagcacgcaggtgacggcatgcgacaggtcgccggcggtcagtcccttgtgcgtcttgatcttatccgggtcgatgaggccatcggcccacgcaagcgaggtgtccgcgagcagttcgccgcagatgcgcgcggcatagtcgtactccccgtattcgggccagtagtcgaggtggatatcccctccgttcaggatggccttcattatgtcctgccggttgaaccggttgccgacggcatccgcgagcatcgcggcggcctcgccggcgccgagcaggttcacgacgtcatcgtagctgtcgatctcgaggccgtcggtaagggtcgcgctgtcgttagggttgatatcggccatgtcggcacctccagtgaaacggttgtccccatcgatgctacccgccgcgaacccgcacggaaacgccccttcccgaacgggaaggggcgcccctccatcaccgcgccgaagatatcctgttgcaaaagacccgtcagtttggagcggatgtgaccgtagagcgaaagttcgatgcgaagtcgatgctggggatgctgaggagatacgaggccacggtcggcgaccttttcgccgtcgtgcctcccctgatgtcccgggacagcgtgaaggtcgccgatatagacggagtgacccttaggcgcatctcagtgaaagacctggcggaaggcatcctgatgccggaggacaaggtggagggggtcgagctcatccgggtcgatgcggccaaggcggaccgttaccgcctgcgtgcgggcgatatcctcatgccgagaatgctgcccaggcacaagtacacggactacatggtggtgaacgcggagtatgcggagcaggaccttgcctcgtcccacaacatgataaccatacgcccgcgggccgtggacatggccgaaggggagcgcatagcgtattccgagatgatggcgacatggcgcttataggcccaaggcttgaacgcccggctttttgcgccgagttcgagaagcgcattcacggctggaactatcgcgctctagtgaagccagggctcagcggcctcgcgcaggtgaggggcggctatgaccttttgccgaaggagaaagttgcactcgacttgtggcgcgtggggtatcccagcctgcgcatcgcgcgcgtcaccgacccgccgcactcctcgatcatatcgacggccctgcgcctctgctcgtccgtgcagctcggcattcgcgaactcctaaccggaccgattcggtctaactatttgtctgcatccccatttgtctcgaatgcaacgacgcgatgtccaaccatggctcagccttcgcaacctgctggactgctcagtagtgcgcagtaactacttggtagatacccagtagctgcggtgtggcgcaggtagtcggcgatgaaaggcgcggggtgcgccttgcggcccgtcctagatgacgccgcacggtagcgctatcgggcagctgcgctaccgcaggtagacgctcttgagtacctcgacgacctgctgcgcctcgacgcccttgatcttgagcgccttgggatcgacggggtccgactcgtaggcctccaggaagcgccgcatgtcggcgcggaccccctcgctcatggcggggcgctcgccgcccgcgagcagcgtggcgaggcggcagacgtcgtttcggtgcttctccacgctcttctcgtcgacggcctggccgcccgcccgccttgccgagaggtcgagccacgccttggccttgaaggggatcagcccctcgaccgacaggacggccacgccgctggccgacgctctgttctcgacgagcagccggtagtactcatcgtcgagcaggatcgccgaaaggttcgacacctcgtcgtcgatgtggatcggcatgaggccggactccgcgtcgcgcaggccgacgtcggtgcgcgcgaacagctccagcatggcggggaaggccgggtcctccggcttggagaaccggtagaactgcggctttccgccgctcttctgcctgttctcgtagccgccctccttgacgaaatcccagaagacctggccgaactcgggcgtcagcgcctccacctaaaggaccaggtcgaggtccttggtggccctgaagtcctgcccggcctcgccgaacagcaggtcgcaggcgccgccgccgatcaggacgtactcgccatcgtggcccgcgaagcgctccttgaacttatcgattcccctcatgatcgcctccaagcacccgggtcaaaacgctctcgatttcgcccgcgacgcgcgggtcgtccctctcgtcggcgggaagggacaggatggccgaaagcgggtcgaccgcgcatcccggcgccggcacgggctcgtagcgcagcacctgcaccacgcacgcgggatcctctggctcgtcgagaccggcgtcgcgcgcgtcggccgccagctccagagtgcgctcctgcgctttggtcgcggcgaaagtcggccaggggtcgtcctgcagcatcgagagctcgcacagcgccgagatcccgccaaggggaagctccgcatcgggcacgcggcccaggcggtgctccctcgcgaccgggctcgacatgcgcggctccaagcgacgccacatcgccatcttgtccctgccggggcgcagcacccgccgccgcccctcggcggcgacgatcgaggggtcggcggccgcgagctcgtcgaatgcgcgagaggcggtcatcttcgccgcgccgaggaggcctgccgcctgggtgacgctggcgccgtcgaggtcgccgtagaacaccatgagcgcgaggcgctgcgcctggggcgagaacgtgccaacgtctgtctgccgcctgtcgcgcgcgtggctccttccgctgctcagcgcgattcccaggaacggcaggtacacctgcttgtccggggcgatgaagggcaggcccgcctcgagcatccgcccgaccctgtagcccgtggcgccctcgagggcgaaggacacaggggtccccagggccgcctccagggcgtcgcggtgcttcgccatggtcttcaccgtcgggctttcgacgggggaggccacggcgaacggcacgccgaaggcggtccaccgctccagggagtacagccccctcaggtagagggggagccccgaggcgtcgacgggctcgcaatcgactctcgtgtgcagcgtcttctcgacgtactccctcatgctccgcctcctcatgtaactaaacaattatcaatgtaccattatgaatggtacatagcaaatcaattagttacatttaatgacgccttgcgagccctcgtggtctttcggaatcgcgatgcgtctagcagggcgtaccgctcgtttttccctgcgttttcgtctcgacaaaagagatatctgctcatgcccgcggcattcggcaggcttgtcgaatgccgcgggcagtagcgggcaggcgcttacctcccgcttgctcgatagtactgccttgggtcgtgctggtttgatccgacccattcgagaagtcctttttcggcaaggcgcttcagggtctccgtcgcctttaccctcccgatccccgtttgctccatgagctcttttctcgccacgcaacccgagtcgtgcgcaatctgcatggcgaccttctcggtttcgctgagtttttcgagggaaccgggggaggcggcgtctgttgaactgatggccgcggcgtcactcgtctgtgccccgggacgctcgaagcgtattacggttgagttgacgtcctggcggtagctgaatgccacgccagcggcgtcgcgcgccctcttgatgcgcggtatgccggtgccgtactgctcgatcatgcccgatctgaagagcacctgcgcgatgttcgggttgcgctgcttggagtcgccgcccgatccctcgaggtgcctgtcgggggagtcgccctcggggaacagcccggggctcattatctcgatgaagtccatgtagacgtttacctgaacggacgtgccggtcgtgtagtcgcggtggcaaagcgcgtttgcttgccccttccacgttttcatgcgccttaatgccctttgtgaagaatcgtcccattgggaaacgggtcccaatgggacgattttggcatcaggcataggggaaatcggtgcgtgccgtgcgtttgaagctatgtgctattccgattctctaatgcgtcccaggcggctcgaaatgctccatcgaaattgctggcaatcctctccacctgcgcaaaatccccgtcctgccttgcgttttcgtcttgacaaaagggatgagtgtgattggccctcgccctgtcgtcgaggacgaattggtcgcgtacggcgatgaggtcgatgaatttctttccgcgaagccgggtatcacaggctggtggcaggtcgaggcgcgcaacgacgcaatttatggagatgggagcagacaggagctggagctttgagaacatcattaacaagctgggttattcgtcgcgcaagatcgcggccgttgaatggcatctgcgcactgccgatttcgttgtcgccaattcagaattgcagatgaggtttcttgtaaacgagttgcctgagattgcgggcagggtgtcgtacgtccatcttggtatcgagccattcgagcaggattcctgcataaggcaaagtagatgttccgttgtcgcagtgagcgggggcactcgtccagttaaaggcagcgatgtggttgcgcgtgcggtgagctccttacgcggcaggaatgtcgactgcgagttgcgcgtgtatggccgccagtatgctgccaacgacgatctaagcgccattatggacggtgcgggaggggtgttcctcggccaggtcgaacatgaagaattcattagcggtctcggcgaaaccaacgtttttgttatgaactcccggcacgaatccttcggcctctccgccatcgacgccttgcgagctggagcctcgcttctcttgtctgggaattgcggcgtaggcgagattctctctcttgaggattccgatgtcgtgcgcgactgtgaggatgcgtgcgaggttgccgataaaatagaatatcttttagagtgcccaaatgcatccaggctctatgaatcgctggacttttcaatgcttggatgggattcagcagcatttcgtttgcgcaatatctgcaaaagagtagctatccaatcgcgcgagatgagtctttgaaaattcttttttacacctcatgcaaagctattgccatgaagggtggcacggagagggccaccgtctccgttgcatcagctttgtcgagccgctatggacacgaatgctattcagcttattcgatcgaagatagtgctcccaaggaactctgtttcgcgggggagttaatggtcgacgggcatttgaaaaccgctgcttcgcagatagcttcgttcgttcaagacagacgcgttgacgtggttgtcagccaaggatctttcgagcttgttattgctttgcgaaaagccggtttgcccagatgcacaaagcttgttcttgcccaccatttcgagccaggctgggaagttcatttcggcgatctgcggacgtgcttatcgcaacttggatctgctagtggaaccggaaaagtcaagccggctgttatggtgctctgctatccgatttacaaggctcgttatacaagaaggctgaggggggactaccaagcggcgtatatggctgccgatgccgtggtgctgctttcagagggtttctctgagggctataaagcgtttggcggattagaggacgttgaaaagttcaggttcattccaaatcctttgtcatgcgaagaatatcttgatcctgctgcctattgcgagaagaaaaagatcgcattgattgtagcgcgacttgaggatactccgaagaaaatctcccttgccttaaaagcatgggaggcggtcaagtccgatccagtatcggaaggttggacgctccgaatcgtggggcatggccgagacgagagccgctacaagaggcttgcggcccgcatgcgtctacccgacgttgacttcgttggccgcagagaccccatcggggggggggactattgcatagcgtccctgttcctgatgacttcggcaagcgaaggatggggtctgacgttgacggaggcgcagcagttcggggcagtgcccgtcgcgttcgattcctacgcctcgcttcgagagatcataaccgatggggaaaacggcagatacgttccctttgcggatgtaagcgcttatgcaaaagccgtgctcgaactcatggaggatgctggcatgcggcaggaaatggctctgtacgccatcgagtcttccaagcgtttctcttggggagcgattgctgagaaatggcaagcgctgttggaggagctgggatcactttgagcgtaatcgttcccgcatatagggccgaaaaaacgattctacgcgcgataaacagtatcttgctatggcccggcgatgatatggaggtcatcgtgatagatgacggatcggatgattacacggcggggatagtgcgagaagtgaccaaagtggatgctcgtgtcagacttttgcaacagagtaatgcaggaaggtctgcggcgaggaacgccggattctgcgcggcgcgaggtgagtgggtcatgtttttggatgcggatgactatctactcgccgacggcatagggaagattcgggagatgacggcttcttccgtttccctcgtgctgttccctgtgatactcagtgctagggagaatgtggttggctattcagatatatcgtggaagggctgggggactgtcgccgaggataggacgcttcctgcatctgccctgcggtcttttatgatcgatcccgcatacgcaccgctttcctcgggggttccaaaaaggctggagtggtatgagaccaattcggcgtggtcgcgcctctatcgacggaaggcggttctgcgattgtcctcaaagctcggagaagggcaagctccctttcccgttaatctgcgcttttccgaagataagctattcaacttggcattacttgatcttctcggcgaggagcaagtaatcttgtccggccatccggtttattattgggatttgggaaactcggatacctgtgccgtagttcgcgtcgatgatgcaaagggcctcttgccgttcaaggatgctgtcaatgtgttggtgaagaacgaccttctttccatgagtgagcggagtttagtatttactcgggaagctatcagccagtttaaaaggagcatgaggctgggttcttccgatctacatgcatcaaagcgtacttggcgcagtcttctgtacgacgagggtattcgttcgtgtttgggaagcgttccgtgtgcgtcgatgaaggagtctattcgcgtgaagccaatttgctggctcttgcgccacgagttcatatccgtcgccttcatgtatgagcgtagcatctttttggtcaagaaactgttttcggagtctggttggttaagacagttgctctctcgaagcgtcggatgaggttagccgatgccctccctcatgcgaaattccttctttaatatgctttaccagcttgtgttgctgctggtgccgcttgccagtgccatgtatgtgtcgcgtgtggtgatgcccgaagggctcggcgagatcgcgacggcggagaatctggtgtcgtatttcacggcgcttgcgcctttgggaatcccggcatacgggctgcgtgaggtggcaaaggtgcgaggagaccaaagagcgcgctccaggattttttcagagctcgtgctcttgaacttcgcgtcaaccctcttgtttctgggtgtctatgcgacgtgcgttctcgttttcttcgacggcgcagtacccgccctttacctgatattcggttcgcttattgtcgccaactgcctgaatgtcgaatggcttttcagcggtctggaacgttatgtgttcatttccgtgcgcggcatggttgtacgtattgccagtttgattttgactctcgtttttgtaaaaggtcctgatgatgttttgatttatgctggcgtaacctgtctcgccacggtcgcaaattacttggtgaacgttgtctgcctacacggccaagtgaaattcacgttgcgcggtatcgctccttttaggcatctaaggcctgtgctagtgcttgcgggaacgattgtgctgttcagtatttatacaaaagtggatatcacaatgctcggtgtgttttgcgcaagttccgtagtggcttactatgcctacgcctacaaagcagaagaaatagcaaagatgctttgcgtgtctttgacgagtgtttatcttcctcgtttgagctacgagttcatccatgaccgaaaagaattttcgcgcctcatgcgccagtcgatgatgctgaacatatggatttccgcccccatggccatgggggttttcatgcttgccccgcatatcgtgccccttctttttggagaggcgtttcttccggctgttctcacgttgcagatgttttccggattgatcatagccaaaagtattggtcagattatctatcaagttaccattgcgaccggtaacgaacgctttcaacttgttgcctattcggtaggtgttgcggtcaatatcgcgttgaattttgcactaatcccaatgcttcagcaaaacggcgccgttgtggctacggtgttaacagagatcgttctcgatgttgtgcttgcgttctacatcaaagagcatatgtgtttggctatacaacttcgattctggctttccctgttcggtggcttggtcgcgacaggagcggttctgctcttgtgtggggctcttatttcagatcatcttctttgtacgggagtctcggttgttctttctgcaattacgtacggggctgttgggatcgcctgtaagaacgaaacggcagtactgttactgcgcaggatctttcgtcgctaggtgtggctgatcgtgtagaaaacggcaaagcgccgttccaatagggaaaggagaaggtcatggtacgggtttcggagttgagggttggcgattatatcagggcttcttggttgggatcgggttggcataaggttcttgaggtaggcacttcctattcggattcgtccaaagtgtatcttgcggtcgagggcttccgcggcgttgaaataagcgccgacgaaacggtggaaaggcagtaggcatatcccagcgggggatgggctgaatcgaagggagtcggggttcagcggcttgttttgtgcaggcgctgaatcctcggctccccgttgagcagaaggggtggtatgcatgttcaagcgcaaggaagttgaggagatgcgcgataccgtctattacaaagacggcgatgaaataacgttcggatcggtacagaacgcccttgcagcgcaagcgagcgaagcgaggttgccgatggcctttcgcatggatcatatcaaggaaggcgccctaatgggtgacacaactccttgccttgtcgtgtttcatcccgagcatcctaccgattactacaacatgctgatcacaattggtcggcagggagcatatgcgctcgtgtcggtctacgcagcaggaaaaagcaagcaaatgggcaagttcaataggtcgaccgtaggtaagagcatgatcgaggatgttctggcagggaaagcgagcggggtcgaccttgccatcggagtgataggtggattatcgggttccttcggcaaaaacaagagtaagcaccaagaggagcaattttactaccagctttgcatggagatattcgaccaggttctttcctgattgaagcgaatgatttaggagttggaaatatgacattggatcaagtaatcgatacgctttcttatgaagacctagctgctctcaaaaacatgatcgaaagcgggcatgggaatgatgcgatagccgtgctcgaggattttggctgggacggaagcgaagacaatcaagacgccgtcgtaaaggttcttcgtagggtatagtggtgcacttttcttctgttgtgatctcgcaaggcgatgattggaagaggggcaatgccggctacgcgcagcacccttggccgctcaccggttcgttgccgataacctggcaactggcctcgacggtaagcgcgcagtactcgagcaggcaggagatgagtgcgacggcttccgtatcggccatgccgcttttggagagcgccatcgcgagcgccgatgttccatcgagtgtcatctgcacgtcgcgcagctcgtcgagggcctctagttgcgtcgttataatgggcctttgccgatacatctactctcctttgagtggctgaatgtacggagaatatcacttataacggggcgtttcaatcggagtatctgtgcgagctgcttttaccgtaggacaccatcttgcgcatctgcgagcggttcgacgtgcagccgggggacatcatggagtatatccccgactaggccggggctgatgtgggcagtgacgatcttccgggcggaatcctcatgagcttgcggttgcagctaagagtctccctctgcgttgacgtcgcgcccctgcgctgataaactaaaggccacaattatggcccgaaaggagacggcgatgacggtttgcgtacccataaaggatttaaagaatacggcgacgttttccaagcttgtcgagagctcgccagacccggttatcgttacgaggaacggtcgggagtcttttgccgtcatgacagtagaggagttggacgcacttcgcttggaagccgctcgtgctcagttgtatcgggacatagacgaagccgaggatgatttcgcccacggtaggatgacggaggcgaacgagtcccaaagaaggacgcgcgagcgttatggcctatgacgttgtttggtcgttttcagctgagcgggacagagataggatagtagagtacctgctctatgaccttgcctcgccccaagctgcaagccatgtgctcgacgagctcgataaaatgatcgttatacttagtgataacccgaagctctttgccctatcggccgagtctcggcttgcgcgcatggggtatcgcaagtacctgttcatgaggtatgtggtgctttatcgtgtggaggatcgcacggtgaaggttggccgtattttccatacagcgcagaattacgcccggctcgtgtaggccgggcgtttcgctctttatctgatgaagttcgtcatcaccttgggctccacctcgggggccggcacctgggctgtggccttcagcagccaggccatgttcctgcccaggacgcgcatgatctgcaggccctcggcgtcctgcgccacgtcgtcggccgtcttgccgtggaccatgggccagtagttcgacgagacgaccggcatgcagctgatttggaagtacttgttcacctggtcgatggcgggcgtcgtgccggcgcggcgggcggaggcgacggcggccgcgggcttgaagcgcagccgcgcgctcgcggcgtagaacatgcggtcgagcacggccagcagggcgccgttcgcgccggcgtagtagacgggcgtgcccaccaccaggccgtcggcggcctcggcctttgcgatgaggccgttcaccacgtcgtcgtcgaagatacagcgggcgtcgccgcgcttggcgcagccgccgcagccgaggcaaccgcgcacggcctcgcggccgatccatgctatctcggtctccacgccctcggcctcgagcgcgccggccacctcggccagcgcggtgtgcgtgcagcgcttctcgttcgggcttccgttgatcagcaggaccttcatgggcgtgccttcctctcgcgtggtcgttcctgttttgctcatgttccagattagcagaaactatggcagcccggtaccgatggcgaacaacggccggggccttacgctatactggccgcatggacgacatgcagacaacctccccggcatccgacgcagccgcggtgccatcctcggccccggggcccacagcgcccgcgcccgccttcgacgatgcgcccatcggcgtgttcgactccgggttcggcggcctcaccgtggcgcgcgagctggcgaaggcgcttccgagggaatccatcgtgtacctgggcgactcggcgcggtgcccctacgggccgcgcacgctgcaggaggtggacggcttcgtgcagcagatcggcggctggcttgtggaccgcggcgtgaagatggtggtcatagcctgcaacacggccacggcggccgggttggcgcacgcgcagaggacgttccccgtgccggtcatcggtgtggtggagccgggggcgcgcgcggcggcgcacgccacgaggaacaaccgcgtgggcgtcgtggccacgaaggccacggtggagtcgaacgcgtacacgaaggccatccggcatctggacgccggcatcaccgtgttctccactgccacgccgcgtttcgtggagattgccgaacagggcatccgcatggcggaggggccgctggagaactacacgtcgctcgcgtcgaaggtgtacatccgcccggcgttcgaggagatagcgcgcgagtacctggaaccgctgcggcgcgcgggcgtggacacgctcgtgctgggctgcacgcacttcccgctgctcaaggcgctgatcggcggggttatggggcgcgaggtcacgctcatctcgtcgtcgacggaggcggcgcgcgacgtggccgagatcctggcgcgccggagcgcctacgcgcgtgccgaccacgaggcccgctacgagttctacacgacgggcgacgacctggaggagttccgcggcttcggcagccgcgtgttccgcgagcccatcgacacggtggcgcacgtcgacctggtttgacggcggcgcggcgagggccgcggagcccaggcggcgatgaaagacgacgacgcaccgcggtttgccacggtgtgcggtagggaaggggagctgttatgaagacggtggtgctggccacgaacaacgcccacaaggtagcggagatcgccacggcgctggacttcccgggttgggagttccgcacgctgcgtgaactgggcatagagtccgacccggcggaggacgccgacacgttcgagggcaacgcgcgcatcaaggcacgcgcggcgcacgaggcgtccggcgggctcgcggcactggccgacgactccggcctggtggttgatgcgctcgacggcgcgcccggcgtgcactcggcccgctatgccggtgagctgtgcgatgacgccgcgaacaacgccaagctgctcgcggcgctgggcaacgtgccggacgccgagcgcaccgcccgcttcgcaagcacgctcgtgttcgtggacgaggacggttcggagatcgtggcggagggcacggtcgagggccgcatcgggcacgaggggcggggaagcgagggcttcggctacgacccgctgttcctgccggacgtgttcggcggcgcccgcacgctcgccgaggtcgaccgcgacgagaagaacgccgtgtcccaccgcggcaacgccctgcgccaactgcgcgccaagctccaggaagccgacggcgccaacgcctagagcgatgctaagctagcatgcccggcgacgccggcgagcgacctcggcggacgggacgcgtcggcttcatgccgcacggccccttaccgccctctgagcagagtgagcttaggggcgcagggacgcgtagcaaataccggaaacgctgatgaagccgccttcgccacgatggcggcttctgctataatagcccttgccgtttcgacgtcggggcgtggcgcagcttggtagcgcgcctgctttgggagcaggatgtcgcaggttcaaatcctgtcgccccgaccactgaaagactgctgtcacggtttgaaatcaagcgagggcccagcttctttggctattggcatttgaaggggctggtgctgatcatgcatcatggtcgggtcggcttgcgagcggagggggcgaaacggtgatctcggtctatgcggaaaagaatctccagagttcttttggcggggttccctatgcgatagccgccgcgatcttcctggtcataggggtgtcggctttcgtgtcgttccttgcgagcgcattgggcgccgggccgtccggctacgacctggacgacggtatcgtcgcgctcgtcgccttcgtggttcccggcgcgtactttgcgtaccgttggcgtgctgagagggccaagcgcaacttgttcaaaagctacgtgttcgcgatcgatgatgtggaaacgcccctaatagacctcgcggcgcttgttgggcgctccctgaatgagacggaccgtgacctacgtgagctcatcggcgagggttggtatccgggcgcgtacgtcgaccgtggcaattatatgttcgtgcgctctctggaaacggaggcgaaggcgttcggtggtcaaggccctctgcctcctgccagcgtgacgacggcgggaggctcgccccgtcgtgcaagcgtgcgaaaaacgtacaaaccccttgatcctgaaatagccgatatcgtcctccagtgtccgcagtgcggcgagctgaactaccgaaccccgaacttggaagcgtgcgagttctgcggtgcggacttgcgggggctccaggatggccgttagcaggaaagatctgtatctcttcaatccgggtgcggtgcgccgcggcatcggactcatgctgctgtttctcggctcgcttcacgtcttcgttgccgtgctcgtgggtctcggcgtcctcgaaaccacgatcaccttccaagagagaatggcgagctgcgcggcatgcctcatcgctggctcggcatgccttgcatggggtcgaagccgacggcgatggttccgcctagcgcgagagtacgacgggcttgtcggcgacggctccgatatcgccgaaatctcttcgcgcaagggaacttctgccgccgaggtcgtcgacgatctcggcaggctgaagaagaaggggctccttcccgattgcgccgtcgactacgacacgggtgaggtgcgccgtcaccccagcccctggtccacgtcgaagtagcccttccaggggtcgggggaggcggcgcgggcgagggcggcttccaggtggatggcgtcgggggccaccgtgtccagctcgtcccaggcgaggggggccgacacgggcgcgccctgcctcgcgcgcagggagtagggggccacgctcgtggcgccgcggccgttgcgcatccagtcgatgaatatcttgccgttgcgcttggccaggcgcacgttgctggtgtagcggtcgggccacttctcggccatcacctgcgccatgcggcgtgcgaactggcggaacgcgtcccaggacgaggcgggctcgaacggcaccaccacatggtagcccttgcccccgctcgtcttcagaaacgacgtgagcgacaaatcgtccaggaggcccttcaggtcgcgcacgccgcggcgcacctgctcgaggtcgaggcccttgtccgggtcgaggtcgaacaccatcgtgtcggggtgctcgagctcgtccacccggctgccccacacgtggaactccatggtgtccatctgcgcttcggacacaagcccttcggcgctctccaggtagaagtactcctccgtcccgccgtcgcttgcagggacgtcgatggtgactatcccggagctgccgggacccgggtgcttcttgaagaagcaggccgagcccacgccgcgcgggcagcgcacgatgctcagcacgcggccgcccacgtagggcagcatgcgctcggcaacctgcgcgtagtacctgaccatctgctccttcgtgatgccgctctcgccgaacatcaccttgccggggttcgtgacggtcacgccgtcgatgacgagcccgccttttctgctcgcggtaaccatgggacgctccaatcggtcgggggaatgcggcgctgacgacggccgcgcggaagggctcgccgacgcctgcggggcggccgccggccttgcgccgtccgcagccgccgtggcgggggaggggcccgcgctgacgtcggcgggcccgtcctcgtccggttcctcgcgccgcacggcgcgcgggtccttgtcggcgcgcaggcccaggtagctgggatggcgcaagagcccgtcctgcgtccattcggcaaagcggacttcggccaccagcttcggctcgagccaggccgcctgctcgtgcggccgcggcttcggcgggttctcgaacggcgcgtcggcgcgctgcaggccggcgacggccccttccagctcgtgcgcctcggctgcccccaggcccgaacccacgcggccgacgtagcggagcccgccgtcgtcgtaggcgccgagcagcagcgagctcacgcccgtgcggttcttctcggagcgcgtgtagccgccgacgacgaactcctggcgatggtcgcacttcaatttggcccagtcgccgttgcgcgcaccgcggtagggagccgcggcgcgcttgcccaccacgccctcgagtcgcagctcgcaggcggcgtgcaggctgtcctcgccccgcccgcgcacgtggctgctgtagcgtatgctggcgggcgcgccttccagcagctgctcgagcacttccttgcgctcgagcaaggggcggtcccgcaggtccgcgccttcaagcgccagcaggtcgaacacgaggtaggcgggctgcgggccgccggggttgcgcaggaagttctggagggcctggaagtcggtgcggccgtcagcgtcgatcatcgccacctctccgtccagcacgaacgcgcggccggcggaccagtcggcaagctcggcggcgatggcggggaaatgcccggtgtagtccttgccgttgcggctgaccagccgcgcgcggttctcctccacgaacgcgagcatgcggtagccgtcgtacttcacctcgtacacccacccgtcgcccttcggcgccgccgacacgagcttcgccagctccacgtcggcgcggtcgaaggggttgcgcgcaagccgcccgtcgccgccggacgctatctcgtccatggtgcggcccgtgcgcacgctcgtgccgaagccggcgatgccgggcccatcctgcacgtgcccgtccttctccttgatgaggagccagttgtctccgtgctcgcccgccttgggcttcagccgcacgagcacccaggcgcctttgaggcgccgtccgtccagcacgaacttcagctcgccgtcgcgcaggcccgcctcgacgtcgccgagcggttcccagaacccctcgtcccagagcatcaccgtgccgccgccgtactcgccctgcggaatggttccctcgaagttgcggtactccagcggatggtcctccacgtgcacggccagccgcttgtcgcgcgggttgtacgagggccccttgggcaccgcccagctcggcagcaccccgtcccattccaggcgcaggtcgtagtggtcgcggcgggccaggtggtgctgcacgaggaaccgcaggcgccccgcgggctcgccgcccacgccctccggctcggaggttcggttgaaatcgcgcttctcgttgtaggcgctcagcttcgcgggcacggcggatacctccgcatcttccgggttttacttggatgctcgatattctcgctcgcagggggccatcttgcggtacaataatcgccgcgttacgcgggtgtggttcaatggtagaacctgagccttccaagctcatgacgcgggttcgattcccgtcacccgctccacggaaacacgacggccctgccaattggcggggccgttttcgattgccggtgttgggggttggcgcaagtcggattcggtctggctcgacgcagggcgcttggcagcttgggtttcgcgacgtgccgcgctcagcccgccttcccgcgcaggtaggcgatgatgtcgtcggactcgtacatcggcttgttgccgatgacgaggcagggaacctgcttcttgccgccgatatggatgaggtcgttctggttgccgggctggagcgtgtcgcgcatgtccaggttgatcttgttgtcctgcatgaaacgcagcactttctggcagtagggacacgacttcttgtagtacagggtgtggtcttccagataaggcatggacgttcctttcctcatcgctcgagcaagcggcctcgacgatatatatgaacggaaactttataataggcgagcaacccgatttgtttgcagccgagggccaacttgttgccgagcggtttactttattaagataaagcaaaggggcgtccgcacgccccttggaaccgtgccttagcgtgttctcgcgcgcacgacatgattcagcctgacggcgcaggcgcacgcggcgagggcgaggacggctcccgcggggccgagccaggcgtaggtgcccgtctgggccagcagcgcgccgcccaccaacgagcctgcggcgatgccgatgttgtagaatgtggggttcagcgacgaggcgaagttgagcgcctgcggataggcctcctcggccacctccatgaacagcacctgaacctgggagttgtgcagcgcagtgacgtaggcgatggccaggcaattggcgatgcccgtgacgggccccgccgacgtcgtggctggcagcacggctaagagcgctgcgagcactccgtagactgccggcagcgcgcgctgcccccagcggtcggccacgacgcccgccgagaggttcgagagtatcgccatggctccgtaggcggccagcgccagcggcaacgcggcctcgggcacgccgatcacctgcacgagcagggggttcaggtaggtgtagtacacgtagagccccgccatggacagcaggatctgcgacgcgttcagccgcacgcgcgcgtccttgaaaacggccagctgcgatagcaggaaggccgcggggccggtgtcgcgggggcggtcggcttccgctcttcgcgcggctgcgtcggcggccggcgcgcccttcgccccgtcgtgcggcaggacgcgcacgagaaccgagatcgtcgccgccagaagcgcgcagatcacccagaaggccgcatgccatccgagcgcctgcgcgatggcggtgcccaggggaactcccagcaccgacgccacgctgaaccccgcgaagatgatcgcgatgaccttcgggcgcgcgcccggcgcggcgatgtcggccacgaaggtcatcgacacggtgcaggcagcgcccgaaacgctggccgtgagaacgcgcgcgaccatgagcacctcgtaggtgggggcgagggcggtggccacgttgccgatcgcgaagacggcgcacaaggacatgagcaaccggaacttcggcacgcgcgcggtggcgatggccagcacaggcgtgccgatggcgtacacgcccgcgaaaagtcccacgagattgcccacgagcgtgatgtcgacagcgagcgagcccgctatgtcgggcaggatgcccaccacgatgaactcgctgcaccccagcgcgaagctgagggtggtgagcgcgataacgggcagcgacactatgccttgccgggtgttttcctttgtgcgtgccacgacgctccctcctcttccgaccaacctcgtatggtatgcttcatcctgttcgaaagcagcgccgaaagttcaggtgcgcgtgtcgaatcatcggatcgggcaaggaggcgtgctgtgggaagggtcgaggacgcaatcggcgcgttgaagctcgagtaccccacgctcgacttctcctatcgcgacttccccctgggcgagccgggcgagaagatgttcacgtggccggggcctaccgacgaggacgtcatgatcgtcgtgcaccagtgctcgggcgtgcgcgagctgttccaccgccacgacttcttctacttcaactacacctactgcggctcctacgactctctgagccagcgctacgacaacgtggcgaccatccgcgagggcgagctgtacgctggccagccgttcgcgggtcacgccctgctcgtgcacgacgacgcggacaccaccatcatcggcatgctcgtgaagaaggaggcgttcttccggtcgttccttccgctgctgtcctccgactcgggcttcctgcgtttcctgctcgatccgtccaccgactgcttcgccgacgagttcatccacttcaagctggaggaccagtgcacggcgcgcgccttgttcgagatgatggcggtggagtacgccaacaggcgcgaggacacccaggacgtgctcaagcccctcgccctggcgctgctcatgcaggtggcgcggcagtatgcggacgacgagcgcgcggacgccgcgccggtcgggacggcggagctcatggtgcgctacctgggcgagcatgtggacacggtgacgttgagcgcgctcgccgcgcgcttctcctaccaccccaactacgtgtccacgctgctacgccaggaaacgggcaaaaccttctccgagctgctattggagcagcgcatggatcgggcggccatcctgttgaagggcaccgacctgtccgtggccgaagtggcgcggacgctcggctacctgaacacctccaactttcacaaggccttccgcgcgcactatggcatgacgccgcgcgcgtactgcgatctcgcttgctcggaatgagcgcgcctccgggcgacagccctccaaaggcatgcccggctgccggcgccggggtggcgcgtgtcggcgggcgcgccgcgagaagggggtcctcggtttcggcgggacctgggatcggaaaccggatagcaaaaaatttctccattccgcaaaacttatgctatactttaaagttttttcgaacaggcatcaaaaaagccgcctcccgagggggaggcggctggcgattcctggtgcgcccggcaggactcgaacctgcaaccgacggattagaagtccgttgctctatccattgagccacgagcgcgtttgcttcggcatcggtattataccgtaaaatgcgcgcgtgcatcctgcggagccgagaaaggccggcgaagcgccctctacggagaaaccgcacgtgaaaacctcgtttcatgcgtgtttcgacgagcggccgagcaggagcccccgccgtggccgcccagcgggcggcccatcgatgagtcgtttgcgctaagaatgcatctttggccttgtttatgcactcccatttatcagcgtgccgcggggtggggggcgcccgtcccgcaaccgggccgaaaaagcgccgttccgttcgatttaccgctccgtcgcagtaaagtgtatgtgaaggaattgtgaataaaaggtcatctaaaagcaaccgttcaccgaaaaagcacccgatatcaaacggggtccggttttgttgcgaaattgtggttgcaattcgaatcgaaccgtgcgattttggggtcatcgagcgggcagacggtgcgcaacggatgccctcgaggccgaaaatctggaaaatgcataaagaaaaggagggttgcaatggctggtgtcaacgttaaaagcgagatcaagcctttaaagcgagtcctgctgcaccgcccgggtaacgagcttctgaacctgacgccgaacacgctcgaagagctgctgttcgacgacatcccgttcttgaaggtcgcccaggaggagcatgacgcgttcgcccaggctctgcgcgacaacggcgtggaggtcgtgtacctcgaggacctcatgaccgaggtgctcgaccagaaccccgacgtgcgcgagactttcctgaagcagttcatcgaggaagccggcatccgcaccgaccgctaccagaagatcatcttcgactacctgaacgacaactatcccgagaacaaggacctcgtgctgaagacgatggagggcatcaacctcaccgagctccacaccgacaagtccaactccctggtcgacctcgtgtccgaggcctccaagatggtcgtcgcccccatgccgaacctgtacttcacgcgcgacaacttcgccatgatcggcaacggcgtgtccatcaaccgcatgtactccgtcacgcgcaaccgcgagaccatctacggcgagtacatcttcaagtaccatccggacttcaaggacgtcccccagtactacagccgctacaacacgttccacatcgagggcggcgacatcctcaacatcaacgaccacgtgctcgcggtgggcatctcgcagcgcaccgagcccgatgccatcgacgcgttggcgcataacatcttcaacgacgagaccagccccatcgacaccatcctggcgttcaacatcccgaacaaccgcgccatgatgcacctcgacacggtgttcacccagatcgacacggacaagttcaccatccacccgggcatcatgggcccgctgaccgtgttcgagatcacccccgagggcgacggcatcaaggtcaaggagatgaccggcaagctcgaggacatcctcgagaagtacgtcggcgtgccggtcgagctcatcccctgcggcggcggcgaccgtatcgcggccgagcgcgagcagtggaacgacggctccaacacgctgtgcatcgctccgggcaccgtcgtggtgtacgagcgcaacgacgtgacgaacaaggtgctcgaggagaagggcatcaagctcgtcgtgatcccctccgccgagctctcccgcggccgtggcggcccacgctgcatgagcatgcccatctggcgcgaggactagcggcgccgggcccgggcgcaccgggccgcaaccctttgtctttccagcagagaggggagtcccgggcgggttcccctcgaaggctgaaagaggcaggcggtttcaaacttggcgacgcctgcctgcacggttcacacgtaggaaaaacttggcaaagaacgacgaaaggaatgaatcatgcccacgagcctgagcggacgcaacttcctgaagctgctggatttcacgcctgacgagatccgctacctcatcaagctgtccaaggagttcaagaacctgaaattgacgggtaccccccatcgctacctcgaaggcaagaacatcgtcctgctgttcgagaagacctccacccgcacgcgctgcgcgttcgaggtgggcggcatggacctcggcatgggcgtcacctacctcgatcccggcagctcccagatgggcaagaaggagtccatcgaggacaccgcccgcgtgctcggccgcatgtacgacggcatcgagtaccgcggcttctcccaggagatcgtcgaggacctggccgccaacgccggcgtgccggtgtggaacggcctgaccaccgagttccatcccacgcagatgatcgccgacatgctgacggtcgaggagaacttcccgcagggcctcaagggcctgaagttcgtgttcatgggcgacgccgagaacaacgtggcgaactcgctcatggtcgtgtgcgcgaagctgggcctgcacttcgtggcctgcggccccgaggcccgtatgccgaaggccgatctcgtggcccagtgccgcgaggttgccgccgagaccggcgccaccatcacgctgaccgaggacgtgaaggaggcctgcacgggcgccaacgtcatctacaccgacatctgggtgtccatgggcgagccggccgagctctgggccgagcgcatcaagctcttggagccctaccgcgtgacgaaggaagtcatggccatggcctccccggacgccatcttcatgcactgcctgccgtcgttccacgacaccaagaccaccatcggcgccgagatcgccgagcagttcggcgtgaccgagatggaggtcgaggacgcggtgttcgagtccacgcagtccaaggtgttcgacgaggccgagaaccgcatgcacaccatcaaggccgtcatgtacgccacgctctcctaagcacgagccggagaaaggagacgaactatggcataccagaaaggcgaaggcaagtccgtggtcatcgcgctcggcggcaacgccctgggcaacacgccccaggagcagctggagctggtgaagaacacggccgagcacatcgtggacatggtggccgagggcatcaacgtcgtggtctcccacggcaacggcccgcaggtcggcatgatcaacaacgcgttcgactacgcctccacgcatgacggcaagacgccggccatgccgttccccgagtgcggcgccatgagccagggctacatcggctaccagctgtcgcaggcaatcctgaacgacatgaagcgccgcggcatcatgcgctccacggcctgcgtcgtgacgcagacggtcgtctacccggaggacccggcgttccagaacccgacgaagcccgtgggcgccttccttaccgaggaagaggccatgaagcgcgccgaggagaccggctacacctacaaggaagacgccggccgcggctggcgccaggtggtggcctccccgaagccgcagcgcattgtggagttcgacgccatcaaggatctcatggacgacggctacatcgtcatctccacgggtggcggcggcgttccggtcatcgagaaggacgacagctaccatggcgtgccggccgtcatcgacaaggaccgttccagcgccaagctggccgccgacttcaaagccgacatgctggtcatcctcacggccgtggagaaggtgtgcatcaacttcaacacacccgagcagcaggagctcaactccatgacggtcgccgaggctcagaagtacatcgaggagggccagttcgcgcccggctcgatgctgccgaaggtcgaggcctgcatcgagttcgtgcagcagcatcccgagggcaaggcgctcatcacctcgctcgagtgcgctgccgacggcttgaagggcaagacgggcacggtcatcacggcctagtgttctacctgcggcggcggacgcgcgagcgtctcgccgccgcatgggggtatccgcgtgccgggcggttatgcttccggccggcacgtttaagagatttctcgttcgccaaacgtattcacctcgatcctcttcaaaggaggggttctcatgaccgagaaaacgaaggaaaaaagcaaaaagaagcgatctatatcttcattcaccattttgctcatcatgctcgttgcacttgctctgatcacggtggccatgtcttttgccggtgttgagggagtcgagggcgcaaccatcgccaacgtggcgacggcacccgtcaagggcttcaccgatgcgcttcccgtgtgcctgttcgtgctgatcctgggtggtttcctgggtatcgtgaccgagacgggcgcgctggatgccggcatcgccgcactggtgaagaagctcaagggcaacgaactcgtgctcataccgatcctgatgttcatcttctccatcggcggtacgacgtacggcatgtgcgaggaaacggtcccgttctacctgctgctggcggccaccatggtggcggccggcttcgacagcgtcgtcggcgcggcggtcgtccttctgggcgccggctgcggcgtgctcggctcgacggtcaacccgttcgcggtcggcgcggcggtcgactcgctgtctggcagcggcatcgtcatcaaccagggcaccatcatcatgctcggcgtggtgctgtggctcgtgacgctggtcatctccatcatcttcgtcatgcgctacgcgaagaaggtcaaggctaacaagggttccaccatcctgtcgctgcaggagcaggagaccatgaaggctgagttcggcgaggcgcagcaggaggcggtcgacgccgaggccaacccgaacgagaagctcatgacgggccgccagaagtgggcgctcatcgtgttcgcgctcacgttcgtggtcatgatcgtcggcttcattccgtggggcgacttcggcgtggagatcttcgatgccggcgctgccaccgaggaggtcacgacgcaggtcagcggcgacgatatctcggcgacatgggccgatgccgcagatgcgggcgcgaccgagggcgagctcacgttcaacggcgacgtgaccggcacggtcacggccgaggagcaggtctccgagggctggtccgcgttcctcacgggcctgccgctggggcagtggtacttcgacgaggcttccacctggttcctcatcatggcgctgatcatcggcgtggtgggcggcgtgtccgagagccgtttcgtgaaggccttcatcaacggtgcggccgacatgatgagcgtcgtgctgatcatcgcgctcgcccgttccatcacggtgctcatgggcgagaccggtctggacatgtggatcctcaacaacgcggccaacgcgctgaacggcctgtcggcgatcatattcgctcccatgtcgttcctgctctacgtggtgctgtcgttcctcatcccgtcgtcgtccggcatggccacggtgtccatgcccatcatgggcccgctggcgaactcgctcggcttctcgcccgacgtgatgattatgattttcagcgccggcaacggcctggtgaacctgttcacccccacgtccggcgccatcatgggcggcctggcgctcgccaaggtggagtactccacgtggctgaagttcggcggcaagctgttcatcgtgctgggcgttgcctgcatcatcatcctcactgcggcgatgatgctcataccgggcgccgcgtaacgtcggctgcactcggctgacgcatcgcacgctcgcgacgcgcttcggaatcccccgcttcggcgggggatttttctgctcgggccgtccttcctacaacgccttcctcatccagatgtgctccacgtgctcgtccagctcgacggggccgtactgctcgtagccgcggcgctcgtagaacggggtcgcgcggcactgggcgtgcaggtgcatctccgtggccccggcttcgcgcgcaaggcgctcggtctcggccagcagcgccgcgccgaggccgccgccgcgcgcctcgggcagcacggccaggcggccgaacacccaacggccgggctcgtcggggtgctcggggtcggggaacgtgcgagcgcagcccgcgagcgcgccctcggcgtcgtagagggtcacgtggagggtggccgggtgctcgtcgaggctgtcgaactcgttcgcaaagccctgctcctccatgaacacgcgcgtgcgcacgatgcgcgcgtccgcgaagtttccctgctcgaaccggtattccatggcgtttcctttccgtaaggtgcaggcgtccacgataccacagggcgcacggcggacggggcgcgcttaaccgaacctgctttttacgaggtcatgtgtgctttttctgcataaggagccacgcctggtccgggaggcgccgcgcaggtcctccgtgcgggcaaaaggtggtagaatcgattgatatgcaaccgtttggatatcgaacaggaaagatgcgcaccatgcaaattcgcgaacaacttgaacagctgatcgacgcggccgtcgcggctgcgtgcaaggacggatcgctcgagctcgagcaggctcccgaggcggcgctcgagcgcccgcgcgacgaggccaacggcgactgggcgtccaccgtcgccatgcgctcggccaagctcgccaagaagaacccgcgcgagatcgcccagatcatcgtcgaccacctgcccgagaacgacctcgtgcagagcgtggacatcgccggccccggcttcatcaacatccgcctggcaccgtcggccctgcagggcgtggccgcccaggcgcgcgccgagaagggcgacttcggccgcggcaccatccccgagggtgagcgcaagatcaacctcgagtacatctccgctaacccgaccggcccgttgcacgtgggccacggccgctgggctgcgctcggcgatgccacggcgcgcgtcatgcgccacgccggctacgacgtgttcgaggagttctacatcaacgacgcgggcacgcagatggacaacttcggcgagtcggtggcggtgcgctaccagcagctgctcggccgcgacgtggagatgccggaggcgtgctacgccggctcctacgtgaaggacatcgcgcaggccatcatcgacgaggacggcgacaaatggctcgacgccgacccgaaggagcgcatggagaacttccgcgagcgcgcctacgcctacgagctggccgagcagcatcgcgtgaccgagcgcttcggcaccacgttcgagtgctggttcagcgagcgcagcctgtacgtgcccgacgagaccggcaagagcgcggtcgaccgcagcctcgaggccatggacgccaagggctacatctacgtcaaggatggcgccacctggttcaagtcgagcgcgttcgacgacgagaaggaccgcgtgctcatcaaggccaacggcgagatgacgtacttcatgagcgatgtggcgtaccactacaacaagatggaacgcggcttcgaccacctcatcaacatctggggtgccgaccaccacggctacatcgcccgctgcgaggccatgctggccgcgtggggctggcccggcgcgctggagatcatgctcggccagctggtgaacctgttccgcgacggcgaggccgtgcgcatgtccaagcgcaccggcgagatgatcacgttcgaggagctcatcgacgaggtgggcgtggacgcgacccgctacctcatgctggcgaagtcctccgaccagcccatcgacttcgacatcgaggtggcgaagaagaaggacgcatcgaacccggtgtactacgtgcagtacgcgcacgcccgcatctgctccatcctgcgcaaggcggccgaccccgccgacgccgcggccgccgaggccggcgagatgagcatggacgagctggccgcgaaggtgatcccggccgacgtggacctgtcgccgctcacgcacgagtccgagctcgcgctcatgcgcaagatggacgacttcggaccgctcgtggcccaggccgcccgcgaccgcgccgcgttccgcctgacgcactacgcgcaggacctcgcgtcgctgttccactcgttctacacgaactgccacgtcatcggcgaggaggaggccgttacgaacgcgcgcctcgcgctcgtggacgccacccgcatcgtgctggcgaagacgctcgacctcctgggcgtcaccgctccggcgaagatgtagacacgactaccggcgattcgaagggctgccccgcggggcggcccttttttggtgcgcgggaggggctttcttcatatcagccggccgagcgcgtgctcgcaggggaggctgccccggcgcacacggtcaacctcggggatttgcatgctttttctaccagccggccgagcgcgtgcttgcaggggaggcctcccctgcaagcacggtcgacctcggggacttccgcatgcgccggagggctcttccggcgcatgcgtcctcggccggctgatgaaggaggaggccagctctcccttcatcagccggcgttgctgctccgcgtccgccgcgttgcctcttcgccgtccgtcacacgttgtcctcgaggtccacctgcatcaggtacacgttctcgcggaggcgcttcgcggaggcgcggcagaggtcgccctcctcgtagcgggtctggatctgctccagctccaagcgcagccccaaacgctccacgtccatcgccagcgcgccggtgcgggcgagcgcggtgatggaggggttcgcgttgcgcagcaccgagatggtgcgctggtactccatgaccagcgcgctcacgtcctcggcaggctcgttgcactccggcgaggtcagcatggcctgcagcttcccgacgacgtgctcggagcccttgatctgcagctcgcggatggcctgcgtgcgctcggtggggctcacgccgggcaggccgttgagcagccggtgccatccggtgcgggccagcgcgcgcagccgcaggtaggcgttctgcagcgaccaacgacccgcatggtgcttcagcaggttctctatgtgcgcgaggcggcttaggtactggtagcccacgagggggtagacctcctcggcctcgatgagcttcagcacgtagtcctgctcccaatcgagcgcgcgcagccgcagggcggtgttcggctcgtccagaatgtcgttgctgttcttgatgcgcgcgatgcgctggttgtacgagtggatgaccgtctgcgtggccgcgcggttctcgggcgtctggcgcgcggccagctcctctatcacggcgcgcagtatctccaggctcacctgggtctcgtcgcagcgcagatcctcgtcggtcgggggcttcctcggcgccagcagcggcaccacgaacgtggccaacagcagcgtgaccacgatgacgccgcaggccaggaatatgatgagctcgcgctgggggaaggccaccacgccgcgcagcgggtcgaggtacgtcaccggtatggtcagcaccacggccagcgtgatggtgcccttcggcccgcccagcgccatgaccagcgacgagcgcacgtcggcgcgccatcccggccgctgccccttcggcgagcggtgcgaatggtagcgctccatggcgagcagccacacgaagcgcaccgccacgtagatgagcgtgagcagcaggatgtagccgatgagcacgccgttgtcgatgctcacgtcgtcccaggtgccctgcatggccttcgggagctgcgtgcccaggaacacgaacacgatgccgttgagcgcgaacgacagcacgcgccacacgctggacgacacgatgttcatgcgcgagatggacggcccgatggtgcgcggcgatatgacgttcaccaggcccgccgccaccacggcgatgatgccgctcgtgcccagctggttggccacgaggtacacgatgaacggcgtgaaaacctcgaacagcacgtggaacgtggtgttctcgagcccccacgagcgcacgcgccggacgaggaagttgcccaggtacccgagcgccaggccgatggcgatgccgccgaagaagctcacgacgaagtcgagcgaggcgttcagcagcgagaacgtgcccgtggtggcggcggcgagcgcgaactggaacgccacgatgcccgaggcgtcgttgatgagcgactcgccctccaggatgctcttgtcgcgcggcgcgatgtccgtctccttcgacagcgatgccacggccacggcgtcggtgggcccgagcgcggcgcccagcgcgaaggcggcgaacaggccgatggagggctcgagccattcgacggcgaacccgatgatgagggcggtgaccaccaccaggccgatggccagcgacagcacgggccggcggttcttccacagcgcgcccttgtccacgttcttggcctcgtcgaacagaagcggcgcgatgaacagcacgaggaacaggtcggggtcgagcgtgatgttgatctgcgagggagcgaacagggcgatgagcaggcccaatccgatctggatgaggggggaggaaaccttggggacaagctggtcgatcaccgaggagagcaggacggccgcgagcatgagcagtgcgagcacgagtgcctccaccgatcgccctccttacgttgcgttgctttccgggatgccgggccgaggggccggccccttcattgtaaccgaccgccgagcgggggcgcccgtcaaaggcgagggtttttcatgtggttacgcgggccccgcaacgccttgggagccgatccccgccgcggactcctcctgtatgagcgcgacgctggccttgatgtgcagcgtgtaggccacggccgccgtggaggccagcaccaggtcgcgctcgaagtcgccgggggcgtcgccgctcgcgaggccctgggggctggcggggcgggctccgaacagcgcacggacggccgcctcgaacgcatcgcagtagtagtcataggccacgcccgtgtcgaacgttgctatctggcggcgtatgagcaggtcgatctccgagagcgagaacgtctgcttcagggtgcagatgaccacgaggtaggccacgtgggcgcgcgtgtacttcttgccggtggcggccgccagcacgccctgcttcacgtagttgttcaccatcgagcgcgtgatgatcttctcgtcgggctggtagaggggcgcgagcgtctcctcgaggaagcccacgagctggtccatgtacaggtcgatgcgggggatctccccgtagcggggcaagtgcagctcgaggagccgctgggcgtagggcgttgcgctgacgtctttcatgggccgtgccttccggttcgtgcgcttttgcgtgccgtatcgagggagcatagcaagaaagggtttctgcgtcaattattacaacttgttgacatggtgacgttaagcacgtaatctagtttttaatacaagatagagaagcacccgatcgaaagcaggcccccatggaatcctcacgcatcgcgctcgtcgtcgactcgtgcacggacgttccccccgaggatatcgagcgcttcggcatgtacgtggtgccgctgcaagtgaactaccgggacgagacgttcctggacaaggtcaccatcacgccccagcaggtgtacgaccgctttgccgaggaagtgcccaccacgtccacgcccacgccggccgtggcgcgcgaggtgctggagcgcgtggtggccgacggttacgagcaggccgtcgtcgtcaccatttcgagcgggctctcggccacttacgacctcatgcgctcggtggcgtcgggggtggccgggctggagtgcgccatcgtggacacgcgcagcatcggcatgggtgccgggctcgtggcgctggcggtggcgcgcatgctggcggacggggcgtcgcttgccgacgtgcggcgcgagagcgagcgcatcgtgcgcgacacgaaggtgttcttctgcgtcgatacgttggagtacctgcacaagggcgggcgcatcggcaacgtgacgtacgccgtgggcagcatgctggacatgcggccggtcatcacctgcaacgagcagggcgtgtacgtgaccgtgtcgaaggcaaagggccgccgccagtcgctcaagaaggccatggcgtgcgccgagaagttcgcgtcccggttcccgcgctgcacgatggccgtggtgaacggcgatgccgcaaaggaggccgccgccgtgcgcgccgagctgggagagcgcgtcgggcatgcggacgcctggtacgagggccagatcagccccgtgctcgtggtgcataccggacccggcctcatcggcatcggcgtctgcggggcgtagcccctcggctcccgtcacgccaacggcagcaggacctccacggcgaagccgcgtccgggctcgcccttgaggacgagcgagccgccgtgggcgcgggcgatgcggtccaccagcacgagccccaggccgtgctcctcgccgtaggagcccgcggcgctgcgggacgtgcgggcgcgggccaggcgcgcctcgagcgcggcaagctcctcgggcgaggcgcccgcgccgtcgtcggccacgcggatcgcggcgaagccccccgttgcgcccctgccggcttccggagcctgcgcgccttcgcgcaccgcgagccggacggccacgttgcagccgctctcgttatgcaggcgcgcgttggcgatggcgttctccacggcgcgcgtgatcaggcgctcgtcgcccagcaccacggcctcggcggcgtcctcgtccacgtcgaggccgatggggtgcagctcgtcgagccctgcgttcatatgccccgccaccaccgtgcgcagaaggcgcggcaggccgatgcgctcgagcttgagcggctgcatgtcgtagtccagctgggaggcggtgttgaggtcggtgaccaggtccttgatcttgagcccctgcgcgcggatgagggccgcctgggcgcgcgcgtcctccggcacccgcccgtcggccgccagcgcgtccgcgtaccccaggatcatcgacagcggcgtgcggatgtcgtgcgacacgccccgtatccagttcgcgcgcgcggcgtccttctgctcgatgatgcccgatgcctcggtgatctggccgccgatctcgcgcaggtcgcccttcaggcggagctcggcggcgcggccctcggacagcgcgtcgagcgcgtcggcgatggggccgaccgccctctgcgtgcgccgccgcgacaccgcgtacaccgtgaagagtattcccaggtccacggcgaacacgagcagcaggtagaacggaaccatgcgcacggtggatgcggggaacgtgaggcccatgtgccagtacgtgcccttcgggaagcccaccgcgagcaatccgtcgtcgcggttccagaagaacgccgggtagtcggcgatgttggcgtagtgcgcggccatggccagctcgttgggcgtgaacgacgccggcacgtcgtcgggcgcgccgtgcgaccaggccaccgccccctcgccgtccacgaggacggcccaggcgccgtgggcgtcgagctccgcggcccccgcctcgccgagcgtccagccctcctcgccgagcgcgagcgcgccgtccacggcgcgtatcaccagggcgggcgtgccgtcgtcgaagttctcgttcgactcgtggaaggcgatgaccgtgtacaggaagaagtccaccaccacgatgaggaaggcgagcgcggtgaacagcaaaagctgcttcgtgaagaaccgcgcgaggctgggcatgcgcttcccgcgcctccgacgcgccgtgccggccatgctcatccccgcttcacgagcttgtagccgagcccccgcgccgtgacgagcgaggcgggcttcgacgggttggcctcgatcttctcgcgcaggcggcggatgtgcgccatgagcgagttctcgtagccgaacgacgtgccccagcacgcctcgcacaaggcgtcgatggtgacgatgcgcccggcgttgcgcgcgagcacgctcaatatctcgtgctccttggcggtgagcagcaccgtctctccatcggcgcgctccacctcggccgtggcgaagttcacgcggcaggcgtccagctcgagcgtcgggctctcttcggcgtagcagcgccgcagcaccgcggcgatgcgcagcacgagctcctgggggaggaatggcttggcgaggtagtcgtcggcgcccagggccaggccgctcacgcggtcgaagggctcgtccttcgccgtaaggaacaccgcgggcacgcgggcgcacgcgggccgctcgcgcacgcgggcgagcaggtcgaagccgtccatgccgggcatcatcacgtcgagcacgagcagttggtaggcgcgctcgggcgaggccgcgcggctgtcgatggcggcgagcgcctcggcccctgcatgcacgacgtccacacaggcgaaccccgcgccgtgcaggatggccgccaccatgtcggccagctcgcgctcgtcgtccaccaccaggatgcgcttgccgcgcagatgctcgtccaccataccgaatccgcccgatgccatctggcctcccttctctcacgttcgcattatggcacatccgccccgcgcccgggcggccgcgcgcggggcgtaaggcaggcgcaaggttgcgtaagggaaacgcaaggaaggggaaggggaagcgtaaggccgcccgcgtaagcttgtctgcggaaccgatcgagagaaggagacaacatggcggcacaacatgcagggcagccgatgcaaaccgtggtcgaggtgcgcaacgtgggcaagcgctacggtatcgaggggcgcaagcgcgacgggagcgtgacgcaggcgctcgaccacgtgagcttcgcggtggcggcaggcgagttcaccggcatcatggggccgagcgggtcgggcaagtccacgctgctcaactgcctggccaccatcgatgcgcccacaagcggcagtatccatatcggcgggcgtgacgtggggtcgctcgcaggcaaggagctggcgcggttcaggcgcgaggagctgggcttcatcttccaggactcgaacctgctcgacacgctcacggcgtacgagaacatcgcgctcgcgctcaccatccggaaaacccctgcgcgcgagatcgatgcgcgcgtgcaggaggcggcgagcacgctcggcatctccgacgtgctgcagaagcatccctaccagatgtccggcggccagaagcagcgcgttgccgctgcgcgtgccacggtgggtcgcccgcgcctcgtgctggccgacgagcccaccggcgcgctcgactcgaagtcggccaagcagcttctcgagtcgctcgcgtacctgaacagccgcgggtccaccatcctcatggtcacgcacgactcgttctcggccagctactgcaaccgcatcatcttcatcaaggacggcggcctgtacggcgagctgcgccgatcgggcgccgaccgcggggtgttctaccgcaagatcgtggagatggtgtcccatatgggcggcgcgggcgaggacgcgcctgccgagggcgaggtggcacgccatgcaagctaagctcgcgctcggcaacgtgcgcaagtccctcgcggacttcggcgtgtacttcctcacggtcatgctgggcgtggccgtgttctacgcgttcaactccatgacggcccaacagggcgtgcttgcgttctccgagacgcaggacaagatgttcgagcttctgggcatggtgatcggcggggtgtcggtgttcatcgcgttcgtgctcgtgttcttggtggtgtacgcgaacggcttcctcatcaagcggcgcaagcgcgagttcggggtgtacctgacgctgggtatgagctcgggcgacgtggtgaggatcgtggcgcttgaatcgctcatcgtgggcgccgcgtcgctcgcggtgggccttgcggtgggcgtggggctctcgcagcttctgctgcagctcacaagcgcgctgttcaaggccgacgtggccgctgccggtgggttcgcgttcgtgttctcggccgacgcgctggtgaagaccgccgtcgtgttcgcggctatcttcctggtggccgcccttttgaacgcgcgcacggtggcgcgggcgaagctcatcgacctgctccatgcaggcagcaggaacgaggagatgaggcttaagagcctgccgctgtcgctcgtgctgttcgcggtgtcgctcgtgctgatcggcgtatcgtacaagctgctcatcgacaacgggctcatggagccttcgccggaattcgtcgcggccacggtgctcgtgtgcgtgggcacggtgctgttcttctacgcgctgtcgggctttttgctgaagctcgtgcagatgatcaagccgctgtacctgcgcgggctcaacatgttcacgctgcggcagctgggcgccaaggtgaacaccacgttcgcgtcgctgtcggtggtgtgcatcgtgttgttcctggccatcaccagcgtgtgcggcggcatcggcatccgcaacgccatcgacggctcgctggacaggagcaccgactacagcgccagcgtgtccacgtcgttcggctcctacaacgccgaggcgggtttccagccggcggacctgggggcgttcggcgagttcgccgagcggcagggctacgacatggccgccggcctgcgcgcgagcgcagccgcggtgggggcgggcgacttcgacgcggtcgtgtccggcacggcgcaggtggacctcatggtcgacccgtccgacggcctggtgatggacgacgtggagcgcgcgagcggcctggtgctggccgattacgcgggcgcttccatcaacagcggctacggcgtgtaccccgtgtacgtggcggcgctgtcacaggtgaacgatgcgcttgcgctggcgggcaagcccgcgctcgagctgggcgcgggggagtgcgcgatctacagcgactccgacatcacgagcgggttctaccgcgatgcggtggatcgcggcaccacgctgccggtgggcggacgcgatatgcgcgtggtcgagtttcgggatgattgcctgcagaccacgccgttccccatgaacaccggcacgctcgtggtgcccgacgaggcggtgcccgaggacgcgcgcatcctgcagtccatcctcgacgtgcagtgcgcaagcgatgcggacgaggcggcgttcggcgagatgatggacgccgtggcggataccgacaaccccgacacctggcccgtcacgctttccatgacgcgcgccgacgtgttcgaccagagcatcagcctgtctaccatcgtggcatatctggccatctacctgggcttcgtcctggtcatcgcctgtgcggcaatactcgccatccagcagctctccgacgcgtccgacaacgcgcagcgttacggcctgtgcgccaagctaggcgcccccgagcgcatgatcgacggcgcgctgttcgtgcaggtgctcgtgtacttcctgttcccgctgctgctggccgtggcgcattccgcgtgcgcgctcgtggtggtcaccgacgtcgtggccgtgttcgggcacctcgacatcacctcgatggcgctcgcctgcgccggcgcgttcctcgcggtgtacggcgtgtacttcgccgtgacgtacctcggcgcccgcaagctcgcccgcgagtaaggacgaagacgcccccgcaggttcgacctgcggaccctgctagcagccgcttgcatgtcctccccttatcagccggccgggtacgtgcgtgtcgtgcgagctgtccggcgcatcgggcgaacctccaaggttgccctgatgcgccggacggcgtccatcgcgcgcgtgctttcggccggccgacagaggggccgaggcacgcgcgagcgatcttcctctttcctacatctgccggccgagcgcgaacgcgtgcgagaacaggctgccattgtcggtcggcacgagcaccaggttgtcgctctccaggacgtacgtgggcaggacgcgcaccatggtcagctgcaccgtgccgcccggcgcgatgacgacgtgctgggggttgtcggagggcagggtgtcgcccgaagcctcgaagtccagatcgtaacccgtccgcaccacgtcgagcgtcccgtcgtcgttgcgcagggcgaactcgtagagcacgctcgtccagacgggcacggccgtatcgccaaggttgcgcaccgttaccgtcgtcgacgcgtagcggtaatcgttgctcgtcaaggtgccgtcgtcgttgtagccgtagccccacacctcgcgcgagcacttgtccaggtagcgcgcgtttccgagccagccgccgatcacgaagaggcagtcgccgagcgtcttcccgcccggcagggtgtcggagagcgagagggaaggagagctcatggccagttgggcggtcagccgttgcgggctctcggcattcgtgtaggagtagtcggggttctcgtaaccgaagtcgaacgggatctcgccatcggccgccgtgagcgcgttctcgggcagcgtcgcgtcgacgtgcgcgccgtccacctcgacggttgcccgccacgtgtcgtcctgccgctcgatgatcgaggcgggcagcacctcgtcggcgcggtcgttcgcgtcgtccagcgggaaggggaacggcccgtttccggcttccaccacggtgccgtagagcgacttcgccgacgtgctcgcctcggcatcgtccgcagcgaggcggggggtcaggcggggggcgccgtcaaccatctcggtctcgaagttggcgacgtgcagctcgatggcctgcgtggaggtgctgccgtcctcgaacgtcacggtgacggtgagcgtctgcccgtcgaacaggtcgatgacgggggactgcgagtcgttgaagacatcctcgggaacctcgccttcgttcgtccagaggccgaagctcgtcgtgccgtcggcgatgccggggtcgtcgtccgcggagacgtcgatggtggcgcccatgagcttcgcgaggctaagcttgctctcgccgtcgcgcatggcgctgcccacgaagtcgtagccgccgtagtactcgccggtgccgcgcgacgtgggcttccagcttgcaagctcgcccatgcgcgggtcgtcggggtcggtcggcccgtcctcgaacgtcacgcggtacagcgccccgcccgtgagatgcgcctgcacgcggacgataccctcgccctccacgtggaagaggcagcccgagaagaagccgcttaccttgtaatcgtcgcctccccggaatcggtagcccaggtcgcggtcgaacgccacggtgccgccctccccgggtgcgagcggcgcgctgccgtcgctcgcataggcgcgcaccgagaagccgcagcgtgcggcggcctcgtcgagcgtgatggcaggggagccggagagcgacgaggtgagggcggggatgccggccaccgcgagcgcgccggcgacgaggcaggcggctgcggccggcgcccagcggcgggcgagggatgcggcgccgacggagaagccggcggtgcgcgacgtgggccgggggcggcgccgggccgggcgcttcgcgggtgcggctcccttcgcgggcgcctggctcccggcgtgctgtgccgtgccctcctgcagggcgttgcagacggcgcgctgcttgagctcgggggaggcttcgacaggggactgcgacgcggcgtagcgcgtgcggaactcgttctcgttcatgggcgtgctcctaggtcgatcttgagggccttgcgtgcgcggtggaggtgggagcggacggtggcggggcgctcgccggtgatacgggcgatctcgtcggttgcgtacccctcgtaatagtgcaggtgcacggcggtgcgctggcggtcgctcaggcgggcgagggcggcctccagctcgtcgtcccggcccgcggcgccctccggggcgttcgggccgggacggtcggcgaggcgtgccacgtcatcgtcgccgagggcggcgcgcttccggtgccaggggctgcggtgcaggtcgttgcagcagttgacggtcacgtgcagaagccaggccttcaggtgctcgtcgtcgcagaagcgcttgccgccttgatgcaggcgcaggaacacggtctggaacacgtcctcggcatcggcgcggttgcccgtgcggctcgccgccaggcgcaggaccgtgtcgccccagcgcccgaccgcgtcctcgaggaacgccgccgcctcgcgcgcctgcgcgacgcttgcctcggcggctgcgtcgggggcgtcgccgcggaaggcgttgcgcgcatcgccgccgcctgccgcccgggacgcgccggcgctggaagcgccgtcgagcgggggacgtgccgcgtccggccgcccccgccctgcggcgccgaagcccgcgggcagcgccatctcgcctgattcttccatatcccatctcctttcccctagaacacggggaaggaaccgtcatttgttgcgctctgcccgaaaaaagacgggcggtttcgatcgcccgtcgaaaccgcccgttgggcgctcgcgccctcgcttgccgccctctttgccttaccgcaggctggcacccagctcgcgggcatcgtcgagggcggggttgccggcgatgtcgcctacgcggtacacgccgcctgccagcacgcgacccaggtcgcgccaacccatgcgctcgcagagcacctcgtagtaggagacgacgggggcgaagttgcgttccgtgtcctcctcggcgggcatgagcagcacgcagcccttgccgcccgcctcggctgcggccgcctccgcggcgcgcatgccggcctccatgagcgcgaacaggcggtcgagcacggccttctcctgcgcggtgacgctccagcagtacataggcgacgccagcaccaccacgtcggccgcgcggtaggcggcgtatacggcgtccatgtcgtccttctgcacgcaggggctgtccgcatcggcgccgccgcccaagcagccccggcacggcgcgatgtccatgagcgccacgtcgaatcgcacgacgtcgtggcccgcctgggcggccccttccgcgaacgcgtcgacgagcgccgccgtattgccgttcctcctcgggctcccgttcagcaccagcacgttcttccccatggtcctccgccttccctcgtctgcctggccgcatccgctttgccttgccgcgcacgccgcgccgttcccgtcagccgtgcgcggcttccgtcgcagccgattgtaccgcgcccaccgcggccccgctgcgacggttttcaaatcgcgtccctgcttcccgcccacgcgctcgttcgcgcgggcgccgccctttcgccgcccgccgggcgggggagggagtatactgctgtagcaggctaaagcggctcggctcccacgcaacgacggcgcggctcccctgcgcgacggcagccctcggcctcaccttatacaagagaaggagaagaaccatgcgctacgtccactgcttgaacaacatttcctcgcacggaaccgacctgctcaccgattcctacgagctcaccgacgaccctgcgagggcatcggccatcctcgtgcgcagcgccgccatgcacgacatggcgttcggcgacggtctcctggccatcgcgcgcgcgggggcgggcgtgaacaacatccccacggatcgttgcgccgaggagggcatcgtcgtgttcaacacgccgggcgccaacgccaacgccgtgaaggagatcgtgctgtgcgcgcttctgctgggaagccgcggcatcgtggacggcatcgcatggtgccgcgacaacgccgacgacccgaacatcgccaaggcggcggagaaggcgaagaagcagttcgccggctgcgagatcaagggcaagaagctgggcgtcatcggtctgggcgccatcggcgccgaggtggcgaacgcggctgtggcgctgggcatggacgtgtacggctacgacccgtacgtctcggtgggcgccgcatggcgcatctcgagcgccgtccaccacgtcacgaacctggacgacctcttccgcacctgcgactacctcaccatccacgtgccggccatggagggcaccatcggcatggtgggcgggcgcgcctgctcgctcatgaaggacggcgccgtggtgctgaacttctcgcgcgacacgctcgtggacaacgccgccatggcctcggcgctggcgtcgggcaaggtgggcgcctacatcaccgacttcgccacgcccgaggtcatgaagatggagcacgcgatcgtgctgccccacctgggcgcgtcgaccgccgaggccgaggacaactgcgccgccatggccgtgcaggagatgatggactaccttgagaacggcaacatcaagaactcggtgaacttccccgcgtgcgacatgggcgcgtgccctgccggcatgagccgcgcggccgtcatgcacgagaacatccccagcatgatcagccgcatcaccgatgtgttcggcgaggagggcgtgaacatcgagaacatgacgaacaagtcccgcggcgacgccgcctacacgatgctcgacctcgaccagcccgtgcccgccaccgccgtggagaagctggaggccctcgagggcgtccgccgcgtgcgcgtggtgtgttaaagggaggttccgagccgcgccgcatgtccgaggggcatgcggcgcggcggcagcagggccggcccgttctcgggttcggccctcctccccgcaggcggggagggaagatgctcgcaaaacgaaaaaagccagccggttctgccggctggcttttaggttctcaatggtggaccgtcggggactcgcgtattcgcttcgcgaatccgcacccctcggcatcgcagatgcctcgggcgttttcctaagaacagcccaccgggctgttctcttaacggaaaaccacctcatcggttcgagtcaccgttccccaaaaatgcaacaaccccgcataagcggggttgatttgatttcaatggtggaccgtcggggactcgaaccccggaccttgggattaagagtcccctgctctaccaactaagctaacggtccaaagaaaaaactatgtcaaagtgctcaaagcgctgggctatcttaaagcatgcgtccagcgattgcaagccctaatttcaaaaagcgcgctggggtggctaatcggactcgaaccgacgacctccagagccacaatctggcgttctagccaactgaactatagccaccaaggcgcaaggtggaagtatacggattttctcccctgagtgcaagaggattatggacaaattgtatcagacttgctgcaatcgggctctgatcggcccgtttagagtagtatagttgcctgaaacgccgtgttttccgccggttggaacagcttcgggctgccgaccgcttccggccacggcgcaaaagccggcgtcgcgcgcctgggcgcgcccgccaccatccctttcaccgaggagcggcaccacgtggaaaagcaatcatctgaaaagcgcttcgcgctcttgatcgacgccgacaacgtgtcggcgaagtatataaagcccatcaccgacgagctgtcgaagtacggcaccgtcacctacaagcgcatctacggcgactggacgctcacgctccacgccaaatggaaggacgcgctgctggagaactccatcacgcccatccagcagttcggctacacgcagggcaagaacgccaccgactcggccatgatcatcgacgccatggacatcctgtacacgcgctcggtggagggcttctgcatcgtgtcgagcgacagcgatttcacgcgtctggccagccgcatccgcgagagcggcctcacggtcatcggcatgggcgagaagaagacgcccacgccgttccgcaaggcgtgcgacatcttcaccacgttggagcttctgctgggcgacgcgggtgggaaggcgtccggccgcggcaagggccggggcgaccaggccggcgcgaacgccgccggcgcgggcgcgggcacggccaccgcgagcaaggaggagatcgagcaggccgtggtgaacatcatcacggacaaccagaacaacgggaagtccaccggcctcggcgaggtgggcagccgcctgctgaagcgctacccggacttcgacgtgcgcagctacggcacgaacctgctgtcgaagctgctcgacgagttcccgagcgtgcagatcacgaaggacggcagctcggtgacggtggagcttgcgggcgacgatcgcgagcgtcggggcggccgcggcaaggacgccccgcacggcgcggaggcgccggcctcagaggcgtccgacgcgcaggccgagcaggagccgaaggggcctgccggcgccgagggcgcagtcgacgcgcaggcggagcccgtcccggccgagggcgctgacgagccggtgcggcagccggctgcgaacgggggcggggagggcgcttccgcgaagaagccccgtcgctccacgcgcccggcctcgcaccgcggcgggaagggcgacgccccgaaggcggctgccaaggacgccgtcgaggcgaagagcgccgaagcccccgccccggaggttccggcggaggagccgcaggctgcttcgcgcgccgaacagcccgagcctgtcgaagaaccccccgtggacaaccgtccgggccgagccgcccgcttgcgggccgccgccgcatgggcgaacgccatgggcgggcgcaaggctgcggccaaggcgaagccggccgcgcgcaaggagccggaggcggaggcgcaggacgccccggccgccccgcaggccgaggaacccgcaggggtgcggcaggggcaggcgcccgcagcgccgaagccgaagtcccgccgcaagccggccgccaaggccgctgcggccccgcagcccgtcgagcagggcgaggccccggcacaagccgccgaggcgcccgcgaaggccccggcgagggcttccgcgaaggcggcgccgaagcccacggcgaagcgcgcgaaggcggccggcccggccgaggcggcgcgtcccgccgagaaggccgcgaaggccggcaaggcccccaagtcacccaaggccgcgcaagcacccgaggctcccgcgcaggacgcccacgccgcaggcgggcccgaggagtacatccgccagacgctggccgaggccggccccgacggcgtggcgctcgccacgctcggcaagcgcgtgcgcggcaggttccgcacgttcaagctgcgcgacctgggctatgcccagttccgcccgtacctcgccgacctcgagggcgttgacgtcgagcagcgcgacggccagttctacgcccgcctggcccgctaaggcgggctgcggaccagcgaggccggcccgcccttcggcagcgggccggcctcgcgccccttttcaaccgctcgttgacggaggacgggtgcccgtgcgtccgtggtatcctgccccttgatcctgtttccatcgagaaggaaccttgccatgaagaagattctcgcgatcgtggcggccgtggcgctcgtcgccgtgggcgtcgtgggcacgctcgcgttccagcgcgccttcgagcccagcgtcaagctcaccgccacgtccatccaggagcagctcacgaactccagcgagctggccacggccaagctggagtaccgcggcctcgtgcgctatgagaacggcgacatcgacttcatcaacaagaagggcttcaccatggtctacgacgccgaggtgcgcgccggcgtggacctgtcgcaggcctccgtggacgtgagcggccgcaccgtcaccgtgcgcctaccgcaggcccgtcttctgggcatcgagatagacccgcactccatcgagttctacgactccgcgttcgcgctgttcaactgggagaacaagcaggacaccgccgaggctctcaaagcggcccaggccgacgccgagggcaaggtcgaccagaccggcatgatcgagcaggcgaacgagcaggcccgcaccctcgtggagaacctgctgcacccgttcaccgtgggagagggcgcctacacgctgcagatcgtggacgcgtaagaggggcgcaaactgcgccccatacggaaacggcgcggcggcccggtggaccgtcgcgccgtttccgtatgggaaggggcttgccccgccccgccctacgccagctcgttctcgtcgaacgcgtcgcggcccaggcggaagctgcggccctcgaggcgccgctggcggtactccgccgcggcggtgaacagcacgtcggacgaggagttcagggccgtctcgcacgagtcctgaaccacgccgatgatgaagccgatggccaccacctgcagggacacgtcgccgtctatgccgaatagcgagcaggccaggggtatgagcagaagcgatccgccggccacgcccgacgcgccgcaggcggaggcggcggccagcgcgcttagcaccacggcggcgagcgggttcacggcgatgtcgagcgtgtgggcggccgccatggccatgaccgtgatggtcacggccgcgcccgccatgttgatggtggctcccagcgggatggaaaccgagtagttgtccttgtcgaggccgagcttccggcagagctccatgttcaccgggatgttcgccgccgagctgcgcgtgaagaacgccgtgacgccgctgtccttcaggcaccgcagcacgagggggtaggggttcgcgcgcacgcaggcgaacacgatgagcgggttcgcaacgagggcgatgaacaccatgcagcccacgagcacgagcaggagccgcccgtactcggcgaagatgtccagcccgttctgcgacacggtggtgtacacgagccccagcacgccgaacggggcgagcgcgatcacccagcgcaccacggtggacacggcgtccgacacgcttgcgaacacgtccttcaccgtgcccgacgccgtgcgcagcgcgatgcccagcacgacggcccatacgaggatgcccaggtagttcgcgttcgccagcgcgtccacggggttcgccaccatgttcgaggcgagcgtgcccagcacctcgccgatacccgagggcgtgccctgggcctccgccggggccgccagcgtcagatcggtggggaacaggtagctcgcccccacggccacgagcgccgccgcgaacgtgctcaccaggtagagcaccacgaccgtccgcatggaccccgccgccttcgcgttggccagcgcgcttgtcacgaggaagaacacgagcaccggcgccacggccttcagggccgacacgaacagcgtgcccagaagccccacggcctctgcgctcggaaacgcgatgcccagcgccgtgcccacggcgagtcccgccacgatgcgcttgataaggctgatatcgttgtatttgcgcgcaagcgccttgaagtccacgtctgctccttgccttcgttccctacggttcgggcgcctatgatagcagaccgcgcaacctggccgcgcgccgccaagttctgctatcatgttcgctgcgcgaaaagggcgcacgtgcgggcgtggcggaattggcagacgcgccagatttaggttctggtaccgaaaggtgtgaaggttcgagtcctttcgcccgcaccaagcaaattttctgaatctaagcttctcctaaagaaaaaaacagctttccgcatctaaggcagagctaacctttggcgatatctagggtatatttattaattagcttttcgacttgattagatgagaccgcctgaattgatctttttggtaacattctgcggactctcattatggattgtggcgaaacattacactcgtcagataaataagcggtcctacggtatttaacacctttgttatccagcatttgcacgaaaagacgtctatcagtttttccctctttatcgagcatggataaaggaatattgtattgtactcgttcgccattgccatcgttaatccatttatatttcgcctttacatctaaaggcgtaatacttaatgagctttttgaaataaaacaaacataaagccttattttcgacaagctaacctttcctttactttctactaaaattgagcagtactttatcatatttgtgtcccaaaaaggccctgtactttctatcgatactctgggtatgacattgcttggagcgagatcgttgctgatgaaaatccttttgattttgttgcgaaagacatagccgaaaactgttaagagtgtggcaacagctaaagccgcaagcatatttgctagcacattggataagaattcttccacagcaaaacccccgacagtagagtaatcgttcttgtttacttcagtataaaatatgtttgccgcagctgcgcaaaatgcgcgtcctcgcccgattctcgcctcggccggggcgcgttgcgctaaactggtcgcggatacgaggggggagtacgccatgcgcatgcagccacgaccggaaaaactcacgaccgaggagctcgggcagatcgccggcctggacgcggccaagctcgatatgctggccgcctgggcgaacaagaagctcacctgcgcgcactgcaagcgctgcacgctgcgctgcgaggtgctgaaggagccggacctggacatgggccaggtggaggagggctacggcgccatagcggcgctgccgttcgacgaccagcccgccgccgtgctgcagctcgtgcaggaccgccccgagctctaccacgcgctgcgccgctgctgcttctgcggcttctgcacggccacgtgccagacccatgtgcttgcgcccgagcgcatgcgcgactggcgcgtgctgttcatgcgcgccgggctcatgccgcccgacgactccaagctcgtgatggtggacaacgagtggaacatcttcagcgcctaccgtgccgtctacggcatcggctacccggagctcgcctcgctcgagcaggcggccgagcacgggccgggcctggcggacacgctgttcttccccggctgctcgttggtgagctacgcgcccgagctcacgcgcacggtggggaggtggctcaccgacaacggcgtggcctgggcgctctccaccgactgctgcggaagcccgctcatgagcgccgggctgttcgaccgcgccgccgcgctgcgccagcgcatcctcgaccagatacgcgcggcgggcatcgtgcgcgtggtcacggtgtgccccggctgcggggaggagttcgtggagctcatgggcgacgaggtggacatcgtccccttgccggagctcctgctgcagaagagccgcgccgccgagcgcgccggccgccccacgggcttcgcgccgcttcccgagcgaagcgtcacgttcttcgactcgtgccacgaccgcttcgacggccgccacggcgccgccatccgcgcgctcgtggcgcgcaacctgcccgggacggcccgcctggagatggaccaccgccgcaagggcacgctctgctgcggggcgggcggcgccgtggcggcctacgacggcgacgtcacggagcgccgcgtgtggcgcatcatcgacgaggcgcgcgcgaccggcgccgagacactcgtcaccacgtgccccacctgcacctacacggtggcgcaggcctgcctcggcgcgccgcccgagcgcggcatcggcaaccgccactacctggagctgctgttcggccagaccatcgactggccgcaggtgttcgcccagctgggcggcatgtgggaaggcgagtacggcccctggctcacccagacgttcttcgcctaggagggcgccgcccgatgcgcggcccggccgtcgggaaggccgccgcggcccttacgccaggaagcgtcccagcaaaaagccggccaccacgcagagcgcggcgaacagggccgacaggccgatgagccgcgcgtcgcgcttctcgcggcggacgcgctcgcgctcggcacggttgcgctcgaggaagaaggagtacccgtccgaggtgatgaccacgatggtgccgcgcttgccctcggccttcgcggccagcgccccggcatcgatgagctcggcctgcagctcgtcgtcggggcggtaggggaaggcgcagcggtacacgagctcgccctcgacgctgcacgtcgagcgctcgtagtctatgagccgcgccagctcgcgctcctgcggtatgttcaaggagatggccacgcgcacctctcgatcggtttcatgatgatggtttccatgatagcgggtcgcggcgggcgggggatgtggaaaatcgccggagatcaggaaacgtcccggtacccggaggctccggacgggcagcgcggcgcctcgcgcccgcgtaccgcacctctttcgtcggttcttcgtgaacctgcttcctcaaccctaccatatgtgcgataattccgtttcggtgtgccagagtgcgactcggacgtcttgcgaggccgacgcggatgcgcgccgctagggggcagccgccgagagcaccgcgcacgctgccgcgaggcgatttatcggaaatgatggaggatagttacgtggagacaaaagttgaggcattgcaggataaccgcgtcaaggtgaccgttaccgtcgatgccaaggatatcgacgcgcgcatcaagaagacctacaaggacttcgcgcacaagtacaacttccccgggttccgcgccggcaaggcgccgcgcccgatcatcgacaacgcgctgggcgccgaggcggttcccgccacggtgacggacgacgtggtgaacgagacctatcccctcgccatcgacgaatgcaacctgtaccccgtgtcgaagccgacgttcgccgaggacatgggcctcgtggcggccggcaagccgttcgagtactcgctcgaggtggaggtcaggccggagctggagctctccagctacgagccggtggagatcgacatgcccgccgagggcgcgagcgacgccgaggtcgacgaccagatcgaccagctccgcgagcactactacgactacgaggacgccgccgcggccacgaaggtcaaggaggacagctacctcgacctgggcatgaaggccaccgacgacgccggcgaggacatcgcctccctgacatctcccacgcgcctctacggcctgggcaccggcctgttcccggccgcgttcgacgccgagctcgtgggcatgaagaagggccagaagaaggagttctccatcgacgtgccggccgagccgaccgtcatgacgcagcccctcatgggcaagacgtccaagatcaacttcgaggtggaggtgcaggccgtcaagaacaaggtgctgcccgaggtcacggacgagtgggtcaaggacacgctcggcttcgagaacgtggccgacctgcgcacccgcgtggccgactccatcctggagcagaaggaagaggtgctgccccgcatcaaggagaaccagtgcctctccaagctggccgaccgcctgcagggcgacgtgccggaggccatgtgcgaggaggccgagacgagcctgctgcaggacttcttccagcagctgcagcgccagggcgtgagcttcgacgcctacctgaagcagcagggcatcacgcccgaccgcttcaaggaggacgtgaaggcgcaggccgccgacatgaccaagcaggacctcgcgctcgacgcgtgggcgcgccactacaacatggaggtcaccgacgaggatgtggccgaggagttcgtgaagagcggcgtggaggatccgaagaagctccaggaggagtggcgccgaaacggccagctccacatggtgaagaacggtatcgcccgcacgagggccgccgaggacgtcatggagaaggccgtcgtgaccatcgtcgagccgggagcggccgccgacaagaaggacgagaagaagaccgccaagaaggccgcggccaagaagaccgccaagaaggacgaggccaaggccgaggctaccgagaagaagccggccgccaagaaggccgccccgaagaaggccaagaaggacgaggccgccgacgccgagaaggccgcggacgccgaatagcgccgcaggcggcccttcggacgcgccctcccgggggcgcgtccgctcgtctcgccgagggtaacgaaacggtagcctggccttgcgtggcggcgaaacgtacatcactatggcattagacgattccgtgcggtcccgccggggccgcgagcgaaagcgaggcaacaagctatgagctacgataccaaggcagcactgatcccctacgtcatcgagcagtccccgcgcggcgagcgcagctacgacatctactcccgcctgctgaacgaccgcgtgatcttcctgggcgagcagatcgacgacaacgtggcgaactccgtggtggcgcagctgctgcacctggagagcgccgaccccgagaaggacatctccctctacatcaactcgccgggcggctccgtcacggcgggcctggccatcctggacaccatggacttcatcaagtgcgacgtgtccaccatctgcctgggcgagtgcgcctccatggccgccgtgctgctgtccaacggcgccaagggcaagcggatgtgcctgccgaactccatggtgctcatccaccagccgtccggcggcgctcagggccagcagaccgagatcgccatcgtggccgacttcatgctgaagacccgcaaccgcttgaacaagatactcgcggacaacacgggccagacgctcgagaccatccaggccgacaccgagcgcgacaactacatgaccgccgaggaggcgctggcctacggcctggtggaccgcatcaccacgtcgcgcgccgccgccgcggacaccgaagagaagaagagcgaataacctgctatgacgaacgagagacacgaggaattcgccggccgggacgacatcgcgtgcgccttctgcgggaagcacccgcacgaggtggccgcgatgatctcgggccccaacggcatctacatctgcgacgagtgcatctccgtgtgcgccgacgccatgatgcgcgatctggggctctccgtgccgcccgaggcggacgtgccgatggagcccgagccgcagggccgccacgccaagcgcgcgggcgagccgtacgtggccgaggccgagccggcacccgaggacgtgctggccgacctgcccacgccccacgagctgtacgcggagctctccgagcacgtggtggggcaggaggcggccaagcgggcgctgtccgtggccgtgtacaaccactacaagcgcatcagcctgggggccgacgcggccgagggcgacgtggagctggccaagagcaacatcatgctcttgggccccacgggctccggcaagacgctcttggcgcagacgctcgcccgcacgttgaaggtgccgttcgccatcgcggacgccaccacgctcaccgaggccggctacgtgggcgaggacgtggagaacatcctgctcaagctcatgacggcggccgacttcgacatcccgcgcgctgagataggcatcatctacatcgacgagatcgacaaggtggcccgcaaggccgagaacctgtccatcacgcgcgacgtgtccggcgagggcgtgcagcaggcgctcctgaagatcgtggagggcacggaggcgagcgtcccgccgcagggcggccgcaagcatccccagcaggagctcatccatatcgacaccacgaacatcctgttcatcctgggcggcgcgttcgtgggcctggccgacatcatcgccgaccgcgtgggcaagaaggggctcggcttcaacgccgacatgcccgagtccaagaagcacgccgaggccgagctgctggcccaggtgctgccggaggatctgaacaagtacggcatgatccccgagttcgtgggccgtatccccgtggtgacgtcgcttaacgagctgtcggaggaagacctcgtgcgcatcctcaccgagccgaggaacgccctggtgaagcagtacacgaagatgttcgacttcgaggattccacgctcgtgttcgagccggaggccctcaccgccatcgcgcacgaggccgtcgagcacggcacgggcgcccgcgggctgcgctccatctgcgagcgggtgctcatggacgtgatgtacgacctccccgagcacgagggcgccaccgccgtcaccgtgcgcgcgagcgacatcacgggtgagacgaagccggagatcgagccggcgggcggggccgaggccctgccgatgggcgacgaggtgagcctgcagagcgcatagcgcggtcgcgggatacgggagacgagcgggcggatcgcggatgtgcggcgcgcccgcttttcggtttgagagactttgaggacgaaagagcagaccatggccgataacacgaacgagaaatccggggcgaggaagatcgactacgacttcgcagcccacgagcgcccccttttcgaggcatggaaggatgccggctacttccagcgcggcgagggattcggcgcgaagaaggggcagccctacaccatcgtcatcccgccgccgaacatcacgggcgtgctgcacatgggccatgccctgaacgacaccatccaggacacgtgcatccgccgcgcccgcatgcagggccggcccgcgcgctggatcctcggcaccgaccacgccggcatctccacgcagacgaaggtggacaagaagctggccgaccagggcatcagccgtctggagataggccgcgaggcgttcgtcgaggcgtgctacgactggtacaaggagtacggcaccaccatcgtgaaccagatcaagggcatgggctgctcgtgcgactacgacgacgagcacttcacgcttgagccggcctacgtgaaggccgtgcggaagctcttcgtggactggtaccacgacgacctcatctacaagggcaagcgcatcgtgaactggtgcccgcactgcaccacgtccatctccgacgacgaggccgagtacgtggacgaggcagggcacctgtggtacctgcgctacccgctgaccgagcccgagggcgacttggagtacctcgtggtggccaccacgcgccccgagacgatgctcggcgacacgggcgtggcggtgaacccgaaggacgagcgcttcaagcacctcgtgggcaagacggtgaagctgccgctcgtggaccgcgagatccccatcttcgccgactggcatgttgatatggagttcggcaccggctgcgtgaagaccacgcccgcgcacgacccgaacgactgggcgatgggcgagcgcaacggcctcgagcgcatcaacatcttcgacgagacggcgcacgtggtggacggctacgggaagttcagcggcatggaccgcgacgaggcccgcgaggccgtggtggccgcgttcgacgagctggggctgctcgaccacgtggaggaccacgaccactccgtcatgacgtgctaccgctgccacacgaagctcgagccctgggagtccgagcagtggttcgtggccgtggacggcctcaagcgcgacgccgcgcgcgtggtggaggacggaagcatccagttccatcccgagcgctggcgccaggtgtacctcgactggctggagaacctgaaggactggtgcatctcgcgccagctgtggtgggggcaccgcatccccatgttctactgcgacgagtgcggctgggaggacgcgtcggtggaggacatcgaggcgtgccccgtgtgcgggaagcccgtgcgccaggacgaggacgtgctggacacgtggttctcgtcgcagctgtggccgttcgccacgatgggctggaccgaggagggggtggacgcgcccgagatgcgcgccgcgtaccccacgcaggtgctctccaccgcgcgcgacatcatggggctctgggtggcgcgcatggtgatggcgtccatgtactgcacggagcagatcccgttcgagcacgtcatcatccaccccacggtgatggccgccgacggcaagcccatgtccaagagccgcggcaacggcgtggacccgctgcgcctcatggaggactacggcgccgacggcatgcgcttcggcctgctcatgcaggtcacgggcgcgcaggacctcaagttcaacgaggcgaagctggaaagctcgcgcaacttcgcgaacaagatccgcaacgccgcacgcttcgtcatgatgaacctggatggctatgagccgggcgagcccgcgccctcgacgccggccgaccgctggatcttctcgcgcttggcgggcctcgtggcgcgcctggacgcggcgttcgacggcttcgagttcggcgaggccacgcgcgagctgtacgcgttcttctggaacgagttctgcgactggtacatcgagttctcgaaggcgcgcctgggcgccggggccgacccggcggaccgcctggcgtgccagcgcaacctcgtgttcgtgctcgaccaggcgctgcgcctgctgcatcccatcatgccgttcgtgaccgaggagatataccaggagctgcccatcgaccgcgagggcgcgccgtacctcatcggcgccgcgtggccggacgcgcaggagctggcgaagtacgcggatgcggaggccgagcgcgccatcgagatggtgtgcgagacggtgtcggccatccgcagcacgcgcgcccgctacggcatctcgccgaagtccgagctggccgtggtcgtaaaggccgacgaggcggacgcggccctgctcgaggcccagcgggggctcatcgagggcatgggcaacacggcgtcgctcgccatcggcgcgcaggtggagaagccggccgagtccagcgccgtgctgggcgcggggctggaggtgtacctggtgctgtcgggcctcgtggacctcgacgccgagcgcgagcgccttgcgaaggagcaggccaagctcgccgccgacgcgggcaagctggagaagaagctctccaaccccggcttcctcgccaaggccgcgcccgagatcgtggagaaggaccgcgccaagcacgccgagctcgccgacaagctcgcccgcgtggaggtccagctggcagaattggggtaggggcggaacgggtgtgacagggaccccctgtcacacccgccggccgccaggacgcatcgaggcgcgggcacgggtccggatgggcgcctcttgcggaaattgcctgaacacgggggtgcggtcggacaactttggtataatgactgaccgtgtcggcgcttctggcggccggcacggtgcatcgggcgcccgtgcggcgcctggcaagtcgaagaaaacgaggttgaaatgagcgaactgctgtcccagttgtggacgcccgagttgcaggccgcgttcaccgtggtcgtcatactgctcgtcattctgtacgtgctctccatcgtctgggtggtccgcgacgcgtacctgcgcggctcctactggtacgtgtgggccatcgtggcgctcatcccgctgctgggcatcatcgcgtactgcctgctgcgcccgccgctgctgcagatcgaccgcgacgagcaggagctggagatcgcgctcaagcagcgcgagctcatgaagtacggcgagtgcgcgaactgcggctatccggtggaggccgacttcgtgctgtgcccgaactgccaccagcgcctgaagaacctctgcggcacctgcaaccatgcgctcgacccgttgtggaccgtgtgcccctactgcgcgacccccgtgggcggtgccgcgcccgcacgccgcagcgccccgcgcgcccgaacgcagcagccgcagcaagcggctccccagcagaggcagggccggacccgctccccgcaaggcgagcatcccgccccgtaacccgcgctgtcgaagaagccgcctcgatcccgaggcggttttttatgcctgctttctgcggcgtctgttgaaaccgtgtgcccgggggaccttccggccgttcgtggcatactgagcccaggctgcgcactcaagacgcggccgtaccgatcgtgcaggcgctttgtgcgcgcccggcacaggaaaggaaccatcatgaacatcgtactccccgacggctcgggcaaggaactcgccgacggcgccaccgtcgccgacgtggccgcctccatcggcgtgggcctcgccaaggccgcgctcgcgggcatcgtgaacgaccagccggtcgacctgtccgcgcccgtggccgagggcgactccgtggccatcgtcaccgccaagagcgacgagggcctggagctcctgcgccattccacggcgcacgtcatggccgccgcgctcgtcgacctctacggcgacgtgcagttcggcgtggggccggccatcgagggcggcttctactacgacgtgaagacgggccgcgcgctctcgcccgacgacttcgccgccatcgaggcccgcatggccgagatcgtcaaggcggacgaacccttcgagcgccgcgtggtcacccgcgccgaggccgaggatatcttcgcggaccagccgttcaagctggagctcatcgccgagcttcccgaggacgccgtcatcaccacgtacaccatcggcaagttcaccgacctctgccgcgggccgcacctgccctccaccggcaagctgggcgcgttcaagctgacgaagcttgccggcgcatactggcgcggcgacgccgagcgcgagatgctcacccgcatctacggcacggcgttcttcaagcagaaggagctggacgagcacgtgcgcaacctggaggaggccgagaagcgcgaccaccgcaagctggggcgcgagctgggcatctacgtcatggacccgctggcgggcgccggcctgccgctgtacctccccaagggcgcgcgcatcatacgcaccctgcaggagtggctgcgccgcgacctgtacacgcgcggctacgaggaggtcatcaccccgcacatctacaacgccgacgtgtggaagacctcgggccattacggcttctacaaggagaacatgtacttcttcgagatcaacgagggcgatgacgagaacccccgcatgaccgagtacgccgtgaagcccatgaactgcccgggccacgtcatgctgtacaagagcgagctgcattcctaccgcgacctgcccctgcgctacttcgagttcggcacggtgtaccgccacgagatgtcgggcgtcgtgcacggcctgctgcgcgcccgcggcttcacccaggacgacgcgcacgtgttctgcacgcgcgaccaggtggtggacgaggtggtggccatcctcgggctcgtggaccacatcatgtccacgttcgggttcgaatacgaggccgagatatccacgcgccccgagaagtccatcggcaccgacgacatgtgggagcatgccacgggtgcgctcaaggaggcatgcgagcgccacggcctgtcctacgacatcaacgagggcgacggcgcgttctacggcccgaagatcgacatcaaggtgaaggacgccatcgggcgcacctggcagtgctccaccgtgcaggtggacttcaacatgcccgagcgcttcgggctcacctaccgcaccgaggacaacaccgaggagcgcccctggatgctccatcgcgccatcttcggctccatcgagcgcttcttagggatcctgatcgagcactacgccggcgcgctgccgctgtggctggcccccgtgcaggcggccgtgctgccgctggccgaccgccacaacgaggcggcccacgagcttgcgttgaagctggccgacgcgggcgggcgcgtggaggtgtacgaccagaacgagcccatgcgcgtgaagatcgcgaaggcccagagccagaagatcccgtacatggtggtgctgggcgacaaggagatcgagaacggcaccgtgtccgtgcgcgagcgccacgagggcgatctcggcgcgtgggacgtggagaagctggtgcaggccatcaaggacgccgcgctgtagcggcgcgccgggcggaggcataccgcgccgccgggctcggtcgcgcggtatgcccgagcggcggcgcaccgtgtcccaacctcgcttcgaacggaagcccccgcctggtcgggggcttctttcgtgcttgccgaacagtgcgggggccggtatgatggcttcatgtccattcaaggtaggggaggggaacgtttcatgaagaggatcaagatagccgccgtctgcaccgccgcgctcatggtgctgtgcctgggggcgcttgcaggatgcgggccgaacgacgaggaggtcatccgcaacggggtggccgaggaactggacgggctgaagaacctggacgaggcagcgctcgccgacctcatgtccggtgcggacgttgcggacctgtccgagttcggcatcgatgcgaacgagttcatgaaggcttacctggccggcttcgattaccgtatcggcgacgtgacggtcgacggcaaggaggcgcatgtcgacgtggcgctcacgtgcaagagctacgccgcctacgagcaggcgctcgaggatgctgcggcgaagctggccgaggacgagtcgttcctcgagcttcccgaggccgagatgaaccagaagatcggggagaccgtcatggaggccaccgcggccatcgagccggtcgatgccggctccgtcacgatcgactacacgctcgagggaagcacctggacgcccaccgagcagtccacccgcaacatagccgaggtcctgttcggttaggcgggagcgtggaatacggctggggattcgcggcgctcatggcgggcctgctgctcatggggctcgtgttcgtggtgacgggcatccagatggcctgcggccgctggcggcatgcgctcgccggcgccgcagggctaccggagcgcgagcgcgaggcgagcggcgtggcgcaggcgacccgcgtaggcggtgtgctgctcatcgtcgtcggagcgggcgtcgtgggcctcggcggctggcaggcttgggcgtcctacacgcccgagagcgacggcatgctgacggtggccggcgtgttcctggtgcttgtcgacctgttcgtggtctgggcgttgcgtgccgcgcgccaggaatacgaggacggctcccgctagcagttcgtccaaaagctggcgcgatccgtccggctgccagccggcccgtttcgcgccgtccttcaggaacggggcccgtcgtccccgttctcgtcgtgccccgcacgtgtgccgtaccggtcgcgcagggcagactcccgcatctcccgcgcgtcctcgaacagccgacgcgcgtcctcgcggctgacgcccatgcgctcggccgcgccgcccagctcgttcatgcggcgtcggtactccctcacggcatgctcggcaacaagacgccgccgttcctcgcggcgctgctgcctgtcggccagccgggggccgtcgccgtcgggatcggcgtcgtccacgagcgcgcggcgtgccatctcctgagaggcgaggtccagcgcctcgtcgatggcgcgcttgcgcgccgaggctcgctgaagcagcgccgcacggtcctgccagtccaggtcctcgaagttgcgcccctcgtgtcgtgccgccagccgctcgagcgccgccttgcgggcgagcatccgctccagctcccagtgctcgcgcaggatgtcgccgatgtcgcgcgggctgtgcgctatctcgcgcacagcctcgatgggcttcgcgtcggccacgcggtaggtgagcatgcccagaagcggcatgaggaacacggtgatggcgccggccgccacgagcacgctggccgtctcctgcggcatggcgcccgcgctcacggctaccgacgtgacggccacgatgatgggcagcgccgtcgtgcagtacagcgcgatggtcaggcggttgtgcgtcgatatgtcgcgcgtgtccttgccggttgagagtgcggcgaagatgggcaccgcgcggatgagcagcaaaagcgcgatgaagcccaccagcacctcgggctgctggaacaccgccgccaagtcgatcttcgcgccggacaccacgaagaagataggtatgaggaaaccgtacgccacgccgtccagcttgtgctcgagcgcgtggtcgccctcggggatgatgtagcggagcacgaagcccgacgcgaacgctcccagcacgatgtcgaggtcgaacgcggccgacagggccaccaaccccaccagcaggagcaccgtcacgcgcatcatggtctgcgaggtgccctcggcgttggcggtgaggaagcggaacagccgatggccggccttcttcgccttggcgggcaccaccgccaccagcacgcacagggccatgaacgccatcaggatgagcacggtcttccactcggcgcgcgtcgacagcaggagcgccatggcgagcaccgggcacagctcgccccacgtgccgtaggccaggacggactcgcccacgcgcgtgcccatgagctcgcgctccttcaggatgggcatgagcgtgccgagcgccgtggtggtcagcgcgatggccacggccacggactctatctcgttcgcgaacaggccgctggcgaaatgcacgaacaaaaaggccagcacgatggacacggcccaggtggccaggccccgcttgccctgggaaccggtgaggctcttcgggtttatctcgtagcccgccagcaggaacaggaaagccaggcccaggtcggacaacagccctaccgagtcggtgagctctatggcgcccgcgaggttcggcccgagcacggcgccggcgatgagcaggaacaccgtctcggggatgagcttgccggggatgagcttggcgaggatggggcacgccgccgcgacgagcgcgatgatggcgagcgagatgaggtcgacgggcatgaagggcctttcgggcgtgcgagaacgacgtttgcagacgaacgatgccattgtagcgcaacggagggggacggcgtcgtggtatgcttagggcgcacgcagagcacgtaccgcccgccgcccccgcggcgcgggcgagcgggaaaaggagcgaaccccatgatcgtcatcgccgaggtctccgccgaggaccgccgtccccgttccgtcccagggtggacgcgggcccatggctaagcgggaggagctgctggagcgccggctggcacaggcatccccgttcaagcgacaggcgttcctcgccttggaggacgtgcgcgcggcgcgcggcgcagcgcgggcggtgggtatcgcgctgttcgcgctcatcgtggcgaacgcgctgctcgtgttcgccgagccgcagctggacgtgtcgtcgggcgtgtcgcatgcgatgctcgtgttcgggctggcctcgagcgcgtgcttcgcggttgagtatggggcgcgcctatgggtggccgacttcgtgcatccttgctgcgggcccgtgaaggcgcggctgcgctacgcgctctcgcccatggggctcgtcgacctgctggcgttcctgccggggctgctggtgctggcggtgccggtgtccgcctcggcgctcaacgccgcgcgcattatccgcctgctgcggctcgtcaagctgtcgcgctacatgcgcgggctgcggtccatcgcgcgcgtgttcgcgaagcgccgccaggagatcgtcgccgcgttcacggtgctggggctgctcaccgtcacggccagcgtgctcatgttcgaggtggagcatccggtgcagcccgacaagttcgacagcgtgctcacgggcatgtactgggccatgaccaccatcacctcaacgggctacggcgacctcgtgcccctgacggcggcggggcgcctcgtgggattcctcaccatgctgctgtccatcggcgtggtggccatcccggcgggcatcttctcggccggcttcgttgccgagttccgcgcgcaagacgcgcgggcccgcgcaagatgcggtgcggacgagggggatgtgcgcgacggcgatggggagcgtggcgacgggtgctgcgaagacggcgtcgaggccgatgccgacgacttgtaggggcccggcgggggcgcaggcgcagcccgtcgcttggcggggcatcacctgcggcacggctaccccgccgtctgcgtgccgggcgcagcggcgccccggggcttgcgacgcgctccgcctcgttgtctgcggcgtggtcgcgcatcacgccgatctcgcccgcgcatccctgtgatcgccgaggcggcccggctgctatcctgccaggtaacgctcgagcgcgggccaggcacgcagggcctcggcgtagccctgctcgtagagggccatgagcttggcctggtccttctccatgctcgataccgtgacgggctccggcgggcggatgaggaagaggaggccctcgtcgtgcaggcagggcagggcccggtacaggcggttgtactcgtagtggcgatgctgcaggcggtcgacgtagaaggggaagtcggcgtagcgctggcgcaggagcgccatgagcttgttcgggcccttcaggtagtcttcggcttgcgtgagcaccacgatgcgcttggcggggccggtgagcagcgagtagatcacgggcacgctgtcgcacgtgccgccgtccagcaggtgcttgccgtccaccttcacgatctggctcacaagcggcatggacgacgaggctatgaggtagtcgacgtcggccagggcgtcggagaactcatggtagtcggcctctcccgagtccaggtcgctcgacacggccacgaggcgcatcggcgagctgttgaaggcggcgtagttgaagggctccagctggttgggtatcacgttgaaggcgaagtcgcgtccgcaggcgttgcccgtgcgcacgaagctcttcagggaaaggtagcgccagtcgcccgcgtacttcacgttgaggtagcaggagcggcccgcgtcgccggccacgtagttgtagccgcagagcgcgcccgccgacacgcctaccgtgcgttcgcagaacagcccgcggtccatgaaggcgtccaacacgccggccgtgaactggccgcgcatggccccgccctccagcacgaggtcgacgggcgtcacggcatgcccgcgccaggcgggctcgtggaggtcgcgggggtcggtgcgggggaggcgtgcggtcgtgtcgctcatgcgggatcctttctgcgtgctcgcgtcctattatagcgcagcggccccaacggcggcacgcgctgtagcctaatcgggaggcgccgttcgccttgccagctggccgggaccggtcgcgctcgcagcgccctgcacgagggcgggcgcgccgcttctccggccgaggggacggcggccgcagcccttttcccgcatctgtgaagtaaccatggagcgcctgccggcgatcggccgttcgcggggcgaaaatgtcgggaaacccaagttttatgccctaaaccgtaacaattagatgcacagttgagcgaaggcgtttacaatacgggcagaacaaactgatcgcgcgcccgccgggcgccgcgagagacggtgcccgcggcaccgcgagcagggccgtgcgagcggccgagactataaggaggctttacatgagcgaggttgtttcttcttccgatttccagtccaaggtgctcgacgcgcagggtcccgtgctggtggacttcttcgccacgtggtgcggtccgtgcaagatgctggcgcccaccatcgacgagatcgcggccgagcaggccggcaaggcgtccgtctacaagctcgacatcgaccagagtcccgacatcgcccagaagtacggcgtgatgagcgtgcccacgctcgtcgtgttcgagaacggccaggtgaagaagcaggctgtgggcgtgcagcccaagcagaacatcctgtcgatgctggcctagcgccgcctcgccgcaggttcccggaagcgccggccgccttgggcagccggcgcttccttgtgctcggggagacaaagggagacaaggggacggggataacgtcacgttcttcgaagtcctcggatctcgttaatcgcttggaatgtgacattatccccgtccccttgtctccctttgtccccttgtctccctcccccacgcatcctgccgctcgtgcgcccctgcggtcagcccagcacccaggcgcggtagcagtcccagcgcgccgcgtgcgggccctcctcgacggcggtgagcaggtaggtgccaaccgcgaggcgcggctcgaggccctgccgggccgcctcggcgaacagtgcgggggcgttgctgcggttcgggtcgtccgggtcaaccagcagcaggcactcgcgcccctccccggcgcccggcgcatcccgctcccaaacggcgcctgcgcgcgtgggcgtgtcggctaccatctcgaacacggttcccgggtccgctgcgtccacgagcacggcgaagcgccagggctcgtggacgagcaggggccaaagggccgggtcggcgtagtcgatggcgtcgaggcgggcgatgcccggcgcgccgggccgcatgcccgccgcctccagctcctcggcccgtgcgttcaggacacgctgccgcgccaggcgggcccgcatggcctccagctcggcgatgcgctgctccacgtcgcgggccgtgcggtcgagtgcgtcgtccaggtcgcgtgccgagagcgtacggtagcccgccagctcgcgcaccggcacgcccaggcgacggtagaacgctatctcgctcgcgtcgatgaggtcgtgcagggcgtactgccggtagtcgttgccgcggttgcggccggcgcgcacgagcccctcgcgctcccagtagcgcagcgtcgacggtgccacgcccaagtagcgtgccgcgtccttgatatcgtacagcacgggttccatgacgcgctccctttccgtttggagatttgggggaggtgggcagggcgcccctttaccttaaagtcgctttaaggtttagagtatcatgcggcaatggccaagacaagccccgcccgcgcagcgaggcgttggcggagggggtgccccttgggggcgcggtagagcaccggcggagtggaaaaccatgatcaagaagaatatgttgaaagagtacctgcgctacatcctgcccacgatgctcacgttcacgctcgccagcgtgtacagcatcgtggacggcatgttcgtgggtcacgcggtgggcgatgcgggcgtcgcgggcatcaacgtggcgttcccgctcgtggccttcgtcatggccgtgggcacgggcatcggcatgggcggcggcgtgatatcgtccatcgcgcgcggcgcgggcgacgaggcgaagtcgcggcgcgcggtaggcacgacgttcgtcatgctgctggcggccgcactgcctgtcatggcgctgctgctgttcgcggccgagcccatctgccggctcctgggaggccagggcggcacgctcgagcaggccgtggcgtacacgagcgtcatcgcgtggggcgtgccgttccagatcttcgtcacgggatgcacgccgctcatccgcaaccaggggcgcgtgggcttcgccatggcggtgcaggtgttcgcgggcctgatgaacgtggtgctggactacgtgttcgtcatgctgatgggctgggggacggccggcgccgccgcggccacggcggtgtcgcaggctgcggcgttcgtgccggtgctcgcgttcttcctgctgaggaaaaaccgcatcgcgcgggccgacctgcgcccggacggcaagatcgtcgcccacgcgctgaagctgggcatggcgccgttcggcctgacgctgctgcccgaggccacggtggtggccatcaacgtgaacctgtcggcctacggcggcgagacggcgctcgcggcctacgccgtggtgtcctacaccgcctgcgtcatccagatgctcatccagggcgtgggagacggctcgcagccgctcatctccaagcactacggcgcgggcgatgccgacggcgtgcggcggttcaggaacacgaactacctcataaccatctcgctgggcgcgctggggcttctggccatgtacctgctgcggaaccttgtgcctctggtgttcggctcgtcggccgagacggccgccatcgtggcgtacgcgttgcccatcttctccatggcgtatgtgttctacgggttcacgcacgcgtccacgtcgtacttctacgcggtggacgacgcccgcgcctcgaacgccatcgtatacggcgaggcggtgctcgtggtgctggtggtgttcggcatcgtgcgggtggcgggcgtcgacggcatctggttctccgtgaccatcgtgcagatgatgctggcctgcgcggccggggcgctgctgcgctaccggcaccggaggcgcgccgcgcaggccgccccggccccgcagccggtgggcgagggctgctagcagcggctgcgcacgacctggttaggctgccgcgcgctggccgacccgggctgtgctttcgcacgacccgggccggctctggtcggcgtgcgaccggtgcgggccggaggggggcggtcagcggagggccggcatgcggctggcctcctgctgctccacgaggggcttgaggtagccgtagccctcggcgtccatgcgctcgagcggcacgaagcgcagggcggcgccgttgatgcagtagcgcagcccgcccgcctcggcggggccgtcggctgaaggcgcgccgagggcatcgtccgcgccatcgtccgcgccgcccgcgccggcgtcgcccggattgcgcgcttcgccggccgagacgccctgcgttccaggcgcatcggccccggccccggggatggcgcccatcaccgccggatcatcgggcgattcgcacaggccgtcgaactggatgcacggctgcccttccgcaagccccatgcgccgtgcgaacgcctcggcggcggccaggtcgatgtggcagtagccgtgcgggttcttgcccaggtagtcctggtggtagtcctcggctgcgtagaagccgtcgaggggctcgatctcggtgacgatgggctcggtgtagcgcgcctgctggcggcgcagcgccgcctcgatggcgggcaagtcggcctcgtcttgccagtagatgccgctgcggtactgcgtgcccgcgtcgttgccctggcggttaaggctcgtggggtccacgacctcgaagaagccgtcgagcagcacgtcggtgggcaggatgcgccggtcgtaggtcacggccaccgtctcggcgtggcccgtgttccagttgcacacgtcgcggtagctgggattctcggtggagccgttagcatagcccgctaccgtgcgccgcacgccgggcaggcgcttcaggaacgcctcgagcccccagaagcagccgccggccaggtagagcgtgtgcaggtcctcgccatccgtcccgccgcggcggcccgcacccgcctgcgcgcctttgtgcgggtgcgggccgccagccgacgcgccgtgcgggtgcgcgctgcgtgcgggagacgatccggccgggtggttcgtgttctcagcgtccatggaacgttcctttcctcgcttggtcgcatccatggtagtgcgccctgcgggcgcgcggcgccgccttcgcgaaaccgtcacgcacgcgttgagcacgcggggcccggcgcggcatgacggttcgccaaccgaatcctgcttattcggcgtaaagtggtgccgatcttgtgacaattaggcgacgagccctatactggatgcaaagcaaaggttccgcgataggaggcttcccatgacagaggaacccaacaacgacacgtccgccgcgtgcaaggcggacggagcgcaggagaaggccatcgacgtcgccgtcatcggcgccggccccgccgggctgacggccgggctctacgctgcgcgcgccgggctggagaccgtgctgttcgagcgcatcgcgccgggcgggcagctggcccagaccgagcacatggagaactacccgggcttccccgacggcacgaacggcttcgagctggccttctccatgaagcagcaggccgaccgcttcggcgtgcgcaacgtgggcgaggaggtgctgggcgtggacttcacccagaatccgaaggtgctcaagaccgcgttcaacgagtaccgcgccaacagcgtgatcatcgccaccggcgcccgcccgcgcaagctggggctggagctggaggaggagctgcagggccgcggcgtgtcgtactgcgccacgtgcgacggcaacttcttccgcgacaagaccgtcatggtggtgggcggcggcaacacggctgcgggcgatgccatctacctctcgcgcatctgcaagaaggtgtacctggtgcaccgccgcgacaagctgcgcgccaccgccatctaccacaagcgcctggaggacctgccgaacctggagttcgtgtggaacgccgtgccgcgcaagctcgtggccgacgagggcgcgctcgcaggcgtgcgcgttgagatgctcgagacgggggaggagcgcgacatcgccgtggacggcctgttcgtggccgtgggcaccgagccgaacaccgagtttctggccggtgcgctgacgacggacgagacgggctacatcgtggccggcgagtcgggcgagacggaggttcccggggtctacgtggccggcgacgtgcgcacgaagttcctgcgccaggtggtcaccgccgtggccgacggggcgctgtgcgccgaggaggctgcggagtacctggccatctaggggaggcgccgcaggaggggctgcgctttgcgccgctctctgatatcatgaaccagttaccgtaacggcgcccggtgccttgtgcaccgggcgctcgccgcgcgcggggcgagcgccgcgcaaccacgttcaagaaggacatatcccatgcaggaaacggacatgcgagagaagctcgagaagatcatccaggcttacgaggacctccaggggcgcatgggcgacccggccgtgctcgcagaccagaaggagtacaaccggctggcaaaggagtacgcgagccaagggccgctggcgaagaaggcccgcgagtacgtgcaggcctccgacgacctggcggcggccaaggagatgctcgcggaccccgatatgaaggagttcgcccaagaggagatcgccggcatcgaggcgcgcctgcccgcgctcgaggaggatatcaagttcatgctcatcccggcggaccccgccgacgacaaggacatcatcgtggagatccgcgcggccgccggcggcgacgaggccgccatcttcgcgggcgacctctacaagatgtacgagcgcttcgcgggcgcgcagggttggaagaccgagaccatggacgtgtcggcctccgaggccggcggcttcaaggagatccagttcaaggtcaagggcgacaaggtgtactcggtcatgaagttcgagagcggcgtgcaccgcgtgcagcgcgttcccaagaccgagagccaggggcgcatccacacgtccacggccaccgtggcggtgctgcccgaggccgatgaggtggaggtcgacatcaacgagaacgacctgcgcatcgacgtgtaccgcgccggcggcccgggcggccagtgcgtgaacaccaccgactcggccgtgcgcatcacgcacttgccgagcggtttggtggtgcagtcgcaggaccagaagtcgcagctgcagaacaagatcgcggccatggccgtgctgcgcgcgcgcctgtacgagaagatgctggccgagcagcaggccgccgagggcgccgagcgcctggcgcagatcggctcgggagaccgctcggagaagatccgcacctacaacggcccgcaggaccgcgtgaccgaccaccgcatcggctacaacggcacctacaacggcgtgcttctgggagacggcctgggcgacgtgatcactgcgctgcaggctgccgaccgcgcgcagaagctcgaggcggctgtgtaagctcgtactcggccgtatcccacatcggccggcatgcggcagaacgcgctccgaagtcaccgttttggccgcggtgaagccttttcgccgcgataggggccttgttttcgacggagcctcggaacgacgagaatcgacatgtgcttgacctggccttctccggaagggttgtggcacagtggggctgcgcgtcgaaaacgggcttcacaacggccaaaacggtgacttcggagcgcgagaaaccgtaggctcgcttcaaagcggggcttgacgggggcggttccggtacctgcaagattcggttcgaaggggatatggtcgtggagaacgacatctggaccatcaaggctgcgctcgactggacggtcgggtaccttgagcgcaagggcgacgagagcccgcgcatctcggcgcaatggcttctgtccgaggcgtgcggcctgtcccgcatcgagctctacgccaacttcgagcgcccgttgtcgatggacgagcgcgacgcgctgcgcggctacgttacgcgccgcggccgaggcgagcccttgcagtacatcaccggcgaggtggggttccgccacatcacggtgcgcgtgcgccccggcgtgctcatcccgcggccggagaccgaggtgctcgtgagcgaggcgctcgcgctcctgcccccggcgccgcgcccgcgcgcgaaggacgaggaggccgaggcgcccgccgaggacgaggcagggctggccggtgccgcggactccgattgcaccgaggcgcccccggcgcccgccgagacgtccgcgcccgaaccgctcctcgtggctgacctgtgcacggggtccggctgcattgcctgctccatcgcctacgagcatccgctcgcgcgcgttttcgccaccgacatcgcacccgaggccgtctccctcgcgcgcgagaacgccgcgtcgctcgggctggacgggcgcgtgagcgtggtcgaatgcgacctgggcgaggggcttcccgccgaggtcgtgggcgtgctcgacctcgtggcgtcgaacccgccctacgtgcccacagccgtgctcgccggcctcccgcgcgaggtggccgcctacgagcctgcgctcgcgctcgacggcggcgccgacgggctcgacgtgttccgccgcctgctggcgttctgcgcccgtgcgctcaagccgggcggaggcttcgccttcgagctgcacgagacctgcctggacgacgcggcccgtctggccgccgaggcgggcttcgtggacgtgcgcaccgtgtccgacctcgccggccgcccccgcgtgctcgcgggacgttccgcgcggacctagctgcgggcggtgcgcatctgaagggttcgtccgcggccggcgcggtttgcgcgagcggcttcccaccgctatgcggctcgcgcgagcggcagccctgcgccgcacggcgattcgcgtgtcggggcgccgttgggggctgcgggatggtgcgagggcctataatggagcggttgcacgttggtgaggggaaggggatcgcatgagcaagatcgtcaacgagccgaagaacacgttcccgctgttcgtgaaggtgcgcgagcagctggagcaccgggcgctgtggctctacctgctggtggacgaggcgcgcaagcacgggctgcccgatgacgcgttcgcggccgatgccgtgaagcgctgcgggctgtaccagggcgccgagatcgttgaaaagagcggcacgaagagcctgaagggcctgaagaaggtgctgttcacgaagagtgcgcagatcgtgttcgagatgaaggtggtggagagcaccgacgacaagctgtccatcgacttccactactgcccgcttgtgaaagcgtggcagaagcagggctgcaccgacgaggagatctcccggctgtgcgatttggccatgtgcggcgaccgcggcatcggcgaggcgcacggcgtggagctggacctgcccaagaccatcgcacgcggtgacgactgttgcgccatccgctacgtgcgtcgcgacggggcgtcgacgagctagggaaacgcaggtcgatacatggttcgaccggtcgagtagggcaaggaccctgccgccgacccgaggcagtctaacctgtcgaaggcaagggcgggggccttgcccgagcgcatggacgaacgccgcatggatcggcgtttcccttggtcggcgctccgctccgacatgcgctagaatacgtctaacagtagctatcgtcctctatcttgaaggagcagcaatggcccagcgcaacgtgttgaaagagaaccttgccgagtccgcgcgcgtcgtgcgcgagcgcatcggcgaccgccggctcgaggtgggcatgatccttggctcggggctgggcccgttggccgagcggatcgaggacgccgtctacgtaccgtacggcgaggttccccatatgaggacgagcactgccacgagccatgtgggccgcttcgtgtgcggcatgctgggcgggaaacgcgtgctggccatgcagggccgtttgcacggttacgagggcaacaccgcccaggaggtggcctaccccgtgtggctcatgcacgagctgggcgtggacacgctgttcgcgacgaacgcggccggcgccatcaacgagagctaccgtgtgggcgacttctgcatcatcgaggaccatatcaacttcaccgggcgcaaccccgtggcgggcctcgagcccgacggcatcgcgttccgcttcttctccatgctggacgcctacgatcccgcgttgcgtcgcctggcgcgcgagaccgccgacgagctgggcatccgcgtgcaggagggcgtgtacctggggctgctcggcccgagcttcgagacgccggccgagatacgcgccttccgcgcctggggtgccgatacggtggccatgagcgtgtgcgaggaggtcatcgcggcgcggcacacagggatgcgcgtgctgggcatgtcgctggtgagcaacatggcctgcggcatcgagggcgcctcgcccaccgacgaggaggtgctcgacgtggcgcacggccgcgaggccgacttcgcgcgcctggccaccgccatcgtggagcgcatgtagggaaagtgcccgcgcggcgggaggagcctgcgccctctcctcagtcctccaacttgaggtcgccttcggcgatgaggccggcgcggcgcatgagggtgcataccgtccagctgattacggcgggcagcaccaggcacaccagcgcgaggcccgcccactcgaacgcgccgggtgccgccgcgccggcctccatgcccgccacccagccggtgtacacgccgatgggccccacgaggccgcacgtgcccatgcccgaggccacggcagggccgttctgctgcagggcgaacacgcaggtggcaagcggcccggtgacggctgacgccacgatgggcggcacccagacgagcggcttcctcatgatgttgcccatctgcagcatggaggtgcccaggccctgcgacagcacgccgccccagcggttctcgcggaagctcatgacggcgaagcccaccatctgcgcgcagcagcccgcgagcgcagccccgccggccagccccgtcagaccaagcgccgcgcagatggcggcggacgagatgggcagcgtgagcgcgatgccgatgaccaccgacacgatgatgcccatgaacagcggctgcagctcggtggcccacatgatgaacccgcccaccgacgaggccagcgcccctatccacggcgccacgcccagcgccagcccgcagccggccaggacggtgacggcgggcgtgacgatgatgtccaccttcgtctccttcgacaccgccttgcccagctctgaggccgcgatggctatcaccagcacggccaagggcccgccggccccgcccgccgcgttggcggcgtagccgacggctgcgagcgagaacagaacgagcgcgggcgcgcgcagcgcgtagcctatggcaacggccatggccggccctgccacgctcttggcgaacgtgccgatctcgttgaagaaaccgacgccggataggtcgcccaccgtggtgaggatagtaccgatgagcagcgaggcgaacaggccctgggccatggccgacagcgcgtcgatggcgtagcgctggaacgatacctcgatgtccttgcgtgcaagaaatgctgtaacggagtgcttgggcatgccgtcccccttcgggcgcgagcggagctatgcggttctgaccgggatttctcatggaaccatggtagacgaagccgcaggcgggagggacgggagcgcggccggcgcccgtctgcggcggatttccggcgagcctgtgcggtttgcggcgtccccgcgcggccgaggggcgcttcgggtacaatcgacgcgaagcgacagggccgaagggccgcgaggccgcgcgatggggctgcggggccggatggcggtgcggacggagccgggcgggatcgggcaggaggggcgagcgcaggcgtggatatggttttcgaagaggtcttctcgcggcggcagatagaggcgcgtcgggtggccgacggcgcggcggatgcgccggttccggctgcgatgcaggcacgcctcggcactcctgtgcccggtggggcgcgcacgctgcgcctgcacgtgctggccagcggcagccgcggcaacgcggccgtggtggaggacgcggccacgggcgcgggcgtgctcgtggactgcggcatctgcaagcgcgacttcttcgcgcgctgcgacgaggccgggttcgatccggcgaggctcgcggccatcctcgtgacgcacgaccacaccgaccacacgaagggcctcggcgtggtgctgcgcggcctggcgaagaagggcgtcgagccggccgtgtacgcggacgacgctgtgcgcgctgccagcagcgaggtgcgcgcgctcgaggatgcgcatgacgtgcggtccctgcgcgcaggcgatgcgctctcgcttgccggcctggccgtccacgtgttccgcacctcgcatgacgctgcctcgtcgtgcgggttccgcttcgagagcgccggcggcgacgtggcgggcttcgtcaccgataccggcatcgtcacgggggaggcgcacgagggcctcatgcacgcgcggctgttggcgctggagagcaaccacgatgtgcagatgctcgccgacggcccctacccgtatcccgtgaagcgccgcgtgggctccgacgtgggccacctgtccaacgaccaggccgccgccgagctcgaggcgctcctatgcgacgagctggagcaggtggtggccatgcatatctcgcagaacaacaacacctaccgcctgcccgccgaatccctcgccgccgtcgtgcgccgcgcgggtcatcccgctgcggtgcaggccgccctccaatccgtgctcgtgagcgtgggctgaccgaggtggccgctatacggccgttgacgctggcaaaaggggaacggtgcgaacgcctgcaccctgcgagcgcttcgcccgccccgctctcgacatgccctacatggtcttctgcgccttcgcgatgaacgcgacgtaggcgatgaaggccactacctcgatgccgacgaacacgagcatgccgacgagggttacctggcccagcacccacagcacgagcgctgtcaccggtacgagcacggagaacagcgtgaacgcccgcgtcgcggccaagttgccgatggccacgttgcgctcgtcgttctgttcgacgagctcttttcgcgtgggcttgtgggcgagtgcgaacaggccgcacacgatgagggcgaacgcgcatcctcccaggccgaaggcggcttgggcgcccaagggcagcgcgtccgacacaccgcccaggttgaaggcgaaggcgagcgtggccacgaggaacagcaccccgatcgacagggtgataacggcgggcttgttgttcattgcgcttcctctcggtagatgaacacgtcttcgatgctcaggtcgaaatggcgggcgatcttgaacgccagcaggatggaggggttgtaacgccccttctccagcgagctgatggtctggcgcgacacacccagctccgtggcaaggtcctcttgcttgatgccgcgcgccttgcggatttcctccaaacggttctccatgcgcgcccctttttttttctcccggtgtcgccaatgtaaagctagctttccatgcagtataggcctgcctggaagaaatgtaaagtaagctttccataaaaaggaggacgggcgcgggggcgatgacgatgtttttttctgcggctgtcaaaaaatccttcggcttgcattcacccgcgttcgttatgatgggattccattcggctttagccgaatgcggccggttgaaaggccgcataggacgtggatggcaggacgaggcgtgcgagggggcgtggcccatgctgctggacgacatagagattttcacggtcatatcggagacgaagagcctttcccaggccgcggagcgcctgtacatgtcgcgaccggggctctcgcagaagatcgccaacatagaggcgcgctacggcacgaagctctacgtgcgcacgtcgacgggcgtggtgcccacggcagccggccagatcgtcacgaagttcgccaagaagatcgccacgttggagaccgcgctctcggccgagctcgcggcggtcgacgagcacttcgacagcaccatcgaggtgggcatgagtatgaacgacggcgtggcgctgctgccggcgctggtcaagcgcttccacgacctgcaccccgacgcgctcgtgcacctggacgcgggctacgagcccgagctcatggagaagctgaaatccggcaagcttgacttcgccctgctggagaaccagccgctcgacgacggcatctcgcgcgagacgctcggttacaagcgcctgctgttctgcgcgcccgaccggccgccctacaactccgtgccccagcccgtgaaaatcgagacgctgctcgaatggcccatgatcatctacgagtggaactcgggccgccacatggtgggcaaccgccacttccgcgaacgctacaacctgtcgctcaccgaccataacatggtggcgcgcttcgacacgcacgaggccatggtgaacggcgcgaaggcggggctcgggtgggcgagcattcccgagtgcgtggccgagcgctaccgcaacgagccgggcctcatctggttcaaaatcgataccgaccccatgcgctacccggtggacctggcctggcacaccgggcgggtcatatcgccgctggcgctggagttcaaggacttcatccgcgacaacgtgcccgcgggctacttccacgggcgggggtagggcttcctgcgagcaggggaggcgtgccgcggcgtccgcccgtgcgccgcgctgccgagcccgctgtgcctgcgctcgcctcctaacgctcgcccgtcccgacggcaccgccccgtgccagccgcgcgtccgcggacgtgcctggcgcttccggccgtcaacgtcgctttacggcggcggtaagcgagcgcttcccggagcatccccttacaccccctgcttcctatcgtgacggcgaatccgcctgcgtgcccagccgacgccctccgcggggtctaaccttgccttcatcgccccgcccggagacgaggggcggcataggagaaggaggagcgatggacaagcaaggcatcatcgaggccagccgcgcccgacgcgaaggggagcgcatcttctacacgtcgtgcccggcgaacggctgctgggacagcgcgtgcatcctgaagtgccacgcgaaggacggccgcataacggcgatcgagccggacgactcggtgaaccgaaacgacagccgcgaggactgcggctgggagaacatctggaagggcaacgtgcagatgcgcccctgcgccatgggccattcgtggaagaaggagctctacgccgagacgcgcctcctccaccccatgaagcgcgtgggggagaagggcgccgggcgcgggtacttcgtccccatcagctgggaggaggcgctcgacaccatcgcagagaagatggtggagatcaaggggaagtacggcccctacggcatcttccactcgcagtacccgagcttcgagaagaacgggttcccgctcgcgccctggtgggaggccggcttcggcgcttggggcgagcactccacgtccggccacgcggcgggcgagatgctgcacctgggcgtggacctgtccaagacggccaagggcctctccgaggcgctgccgggcttcgaggcgtccgacatcttcaactcgaagctcttcgtcatgtggggcatggacccggtggtggcctggttcgggccgtcctcgtactacatgcagctcgcgcacgagtacgggtgcaagaccatcgtcatcgacccgcgctacacccagtcggccgagttgctggccgaccagtggattcccatccgccccggcaccgacttggccatgatgctggccgtggcccaggtgctctacgaggaggacctcgtcgaccacgagttcgtggaccggtgggtcgacccggtgggcttcgaggaatggcgcgcctattgcatgggcgagggcgaggacggcatcaagaagacccccgaatgggcggctcccatctgcgcggtgccggccgagaccatccgcgagttcgcgcgcctctacggcacgacgaagccggtgcacctgcagtacttctactcgtgcgcgaagcgccacatgggcgactacagcgcgtcggcgtccatgctgctgcaggccatgaccggcaacatcgcctgcgccggcggctgccagacaggcgcctgcctgcccacgcccggccgcgtgcccgccccgcgcgccgacttcgggcgcgacccgggcgactaccgggtgccggtgctgttcaacaacaactgcctgacggaggtgctggcctgccagaaggactactgggagggccgcatggacgagagcgagttccgccaccgcatcggctcgcctacgaacgacgccccgctgccgaacgtccagatgatcatattcgagaacaactacgccaacaaccactcgaacgttaacaagcgcttcgccggcatggcgtcgaccgagttcaactggggcttccagtggcatctcaaccagcccacggcagagctctgcgatatcatccttccggcgcccgtgtggcagttcgagggcatggacgagtacatgtacgggcaccagcgcttcgtgagcggcccgaacggcatgcgcaactacttcacgttctgcgctcgcggcgtggacttccccggcgaggtgcgctcgaaggagtgggtgtggaccgagatcgccaagcgcctgggcgacgaggtggtgcagggctacaacccgcgcctggccgacgtggcctgggaggattgggtcgacgcgcaggaagccatctaccgcgaggccttcgaggagtgggccgacaacgagaccgtcatggcgtacctggggtacgaccaccgtcccacttgggaggagttcaacgccaaccccgtcgtgcgcaccgaggtggacgtgccgtactacccgttcaagaccctcatggagcgcggcgagagccccttcggaaccccgaccggcaagatcgagttctcgtcgaacttcgtgaaggaccacgacatgaccgaaacgcgctggcgcgggcagatcgagcccatgccggtgtggagcccgagctacgtggagggcgacatcggctcggcctcgaacgacggcttctacaacccgaaggcgaaggagtacccgctgtcgctcgtgtcgccggtgtccatctaccgccagcattcgagcaacgacaacaaccccttcatgcgcgaggactgctaccgccacgccgtgtggatctcgggcgtggacgcccaggcgcgcggcatcaaggacggcgacctgtgccgcgtgagcagcgaccgcggcgagaccgtgctcacggcctacgtgacgaaccgcatgatgccgggcaccgccgccgtgcaccacggcgcgtggtaccagaccgacggcaccgcggccgagatgaacgagtacggccaggacctgcgcggcacgccgaacatcctcatcgacgacgggcacctgccgcatatcctgggcgcgctcatcacggccggcctcgtggaagtggagaagctggccgatggcgacgccgagggcttcggcctggaggcggagcgcggcggcatgcgcggggcgaaggcggcgctcggcctgcgggccgcgctcggagagggaagggagtaggaccatgacgcagtacggatttatgttcgacatgaaccgctgctacgcatgccaggcgtgcagcatcgcgtgcaaggattggaacggcctcgagccgggcgccgagaagtggatgggcgtctacgagtgggagcagggcacgttcccgaacatccgcctgcacgcgctggcgttcccgtgcggccattgcgaggacccggcgtgcgcgaaggcgtgcccgaacggcgccctctacaaggaggacgagttcggcgccgtgctcgtcgaccaggacaagtgcgacggttgccggaagtgctacgatgcgtgcccctacggcgcgccgcgcttcgcctccgacgagccgggcacgaagatgagcaagtgcaccatgtgcgtcgatcgcctggccgagggcatgcagcccgcgtgcacggcgagctgcccgctgcgggccttcgacttcggcccgctcggcgagctggtggagaagtacggcgacgtgcgcttctgcgagggcatgcccgcgcccgacgcgacgggtcccgccttcctgatctggaacccgcgcgagaagcagccgcttgtgccctacgacgccgaggaggccatcgcgctcaaccgccagcgcggcgacttgggcatgctcttcgagggcgccgaggacctcgtctccttcgacgagggcaccgtccgccgcgacgagctgcgcatgaagcacggcaccgtggtggagttcatgcgtgcgaccaggaacgatatggcgtaggagagctccgggagcgctctggcgagcgctcccggagtcgggggaacgaaaaaccaacgaaaggggaaagctatggaatggattggggttgccggcatcgtcgtcgggctcgtgttcttcgtcatcgcggccatgaaggggtggaacgtgctcatcacgtccctcgtcacggccgtcatcatcgcgctcaccaacggcatggatatcgccgcggccatggtgggcggcgagtcgtcgtacgtcacggggctcgcgggcttcgtacagaagaacctgctcatcttcatgggcggcgccatcatgggcgagttcatggacaagtcgggcgcggccaaggccatcgcgaacgccgtcatggggaaggtgggctccaagagcccgtacctcgtgctgctgggcatcgccgcggtgggcgcggtgctcacctacgcgggcatctccatgttcgtggccatgttcgcgctcattccgctggcgcgaccgctgttcaaagagtgcaacatcccgtggcacctgttctgcgctgcctggacgctcgcggcctgctcgttcaccatggccatgattcccggcgtgcccgccatcgcgtggatcaacgccgcgaacggctgcggcgtgtcgctgaccgctgcgcccgtcatgggcatcgtgggctcgatcgtcgccatcgcggtgtcgtgcgtgtacatcaagttcgcgctgaagcgcgcccaggccaagggcgagacctacgagacgtccgcaggcgaggccgaggtggccgacgacaagccgctgccgggcgtcgccgtggcgctgctgccgctcgtgctgctcatcgccatcatcatcgtcggctcgcagctgggcgtggcgaacatcatctacatcgccatggtgacggccgtcgtggccagcatggtcctgttccacaagcacatcgacagccagcgcgacgtgctgggcaacggcgccaaggcggccctcgggcctgcgctgttcacctcggccgccgtgggcgtgggcaccgtggccgccgcctccgtgggtttcacggtcatctacgaggccatcttcaacatgccgggcggcacctacgtgtccgccgccaccatggcggccgtgctcggcggcgtcatgggctccggctcgggcgcggtgggcatcatcgccggcaacttcctcgacccgtacctggccacgggcgtgaacccggccgccctcgcgaagatcatcgccacgtcggccaccatcggcggcgcgctgccgaactccggcgccatgttcggcatgctggcggccatggggctcaaccacaagaactcctacaagcacatcgcggccatatccatcggcgcggggctctgcgcgctgatcgtgatgatagtgatggcgaacatcggaatcgtttaggtccgagcacgccgcaggttcgagggcgtgacagagggacggggataatgtctcattctccgaagtccctcgattgctgcaagcgcagggggaatgagacattatccccgtccctctgtcacgccccctctgtcacgcccgtcacacctctaacaaagggggcaatcatgaaggaaacaccggttgccgggaaggcgcccaacgaggtgaaggcgccggctcgggggcgggcgccggatgcggcggggaaggcgtcgctgttcgagcgcgtgcccgacgcggcgcggctcgcgtggcccgacatcgcggccatcctctcgggcgtggtgtccagcctctccaagctcatgggcggcggcatcgtggcgttctacgcgggctgccagctgggcggggtggccatggccatcacgttcgccttgagcttcgtgctcacgtacctggtgggcaagatcacgtttcgcgagggcctgcccaacaacgtggtcagccgcctgtacatcttcggcacgaagggctcggccgccggctccctcgtgtggatattcctgctggtaggtgttctggcagtggggacggtacagctgggcaacgccatcctgttcgcgttcggctggagcgaggagtggatgcgctgggcgctgttcgcaggcatctcgtgcgtgtgggtgctcatggcgctcttcggcacgaaggctatcgcgcgcatgaacgccgtgttcgtggtggcgctgttcgccgtcatgggctacgtggtgtacctcgtggccgcgaacggccagatgggcgacgcgctcacgcacggggtgctcatccccggcgtggaggtgggcgagggattcgcctacggggtgaactacgccatcatgacgtcggggctgctcgcactcttcgccgccgacttcacgcgcttcgcccgccgcgagcgcgacctcgtgcccatctcgctggtgggaagcctgttcgccgtggtcacgtatttgttcggcgcgctcatcacgtacttcggcttcgagcagtcggcggcgtacttctccaccatgggctacgatgccgcgggcgcggcgcatgccgccatcacgaacccgggcgtgtcgctcgtgttggcggccggcggggtggggctcgccatcatctgcctgtcgcagatgaaggtggagacgtcgaactccatcggcggcgcgaacgcggtgtcgaacctgttcgactcgctgttcggcgtgaagctctcctggcccgcggccgtcgtggtggcgaacgccattgggcttttgttcatcctgggcggcatcttggaccaggtgaacgcgttcatgagcttcggcagcatcctcaccatctcgtggtgcgtgctgctcgtcaccgactactacctcgtgcgcgggccgatgcgcataggctcgcgcggcctgccgctcgaccaggtggaaagcgtgaactggcgcggcgtggccactatcgccgtcgtgagcgcggtgaacggcgtgctgtacgccactggcgcggtggccgtgccgttcgtgaccacggcgcccatgaccgcggccctgtacgtggccttgagctggctcgcccgcggtcgcgtgcgcgcccgcgagtccgcgcgcggcgcggtggcgggggagcgggccgagggagcgccggcggcggccggcgccgcaccccgcggcgaggatgccgctgcggcggccgaatgaggttcccggccgcacggccgtgagcaagaagagaaaccgacagagaaaccgaccagaagaaggagacagagccatgtgcttcagaccagcggtaagcgggatgggccccgtcaagtgcccgaaatgcggtgcggaagtcgacccgaagctcgacgagtgcccgaactgcggtgcgaaggccgccccggcgcccggcgtccccgccatgccggcagctcccggcgcgcccacgccgcctgcggccccgaagccgccgagcgccccgccggctccgggagcgtaggcgctcggcgcgatcaactccctcaaacgcgaggcgcccccgaaatgcgggggcgccctggcaacgaaagccgccgccgcatttcgggggcggctttcgttgcgtcatgctagcctgccacgctgtaggcccagaggccggtgctcgatggcaggatctcttcgaagtcccagtgccgctccgtgcggtcgacgctcgcggggtcgttcacgacaaggcggccgcgctcgtcgatgtccgtcagcacgatgtaggcggtaccgttgccgaatgcgctggactgcacggcgcagacgaccgggaagcccgagttgatctgtcgcctgacggctggctcgcttgcctctacgggacgtgccgtcaggccgagcccggccgcgccgtcggtgagcagcgccgtggcgtcggcttggtaggcatagccgtcgcgctgcgcggtcgaggccacctccaccggccccacggaggcgtcgcccgtgaggtcgatgcgcaccatggccagggcgagcggcgcagcgccggacgtgccgatggtgcccgagccgtaggggcgatcggcccattggggatccacctggtacagctggggcacggttccctgctgccacgacgatggcgccgcgctgagcgtggccttcgtcgtggcagcaggctcgtcggtcaggatggcattgtcgacgatgccggtgaagccgttcgcgacgccgatgcccacgaaggccgcgcccacggcgataaccgccatgagcatgaccgccgccaggatgcgcatgggctcgacgtcggtgatcaggggcttggcattgacccgcgcaccgtgggcctgcggagggcatacggtttcgcaggcgcggtaggacacgacgcgccgctcgttgctgcgcggcgccgacgagtagcgcacgccctgcgcgcagtccggcaaggtgtgccgctcggacgcgtacgggtcgacgcggccgccggtgctcgcttgctcggcgacgaagtagggcagtccacggtacggcatgccgcgcctcctttccaaaggttctcgagcttgcggggccggcgcggttcgcccgcgtccggcgcccgtggtttctaagggtgcgaagagggagtttaggctgtccgtacgtgctaccgcctatgatcggggcattcgtttcccgcgcatggccgatcagtcagcgaaccgacacgtgtgcagctccttacgcggcttccccgccaccggcgccgcccgctgatcttttccgcgccgcctgcgcaaacgcgtcgcgcgcatagtacaatgcacccatgaccaaccgccaccggcctgcgtgccgcagcgcgccacttgcagcgcggccggccggggaaccgaagagagagaaggagcgcatggccagggtgtacaacttttcagcaggtcccgccgtcttgccggaggaggtgcttgccgaagccgcatccgagatgctcgactaccgcggctcgggcatgtccgtcatggagatgagccaccgctccaagccgttcggcgagatcatcgagaacgccgaggccgacctgcgcgagctcgtcggcatccccgagaactaccgcgtgctgttcctgcaggggggcgcgtcgcagcagttcgccgccgttcccatgaacctcatgaggaaccgcgtggccgactacatcatcaccggcgcttgggcgaagaaggccttcaaggaagccaagatctacggcgacgcccgtgccattgccagcagcgaggacgagacgttctcctacatccccgactgctccgacctggacgtgtcccccgacgccgactacgtctacatctgcgagaacaacaccatctacggcacgaagttccacacgctgcccaacaccaagggcaaggacctcgtggccgacgtctcgtcgtgcttcctgtccgagccggtggacatcacgaagtacggcgtcatgtacggcggcgcgcagaagaacatcggcccggccggcgtggtcatctccatcatccgcgaggaccttatcacggatgacgtgctggagggcacgcccaccatgctgaagtggaagacgcaggccgacgcgaactcgctctacaacacaccgcccgcctacggcatctacatctgcggcaaggtgttcaagtggctgaaagaccaaggcggcctcgaggccatgcagaagcgcaaccaggagaaggccgcgctgctctacgacttcctcgatgcgagcaagctcttccgcggcaccgtgcggaaggccgaccgctcgcttatgaacgtcccgttcgtcaccggcgacgccgacctcgacgccgcgttcgtggccgaggccaaggccgccggcctggagaacctgaagggccaccgcagcgtcggcggcatgcgcgcgagcatctacaacgccatgccccgcgccggcgtcgaggccctcgtggccttcatggacaagttcgaacgagatcatgcgtaggcgctttcctctttgaagaagagtcgcgggcggcgcatcggaaaacggtgcgccgctttttctagaggcgtttgctaaagagggcatctgtttgaggtgcttcaaggataaaaatccttagaaaaattggcaaaaaggctctgcggcccttggcccgcagagcgaacacctagtcggagggcatagcatttcggcgtccttgcattcgggacttgaaaaggggtaaaataaggttcttaataaagaccgcaattaagaaccttattaaggagaaaagctatgccggctatttacccctctactgcgctgaaaaaccagcagcgtgagatcaaagaaattgcagacaccgaagttgtctacatcaccgagaacggccgcggaaagtatgccttcatgtcggagaacgtattccagaaaaagatcgacgatgctgttgagcaggcgctttacgagcagcgtatggcgcaggccctccggcaatcccgcgatgatttcgagaacggacgctattattcttcccgcgacgaccttatggctgcggtgcatgacaagcgggcctcgcatgcctagaatggagtacgcggagcgcttcgccgaagatcttgctttggtaacctccccgaaagtggagagtcgtatccttgagaatctggacaacatcgaacgtttcggcgaatttggatcttcgatggttcccgcttcgatcaaggaagagttcggcgaaggcgttcgcaaagtggcagtgaacccttttgatctcgtgtacacgctctacaccgagcaagatcttgtgcgggtggaggcgctcgtacatcagcgcgccgctcgctagggctgcgtgcggttttggagatgaatgccagcttctccctcattcccgacctcgtccatgtgaatttcctacgggaaaccttcgatattcaaagtttttcttgcgcagggcggatcggggagtatactggcgtccaacaacctcatagatcgaaatgcgatgacgaggaccagtagggacgaatccatcttccagagagccggcggaaagctgcgagccggcggtggacggtccgaaagccccctccgagcagttcggcatgaacgtttcgcgcgcggacggacgatctccggcccggcgcgcggggcaagtagggctggaccggcgacaaccgttacccgtcgaagcgtgcagtgcggcttaaggccgcggtgcattctttctcctaaccgtggtcctggtgcagcgacttgcctgcagcgggatttttttatggctggttgaccgcagggcaggggccctgcccttgccggcgagcgaggtcgacagccagcacggacgaaggaggaaggaacggcatgaaacgaagaagctcggccgtcaccgagggcgtggcgcgcgcgccgcaccgcagcctgctcaaggccgacgggatcaccgacgaggagctggagcggccgctcgtcgccgtcttcaactcccgaaacgacatcatcccggggcacaacaacctcgacaagatcgccgaggccgtgaaggccggcatctacctggccggcggcgtgccgttcgagatctcgaccatcggcgtgtgcgacggcatcgccatgaaccacgacggcatgcactactcgctcgtgtcgcgcgaggccatcgccgactcgctggagtgcgcggtgcagggccacgccttcgacgcgctcgtgtgcatcccgaactgcgacaagatcgtgccgggcatgctgctgggcgcgctgcgcgtgaacatccccacggtgttcgtgtcgggcggcccgatgctcgccggcaagcagccgggcggatgcggaccctccaccgacctcaacacgctgttcgacggcgcggcgcgcgtgagaagcggcacgatgaccgaagaagagctcaagttctacgaggacacggcgtgccccacctgcggcagctgctccggcatgttcacggcgaactccatgaactgcctcaccgaggccctcggcatcgcgcttcccggcaacggcaccatccccgcggtgtactccgagcgcatccgcctggcgaagcacgcgggcatgaaggtgatggagctcttggagcaggggatctgcgcgcgcgacatcgtgagcgaggccgccatccacaacgccatggagtgcgacatggccttcggcggctccaccaacacggtgctgcacctcacggccgtcgcccgcgaggcgggccatcccatcacgatggacgactgggacgcggcgagcgcgcgcacgccgcacctcgtgaagctcgcgccctcgggcccgcgcccgctcaccgacctgtacgaggtgggaggcgtgcccgtggtcatgacggagctcgaccgcttagggctcatcgaccgcagcgcgctcacctgcatgggcccgatgggggactacctcgactacatgcacgcggcctgcgccggcgcggacggcgaggtatgccgcacgcacgacaacccgttcagcccgtcgggcgcgctcaaggtgctgcacggcaacatcgcgcccgacggcgccatcgtgaagaagtcggccgtcgatccctcgatgatgatgcataccggccccgcgcgctgcttcgacagcgaggaggaggcctgcgccgccatcaacgccgggaagatcgtggcgggcgatgtggtggtcatccgctacgaggggccgaagggcggcccgggcatgcgcgagatgctgacgcccacctcgtccatcgtggggatgggcctgtccacgagcgtggcgctcatcaccgacgggcgcttctcgggcgcgacgaagggccctgccgtggggcacgtgagccccgaggccgcagctggcggccccatcgcgctcatcgaggagggcgaccaggtgacggtggacatcgagggcggcgcgctcacgctgggcgtggacgatgccgagctcgaacgccgccgcgcggcctggacgccgccggcgccgaagcacgaccacggcgtgctcgcgaagtacgcgaagctcgtctcttccgcagacaagggggcgtatgtttcatgaccgaggcgaaccagaaccagcagcagccgcgtcccggcgcgacggcggccgtcaagggcgcgccgcgcggtctcggcagccgcacggagaagcaaggccgcaccatgacgggcgcgcaggcggtcgtcgcctcgctcgaggccgagggcgtcgacctcgtgttcggctatccgggcggccaggccatcaagatctacgacgcgctctacgactccacgcagatcaagcacgtgctctcgcgccacgagcagggagccgtgcacgaggccgacggctacgcgcgcgccacgggcaacgtgggcgtggccatcgtcacgagcggtccgggcgccacgaacacggtcaccggcatcgcgacggcctacatggacagcgtgccgctcgtggtcatcacaggccaggtgccgcgcggcgtcatcggcaccgactcgttccaggagtccgacatcgtgggcatcaccatgccggtggtcaagcacagctacctgctgcaatccaccgacgagctgacgactacgttccgcgaggcgttccacatcgccaagaccggccgccccggccccgtgctcatcgacgtgccgagcgacctcgccagcgaggagctggcgttcgcgtaccccgacgaggtgaacctgccctcctacaagcccacctaccgcggcaacgccaagcaggtcaagcaggcggtggcccgcatccgccgcgccgagcggcccgtgctctacgtgggcggcggcgtggtgtcctccggcgcgtccgaggagctgcgcgcgctggccgagctcatgcaggtgccggtggtcaccacgctcatgggcaagggcgcgttccccgcgtcccacccgctgaacctggggcccgtggggatgcacggctcgaagtacgcgaacctggccatgacggagagcgacctcatcatcgcggcgggcgcgcgcttctccgaccgcgtcacgggccggctcgacgagttcgcgccgcacgccgaggtcatccacatcgacatcgaccccgccgagatcggcaaggtgcgcgaggcgcagatccccatcgtgggcgacctgaagggcgtgctcgggggcatcgtggcccagctttccaaggagggcgcgagccccgagacgaaggcgtggctcgggcagatcgccgagtggcgccgtcgccacccgttctaccatccgaacgtgggcgacgcgcccgaggagatcgtgcccgaggtggtcatggagaagctctccgacgcgctcgatcccgagaagagcatcgtcgtgaccgaggtggggcagcaccagatgtgggccgcgcagcacatcgcgcgcgagcgcccgcgctcgttcatctcgtcgggcggcttgggcacgatgggcttcggcttcccagccgccatcggggccgccatcgggtgccccgacaagacggtggtgtgcgtggccggcgacgggtcgttccagatgaacagccaggagatggccacggcgggcatccacggcgtgccggttaaggtgctcgtgatggacaaccggtgcctcgggatggtgcaccagtggcagcatctgttctacggcgagcgctactcctccacgctgctcgacgccaaccccgacttcgtgaagctggccgacgcgtacggctggcaggccgcgcgcgtggagagccccgacgagctcgacgccgcgctggccgccatgctggccgccgagggcccctacctgctggacgtggccatctcgcgcgaccagaacgtgttccccatggtggcgcccgggcgcgcgctcgacgacgtgataggcgccatcgacgtggccgtgggggccgtgcgcacggacgtgcccgaggcggacggcgccgcgggcgggaagggaggcatgcgatgaggcacatcctgtccgtcctggttgagaacaagccgggcgtgctgtcgcgcgtgacggggctcatctcgcggcgcggcttcaacatcgagtcgctgtcggtgggccccaccgaggaccccaccatgtcgcgcgtcacggccatcgtgaaggccgacgaggtggcctacgagcagatcaccaagcagctgcacaagctgatcagcgtgcacaagatcaacgacctcaccgacgagggcgccatcgagcgcgagctcgtgctgttcaaggtgaacgccacgcccgagcgcagaagcgagatcatcgagatcgccaacgtcttccgcgcgaagatcgtcgacgtggggaagagctcgctcaccatcgaggccaccggcgacgagagcaagctcaagggcatggaggacctcttccgcgcctacggcatcaaggagatcatccgcaccggcaagatagcgatgtctcgcaacagcaaagacgtttaaaaccagccaacagaaaggaaaccaacaccatggctgtcacgatctaccacgagaacgatgcgaaccccgagctcatccagggcaagaaggtggccgtcatcggctacgggagccagggccacgcccatgcgctcaacttgaaggactcgggcgccgacgtgcgcgtgggcctgcgcgagggctcgaagtcgcgcgaggccgccgaggaggccggcctcaaggtcatgggcgtggccgaggccgccgaggaagccgacctcatcatgatcctcacgcccgacgagacccaggccgccacctacgaggccgagatcgccccgcacctcaagcccggcgacacccttgcgttcgcgcacggcttcaacatccattacggctgcatcaccccgcccgcggacgtggacgtggtcatgatcgcgccgaagggcccgggccacatggtgcgccgcgtgttcaccgaaggggcgggcgtgccctgcctcatctgcgtgcaccaggacgcgtcggggcaggccaaggacgtggcgctgtcctatgcctggggcatcggcggcgcccgcgccggcgtcatcgagaccacgttcaagaacgagacggaaaccgacctcttcggcgagcaggcggtgctctgcggcggcgtgacggcgctcatcaacgccggcttcgagacgctcgtggaggcgggctacccgcccgagatggcctacttcgagtgcttccacgagatgaagctcatcgtggacctcatgtacgagggcggcatggccaagatgcgcaactccatctccaacaccgccgagtacggcgactactacgccggcccccaggtgatcaccgacgaggcgaaggccgcgatgaagatcatcctcgcgcgcatccaggacggcagcttcgcccgcgagttcatggaggattcggcgaacggccagaagtggctgctcgagcagcgcgccgagcacgccgaggcccccatcgagcaggtgggcgagggcatccgctccatgttcagcttcgctcgccgctaggaaggccgcacggcgccgcgcagctgccgggccgcgcggcgtcggcacccgtgcgctccggacggcttttcgcatttcgtcgagaattttccgcccgaaccggcgcggcgggcggtttcgccttatcatggggcagccgcccggacgcgtcccaacaaattcccgcgcggcgcaagcgaaacataccaggaagactcttgcagaggtggtagttctatgacgaagaaagtgctggttgccgaaaggctggccgacgccggcctcgcggtgctccgcgacaagggctacgaggtggatgtcaagctgaagatgccccccgaggagctgatcgcgaccatcccggcttacgatgccctcatcgtgcggtcggccacgaaggtgacgcgcgaggtcatcgaggcggggaagaacctgcgcatcatcggccgggccggcgttggcgtggacaacgtggacgtggaggccgccaccgagcgcggcgtcatcgtgtgcaacgctcccacgtcgaacatcgtgagcgccgccgagcacaccatggccctcatgctggcctgcgcccgcaacgtcgcccaggccaacgcctccatgcacgagggcctgtgggagcggacgaagttcaccggcgtggagctctacgagaagacgctcgccatcttcggcctgggccgcatcggcggcctcgtggccgagcgcgcccgcgccttcggcatgaggctcgtgggctacgacccgtactgcagccccgagcgcgccgaacagctgggcgtgacgctctacgacgacgtggacgccatcgtgccgctcgcggacttcatcaccgtgcacctgccgaagaccaagcagaccatcggcatgttcgggcccgaccagtacgcgcgcatgaaggacggcgtgatcctggtgaacgccgcgcgcggcggcatctacaacgtggactcgcttgccgacttcctggctgccggcaagataggcgccgtggggcttgacgtgtgggagaacgagccgtgcacggaaagcccgctgcacgagttccccaacgccatcctcacccctcacctgggcgcgtccacgaaggaggcccagctgcgcgccggcgtgcagacggccgagtacgtggccgcgggtctggcgggctccatcgtgcccaccgccgtgaacatggcgccggtgccgcccgaggtcatggacgcggtggggccgtacgtgcccgcctgccagatgatgggcagcatgcttgcccagatacacggcgaggtgccgcagtacctgaagctcacggcggccggcgcgctcgccgatgccgacccgtccatcctcgtggccggcacggtgaaggggctcctgtcctaccagggccgcgccacggtcacgcccgtgaacgcagatgcggtggcccagcgccacggcatcaaggtggagacgcaggcgcgcccggacgccgacggctacgcctccacggtggccgtcatggccgacggcaccgaggtggcctgcacccgcggcgacgccgcgcagaccgcgcgcctcgtgtcgcttctgggctacaagatagacatcgcgccgggacgccagtcgctcatcttcgagtatgtggacgccccgggccgcatgggcaccatcggcaccatcctgggcgaggcgggcatcaacatcaccaccatgcagatcggcgcgaagccggccgaccgctgcgcgctcgtctacatgaacgtggagggcgaggtggaggacgccgtgctgtcccgcctgcgcgccgagatccccgagctgaagaacctctggtacgtgaagctgtagcgatccctcgccacggtaggggcgagtgcggcccggcgctcatggagacggcccggcaagcgacagtgcttgccgggccgtctcgcgtgcagagggcgcagggccgatgatcgtcgctgcgcattccggcagctcggcgccgtgcattccggcgatcgcgcgacgacgcccgcccgcatcgccctgtttcttcggatacggtaatggaatcgaagaaaattttcgatatattaccgtagcgaacgatgggggttccgaaatccccttccaaggtgagataatcgcccaaatcagcgcgaaaagccggaaatcgggcgtcagacgggaggtttcggacgcgaaatcccgaggttcggtaatatatcgggaaaaatttccgaatccattaccgtagctcgatctcttaccccatcttgcggggccgtatgcctgccagcaaggcattgcccgaacctggacccgtcggcaatcgcgcaacgggagctcccagggccggccaaccagcgccaggatgcgcatgtttttcgttggcggcgaatccgggcgtcccttgccgacggttttgctatgattgtcaaatcatttttaattcgcaagccgcatccgccaaccgggagctgcggcgcgcatgagacggaaaggacgcacgcacatgacgcgcaagatcgacatcttcgacaccacgctgcgcgacggcgagcaatcgccgggcgcttccatgaacaccgaggagaaactggtggtcgcgcgtcagctccttcgcctgaacgtggacgtcatcgaggcgggcttccccatctcgagccccggcgacttcgagagcgtgcgccgcatcgccgagctggcgggcgaccaggcggtcgtctgcggcctcacgcgcgcggtggagaaggacatcgacgcggcggccgacgcgctcaagtacgccaagcgcccccgcatccacacgggcctcggcgtgagcccgagccacctgcgcgacaagctgcgcatcaccgaggacgagtgcgtcgagcgcgccgtgaagtgcgtgaagtacgccaagaagtacgtcgaggacgtgcagttctacgccgaggacgccggcagaagcgactacgacttcctcgtgcgcgtgatccaggccgccgtggatgcgggcgccaccgtggtgaacatccccgacaccacgggctactcgctgcccgaggagttcggccgccgcatcaagtacctggtggagggcgtgcgcggcatcgagaacgtgaagatcgccgtgcactgccacaacgacctcggcatggccacggcgcttgccatggccggcgtgaagaacggtgcgcgccaggtggagtgcaccatcaacggcctgggcgagcgcgcgggcaacacggccatggaggaagtggtcatggccatccgcatgcacgaggacgagctggacgcgcacaccgacatcaacacgcgcgagttctgcaaggcgagccgcctcgtttcgtccatcacgggcatgaacgtgcaggccaacaaggccatcgtgggcgcgaacgccttcgcgcactcctccggcatccaccaggacggcgtgctgaagaagcgcgacacctacgagatcatcgacccggccgacgtgggcgcgggcgcaagccagatcgtgctcacggcgcgcagcggccacgcggcgctcaagcaccgcctggaggagctcggctacgagcttgagggcgaggcgctcgaccaggtgtacgaggccttcctcaacctggccgacaagaagaaggaagtctacgacgaggacctcgagagcctgatcaatgagcgcgaccgcaacgagaacgccctctacacgctggaggcggtgcaggtgtccacgggcttcccgctcacgcccacggccaccctcacgctcaaggacgtcgagggcgtcgagcgcacggtgtgcgagtacggcacgggcccgatcgacgcggtgtacaaggccgtgaacaagatcatcgaggtggacaacgacctcgctgagttctcggtgcagtccgtcacccgcggcatcgacgcgctcggcgaggtcacggtgcgcgtgacggcggaggacggcggcatctacaccggccgcggcgccgacggcgacatcatcgtctcgtccacgaaggcgtacctgaacgcgctcaaccgcctgttgagcgacaagcgggcagggcgcgcgtaggcggccgggaggtcgtcggaagggccgggcgaaccggccggcgcgtcggaaaagcggcgcatgcagggaaggacggcagcgatgccgtcctttcttatgtcgaaacccgatcgaaacaggggctctacacggcggaaacattgggcgcgtaccctagaggcagcgcagagacgaagggccggcactcccggggaaaggcgcggcgctttcggcggacctccattgcccgcgcctttctccggggatgcagccctcgtctcgcgtgaaaaccgataggacgatcatacgagagacgagggcccttcgatgaggcaaaaggcggcactgcgcgagggcgacgtgcgcattccctccggatgcgccatcgccggcatcatggataggagcggcgcgcgccatgacggaagcgacatccttaagtccatcgcgctcatgcacgaccgcagcaacggcctgggcggcgggttcgcggcctacggcatctaccccgagtttgccgagctgtacgcattccacatcatgtacgagggcaaggacgcgcgcgaccgcacggaggcgtaccttgacgagcatttcgcaagcgagaagcaggagcgcatccccgtcgagccgacgcggggcatccaggatccgccggacatctggcgttacttcctcgcgccgcatccggtgaggctcgccatgagcggcctcgacgaggccgagtacaccatgcagcacgtcttccgcatcaacgcggacatccccggcgcgttcgtggcgtcgtccggcaagaacatgggtgcgttcaagggcgtcggctatcccgaggacatcggcgcgttctaccgcatcgaggactaccgggcgtggctgtggacggcgcacgggcgctttcctacgaacacgcccggatggtggggcggcgcgcatccgttcacgctgctgaactggtccatcgtgcacaacggcgagatatccagctacgacgcgaaccgccgctacgtcgagcagttcggctacgagtgcgcgctcaagaccgacaccgaggtcatcacctacctgttcgacctgctggcgcgccgccacggcctctcgcagcggatggccgcgcacatcatgtgcgcgagcgcgtgggacgagatcgacaagatggacccggacgaggccgcgttcgagacggcgctgcgctgcgtgtacgcgagcgcgctggtgaacggccccatgtcggtgatcctcggatcggacgaggggctgctcgcgctcaacgaccgcctgaagctgcgcgccctcatggccggcgagaagggcagcatggtgtacctggcctcggagcaggcggccatcgaggtggtgtgccccgacgtggagaacgtccgctccctcgagggcggcgagcccttcgtcgtccggcttgagaaggaggcctgaggcatgctcgattacctgctaccccgctacaaggtgctgcgcgacgccgaactgtgcgtccagtgcggcgcgtgcgagcgctcgtgcgccaacgaggtgcacaaggtcgacgaggagctcggccgcgtcaccgccgaccaccgcgcgtgcgtgaactgccagcgctgcgtgatcatgtgccctgtcggcgcgctggccatcgcgcagtggccgcaggttggcaacggctcgaacaactggacgctcgccgccatgcaggacgtcgccaagcaggcgcagaccggcgcggtgctgctgtcctcgatgggcaacccgcagccctacccgatctactgggaccgcttgctgctgaacgcgagccaggtgacgaacccctccatcgaccccttgcgcgagcccatggagacgcgcgtgctgctgggcagccggcccgatgttctcgaggtggacgagcgggcccgcacggtgacgacgaagatgccgccgcagataaagctggacgtgcccctcatgttctcggccatgagcttcggctccatctcgctcaacgctcagaaggcgctcgccatggcggccgaggagctgggcacgtgcttcaacaccggcgagggcggcctgcacaaggacctcgagcgctacggggggcacgccgtggtgcaggtggccagcggccgcttcggcgtggacgcgcattacctgaacgccggcgccatgatcgagatcaagataggccagggcgccaagcccggcatcggcgggcacctgcctggcgagaagatcggcgaggaggtgtcgcggacccgcatgatcccgcgcggcaccgacgccatctcgcccgcgcctcaccacgacatctactccatcgaggacctgcgccagctcgtgttctccctcaaggaggccacgcgctacgccaagcccgtggccgtgaagatcgccgccgtgcacaacgtcgcggccatcgccagcggcgcggcgcgcgccggagcggacgtcgtcgtggtcgacggcttccgcggcggcacgggggcggcccccgcgcgcatccgcgacaacgtgggcattcccctcgagctcgcgctggcctccgtggacaagcgcctgcacgacgagggcatccgctcgagggtgagcctcgtggcgggcgggtccgtccgcaactcggcggacgtggtgcgcgcggtggcgctgggggccgacgccgtgtactgcgcgagcgccgcgctcatcgcgatggggtgccaccagtgccaggactgcgcgagcggacggtgcaactggggcatcgccacgcagcgcccggagctgaccaagcgcctcaaccccgaggtggcggccgagcgcgtggtcaacctcgtgcgcgcatggaaccatgagatccaggagatgatgggcggcatgggcatcaacgccatcgacagcctgcggggcaaccgcctcatgctgcgcgggatcgggctcaccgagaaagagctcgagatcctcggcgtgaagcacgcgggagagtgagggggacgatgatggggaagagggtttccgtgacgctcggcaccgagcatttcaccgaggcgaacgagacggtgcgcgacgctttgctgcgcgccgacacggtggtggtgcgcgaggcgttcgcccagcgctacctgggctgcgcgatgccgacgggcaagacgctcgagatccacggcgtgcccggcaacgacctggcgtgctatttggacggcggccgcatcgaggtgttcggcaacgctcaggaccaggtgggcaacaccatggacggcggctgcatcgtggtgcatgggcgctgcggcgacgcggcgggctacggtatgcgcggcgggcagatcttcgtgcgcgacggttgcggctggcgcgtgggcatccatatgaagcagttcgaggacaagcgccccgccatcgtcatcggcggcgacgcaggcagcttcctcggcgagtacctggcgggcggcgtcatcgtgctcttgggcaagccggggcgccacctggccaccggcatgcacggcggcgtgatctacctcaagcaccgcatcgccgatgacgaggtgtcggagggcctggtgcaggaaccggtggacgaagccgaccgcgccctcatccgcagcctgctcgaacgctacaacggcttcttcgccgccgacctcggcgcgcccgtcgacgccaccggcgagggcttcttccgcctgcgccccgccaccgcccgcccctacgccagcatgtacgccaactgataagaccccttcgtcatcccgtgggaagcggcgaagggcgaagccgaagaatcccgtgaggcgccagccgcgaggtttccagccgctgcacgggattctttgtgctaagggggagggacggcgtcaggcggttgcctgcgtcgagggctcttcgctttcggatcgttccaagtcacagttttggccgctgtgaagccttgctgcgacacccgacggcgaaccgctctgcgtcacctggccgaacgacttgtcccggtcgctgctcaggcgctcagacggcccgcagagcgcaaaaaggcttcacagcggccaaaactgtgacttcgagcccggccttttgcgaaactgccctccgttggaaagggaatcggcaaggggactgccaagagaaccgtctttgacgcgtcctgctgagagaacgtcccttcatcatcctgctccgtctatgtgatggcatttcctcatcctcgtcgggagacggcagcgctgacgaatcccaagaacagcgggtgggggcgggtggggcggctcttgaactcggggtggccctggctggccacgaaccagggatgatccgccagctccaccatctcgacgagccggccgtcgggagacacgcccgacaccgtgagccccgcctcctgcagcgcgtcgcggaacgcgttgttcacctcgtagcggtggcgatgccgctcgtagaccacctcttcgccgtaggcctcgaaggcccgcgtccccggcagcacgcggcaggggtacgcgcccaggcgcatggtgccgcccttgtcctccacgtcctcctgctcgggcatgaggtcgatcacgggataggcggcttcggcgccgaactcggcggacgtcgcgtccggcatgccggccacgtggcgcgcgaactcgcacacggcggcctggagccccaggcagatgcccagaaacggcacgccgttctcgcgcgcgtagcgaacggcggcaatcttgccctcgaaggcgcgctccccgaagccgccgggcacgaggatgccgtccgtgtcggccagcgcctcggccacgttcccctcgtcgatctcctcgccgtccaccaagcgcatgtccacgtggcggccgtgcgccacgcccgcatggccgagcgcctccatcacggacaggtacgcgtcgggcaggctcacgtacttgcccaccacggcgatgcgcacctcgccctcgcaagcgttcgcggccgcgacgaacgagcgcagcggcccgaggtcggcctcgcgcggctcgagccccaaccgggcgagcaccagctcgtcgaagcgctggtcgtgcagcacgagcggcacctcgtagatggacggcgcgtccacgcaggccagcacttcctccggtcgcacgtcgcagaacagcgcgatcttctcgcgcacggggtcggtcacctcgtggtcgctgcggcacacgatgaagtcgggctgcacgcccagcgaccgcagctccttcaccgagtgctgcgtgggcttcgtcttcgcctcgtgggcggcggtgatgtagggcactagcgtcacgtgcgcgaacagcacgtcgccggcggggtgctccttcttgaactggcgcgcggcctcgatgaagggcagcgactcgatgtcgccgatggtgccgcctatctcggagatgacgatgtcggcgcccgactgctcggcgatgcggcgcaggcgctccttgatggcctcggtgacgtgcgggatcacctgcaccgtgccgcccaggaagtcgccgcgccgctcacgcgcgatgagcgagcggtagatggagccctgcgtgaagttggactcgcgcgagaggttctcgtcgatgaagcgctcgtaatgcccgaggtccaggtcgccctcgtggccgtcctcggtcacgaacacctcgccgtgctggaaggggctcatggtgccggggtccacgttgaggtaggggtccatcttctgcatggtcacgcggtagccgcgcgccttcagcaggtgtccgagcgatgccgcggtgatgcccttgccgagcgacgaaacgacgccgccggtcacgaaaatgtgctttgccatagctctcctcacgttcaaaggcgtcctccaaacgtctttcgattgtaggcgacgccgccgcccgccgcctgccgcgccccatgatttcacctgcttgaaacacaggcgccctttgcgcccgtcggcgcgcggctcgatgtaacacgagtttaccgagtggaaaactgctcgaaacacgaggccggtagcgtgaggggggaagtgagaacaggatgggccggcgaacggcgaccggcgccgacgagtaaggagcgcgcgacatggcgaaggtttcggagatctacggctcgatggtgttcaacgagcacacgatgcaggagcggcttccgtccgccacctacaagagcctgcgcaagaccatcgaggaaggccagccgctcgacagagaggtggcgaacgtcgtggcgcacgccatgaaggagtgggccatcgagaagggggcgacccacttcacgcactggttccagccgctctcgggcatcacgtcggagaagcacgacagcttcatcgacccctgccccgacggccgcgccatcatgagcttctcgggcaaggagctgatccagggcgagcccgacgcgtcgtcgttcccctcgggcggcctgcgcgccaccttcgaggcccgcggctacacggcgtgggaccccaccagcttcgccttcatcaaggacgaggtgctgtgcatccccaccgcgttctgcagctacaccggcgaggcgctcgacaagaagacgccgcttttgcgctccatgagcgccatcgacgagcaggccaagcgcgtgctggcgctgttcggtgaggccccggcccgggtgaccaccaccgtggggtcggagcaggagtacttcctcatctccgagaaggactacgccaagcgccaagacctcatcatgtgcggccgcaccctgttcggctacccgccgtgcaagggccaggagctggaggagcactacttcggcgccatccgcccgtcggtgaacgagttcatgaaggagctcgacgacgagctgtggaagatcggcgtgtccgccaagaccaagcacaacgaggtggcccccgcccagcacgagctggcgcccatcttcaccaacagcaaccgcgccatcgacgagaacctgctcacgatggagaagatgcgcctgctggcatcgcatcacggcctggtgtgcctgcagcacgagaagcccttcgagggcatcaacggctcgggcaagcacaacaactggtccatctcggccggcaagaccaacctgctcgacccgggcgagacgcccatggacaacctgcgcttcctcgtgttcctcacgggcgtcatccaggcggtcgacgactaccaggagctgctgcgcatgtcggtggcctcggccggcaacgaccaccgcttgggcgcgaacgaggccccgccggccatcatctccatcttcctgggagacgagctgggggccatcgtggacgcgctcatcgacggccacgcctacacctcggccgacaaggttgccatggacctgggcgtggccgtgctgccgaacttcctgaaggacaacaccgaccgcaaccgcacctcaccgttcgcgttcacgggcaacaagttcgagttccgcatgcccggctcgaacgtgaacctgtccgactgcaacatgatcctcaacaccgcgatggcgaagagcctcaagggcttcgccgacgcgatggaggggaaggcaggggaagagttcgaggcggccgccatcgcgtacgtcaaggaaaccctggtcgagcaccagcgcatcatcttcaacggcaacggctactccgacgagtggccggccgaggcggagcgccggggcctggccaaccaccgcaccaccgccgacgcgctgccgtgcctcgtggcgcccgagagcgtcgcgctgttcgaggagttcggcgtgctctccgagcccgaggtgcgcagccgctacgaggtgaagctggagaagtacaacaagctcgtcaacatcgaggcgcgcacgatgaagcgcatggtgcgccgcgcctacctgcccgccatcaacgcctacgccgccaaggtggccggccatatcactgcggtgaaggccgcgagcgccggagccgacacgggccagcaggagaggctgctggagaagctgctggccggcgtgcgcgagatcgacgcgcagctgcaggtgctcgacgccgcccaccacgccaacatcgagatggccgatcagcaacggcgcgcgaacgacaacgcgcaccatatcctgcccatcatggacaagctgcgcgtcgccgtggacgccgtcgaggtggtcgtcgaccgcgaccactggccggtgcccacctacaacgatatgctcttctacgtataacgttccggcggcttgccagccgccggaactgctcgacgctgcgaaaggccctggaacccgatcttgcccctctttcgcttgccttcgcgtaccgaagtacgctcagccgcgaaatggggcaatctcgggcaccagggcctttctcgctgacttactacgccaacctgggcgaatgaagtaaaaagaaaccggatgccccacgtggcacccggtttcttctttgatccgacagcttgcggcggtgcccccttacgccatggcctccttgatgcggcgcgcggcttccagcaggcggtcgtcgggagtggtgagcgagatgcggatgtagccctcgccgtccgggccgtagccgctgcccggcgtcacgatgacgtgcgcctgctccaaaagcttcgtggcgaacgacgcgctcgtctcgccggccggcaccttcgcccacacgtagatggtggccttcggggtgttgcattccaggccgatggcgcgcagggcctccaccaccacgtcgcgccggtgttggtagagcgcgcagaggtcggccacgcactgctggtcgccggagagcgccgcgatggccgcgtcctggacggccgtgaactggccggagtccaggttgttcttcaccgtgccgagcgcccccaccgcctcagggttgccgcaggcgaaggcgatgcgccagccggtcatgttgtaggacttcgacaggctgaagaactcgatgcagcactccttggcatgcggccgctccaggatggagggcgcgcggtagccgtcgaagcagatgtcgcagtaggcgttgtcgtgcgcgagcagcaggtcgtgctcgaggcagaacgcgatggcggcgtcgaagtacgcttcggcggcgcaggcgccggtggggttgttggggtagcccaggaacatgatcttcgccgcgtccagcacgtcggcgggcacctgcgagaagtcggccaggaagccgtcctcctcgcgcatgggcatgaagtaggtgttcgcgttctgcatcagggccccgccggagtacaccgggtagccgatggacggcgcgagcacccagtcgcccgggtccagataagccgtgtgcaggtgcgcgatgccctccttgctgccgatgagcgcgagcacctcggtggcggggtccacctccacgccgaagcggctgcgcatccagtcggcgcacgccgtgcggtacgcgcgcgagccggcgtagtcggggtagcggtggttcgcggggttgcggatggcctcggccatggcgtcgacgatgtgcggcggcgtgggcgtgtccgggtcgccgatgccgagcgagatgacgtcgacgccctgcgcctcgagcgcgtcgcgcttggcgtctatctgggcgaacaggtacgggggcatgcggttcaggaatgcggcggttctcatgggcccttcttcctctctgttgtcacacgttcacggtgcccgcgaagctttcggcggcgggccccgtcatcatcacatggccgtcgtcggcccaggcaacgtgcagcgtcccgccgcgcagcagcacgtcggtctcgcggcccgcgcggccggtgaggcaggcggccacggccgtcgcgcacgcgcccgtcccgcaggccagcgtctcgccgcagccgcgctcgaacacgcgcatcgcgatgccatgcgggcccacgacggcgaactccacgttggtcttctcggggaaggcgggatgcgactcgaagaacgccccgaccgcgtccacgtcaaactcgtcgaggccggtcccgtccaggaagcacaccgcgtgcgggttgcccatggacacgcagcagaacgcgaacgcgccccacggcgaatccagctcgagcgcgcctgcgtacggatcgccgaagggggcggtcgcgtcgggctcggcgctcaccggcacctgcgccgggtcgagcacggggcgtcccatgtccacggtcgcgcgcgtcatcttccccgtgccgtccaccgtaaacgtgatgggccggggcccggccagcgtgtcggctgtcagccttcggtcctctgcgggcacatacccccgatcgaccaggaacttcgcgaagcagcgcaccccgttgccgcacatctgcgcgagcgtgccgtcggcgttgacgtagtgcatgtaggccgcgcattcgggacgcgcggacggccgcaccacgatcacgccgtcggcgccgatgccgaaatggcggtcgcagaggcgttccacctccccggacgcgagctcgacgtcccgcgcgagcccgtcgatcatgacgaagtcgttccccaggccgtgcatcttgacgaactcgagcccctgccgcatgcgcgctccttccgatcccgggccgttcccgccatggtagccccggatcgccgcgtacgcgcctggatttaacgcgatgtttacgctgccccgcatatcggcgattctgcatgctccgcctgccagccatccggttccgcctgcccgcccctgtttcccggcttttcgcccagatatgctacctgatcggcagcgtttcccgaccgttgacggctttccacaaaacgccgactgacacgcgtgcgggcagcacgctatgctgggctcggcgatccttcgagatcgcccggttgggaagggcggcgcgacgccgccggacgaaaggatgcgcgcaatggagaaccccgcacagaaatcctaccagctctacatcgacggccagtgggtcgacgcgtcggacgggggcacgctcgacgtgttctgcccggccaacggcgagcagctgtccaccatcgccgacgccaccaaagaagacgtcgaccgcgcggtcgatgcggcgtggaaggcgttcgagacctggggcaagaccgacaaggccgaacgcgccatcatcctgaacaaggttgccgacatcatcgaggccaacgccgagaagctggcgctgctcgagtcgctcgacaacggcaagcccatccgcgagacgcgcgccatcgacgtggcgtactccgtcgaccacttccgctacttcgccggcgtgcttctggccgacacgggcgaggccgatatgctgcccggcaacatgatgtcgctcgtgctgcacgagcccatcggcgtggtggggcagatcgtgccgtggaacttcccgttcctcatggccgcctggaagctggccccggtgctggccgccggcgactgcaccgtgttcaagccctcgtccaccacctcgctcacagtgctggagctggccaagctcacccaggacgtcatcccggccggcgtgttcaacgtggtcacgggccgcggcagcaagtcgggccagtacatcctcgacaaccccaagatcagcaagctcgcgttcaccggatcgaccgaggtgggccgcgacgtggcccgcgcggcggccgagcgcctcatcccggctacgctggagctgggcggcaagtccgcgaacatcatcttccccgactgcaagtgggacatgatgctggacggcatccagctgggcatattgttcaaccagggccaggtgtgctgcgccggcagccgcatcttcgtgcacgaggacatctacgacaagttcgtcgaggacgcctgccgcgcgttcggcaacgtgaagatcggcatgccgtgggaggacgacacccagatgggcagccagatcgaccaaggccagatgaacaagatcctcgagtacgtggagatcgccaagcaggagggcggccgcgtcctctgcggcggcgagcgcgccaccgagggcgacctggcccgcggcgcgttcctcaagccgacgctcatcgaggtgccgagcaactcgtgccgcgtggcgcaggaggagatcttcgggcccgtggccgtggtcatcaagttcaaggacgagcaggaggtcatcgatatggccaacgactcggtctacggcctgggcggcgccgtgtggacccgcgacatcaaccgcgcgttccgcgtggcgcaaggcgtgcgcaccggccgcatgtgggtgaacacctacaaccagatcccctcgggcgcgccgttcggcggctacaaggagtccggcatcggccgcgagacgcacaagatcatgctcgagcactacacccagacgaagaacatcatgatcaacctcggcgaggagccgagcggcttctatcccgagaagtagcggcggactgacaactcggattggcgaagcgggcggcagcgatgccgctcgctttttcttttctccccttccactccgcgcggcgacgcgagccccccctcgcaggtcctcttgccagcgcggcctccagatccgacgaggcgctttcgagccgggattcgcgttgggcaatcgcccggtgtcggaacctcaaacgttcggcaacggagtgcgcggcgctcggcgtttccgcagtatggttgctgcatcgcaaccggcgaaacgccggtcgagccctgcgccacctcgtgcagcggcggatatccccggcctggaccatgcgcgccaagcaagcccgcacacactcatccggcggggctacgacggaatagagagaaaggtacgtacatggcatccatgctcaaaaggctgtcgggcgcgctcgcggccctcgtcgccctcgcgctgatggctcctatgggagcggtttcggcgctcgccctcgacgcgggcggcttggccgacgacggcagcgcctcgatcacggttcacaaatacaagacccagtcggcatccagcacgccgggcacgggcgagaacggccaggggcttcccgtgggcgcccagccgctcgagggcgtgagcttcaccctctaccggctggacaacgccaaggtggaaggcgccgtggctgggacggccgccccggccggcgctccgacggccgacgacgtcgcggcgttcttggcgacctaccgcgataacgggttcgcccccaacgtgcagacgacggaccccgacggcacggccacttgggccagcctggcgttcggctactacctgctcgtggagacggacgcgggcggggcgaacgtggacccggccgttccctccatcgtgacggtgccgtacgcgcgccaggcgatgggcggatccacgtcctacgccaaggacgtgcacgtctatccgaagaacgtgagccgcgaggaagtcgagaagaccgccatcggcgcacccgacgtcaccgcccccggtgagaagctcgagtaccagatagcgttcatggtacccgaggcgggcaaggtgcatgcgagcgacgcggccgccatgaaggccacggtggtcgaccgcctgccgctcaatgcggcggggcagcccgtcctcaccgtcaacccctctttcaccgtgaccgcgctctccaagggaggcgacacgaccgcgctcaatgcgggcgatatcgtcttcagcgacacctcggcctccgatgggctggtcacgtggacgttcggaccggaaatcgcgaaggctatcgagggtatcaacagcacgaacgcctccaatgtggacgggcaggtcgtgaaagtgctcctggggatcacggcgacggtgaacgacaacgcctacaacggcggcatcgacgccacagggcaaccttccatcgcgaacaccgccgtcgccaccgtcagcgactcggacggcacggtgatgatcgacggcaaggagagcgtcaccccggccgtcaccaccatgggcttcaaactgacgaaggtggacgccgacggcaatcccgtcacgtccgactcggccacgttcaagctggccgcctcctacgccgacgctgtcgcgggcacgttcatcaagaacgggtcgacgtcggcggaccttacggcgacgtcgagcctggccgacggcacggcggtgttctccggtttgagcgcccgggccctcacctcgggcggtgccgcctacacgggcatcggcgacgcggtggcggcggcgcgcgcgaacctcggcgcgccccagacggtcgagctgtggctcgtcgagacggacgcgcccgacggctaccgcatcctccaggcgccccagaaggtgacgctgaggatagcgaaggccacggccgacgccacggtttcctcgacggtcgtggacggcccgctgtccgtggtcaacaccatgaacggccaggagggcggcggcaacttcgcgctgccgaacaccggcgggatgggtgcggtcgccttcctcgtggccggcgccgccttagtcgccttcgccgtggccagcttcgcgcggtcgcgcaagggcggcaagcacggcccgtccggccggtaggcaacggggctgcacccgcatgggcatcggaaaactcgaaagaacgcgccgcgcgccgcatggccgggcggcagtgcggccggcgctgctcgccgccccccggctgttgctcgccgccctcgtggtgctggcgtgctgccttcccgcagggtgggctccccgcgccgccgcgggcgaggagtccgcgcctgcggcggctgccgcggacgagggcgcctcgggcgcggagggcgacgagcccggcacagcgcccggctccccggatggcggcgtcccgcaggaggatgccggcgggctggacgaagacgccctctcctccggcgccgacggggccgcacccgagccgccgtcggacaacgcggccgctcccgagccggccgtcggctccgagcagcatggagaggaggaccgcgtggccggcgccgcgctgtacgtctcgtctgccggcagcgacgccgacggcgacggaacgcgcgagaagcccctcgcgacgctcgcccaggcggtgcaacgagccgacgcaggctcgcaggcccagatagtcgtcatggacgacctccaggccgcagccaccgccgtcgtcggcgggaaggacgtcgtcgtgcgcggggagcccgacgcctcgggcgcggcgccgacggtcgtcgccggggccgccgacgtgttctcggtcgccacaggatcgctcaagttggagggcatcgtgatcgacggcgcctccgtcccggcggaccaccgggtggcgaccgtgacgggggagggcggctcgctcacgctgggcctcggcgccaccgtccgcaactggagcgccgtcggcacggccggggcggtgcgggtgcgcgccaacgcgggtcgttcaccatgctcgacggcagcgcgataagggattgccggctcaaggcatcggcggcgggtgccggcggggcggcggcgagcgtgtcggccgcccgcagcagcggcgccagcaccgtgccctccgcatcgtaccgggcctcgttcgccatggaggagggcgcgtccatcgtaggctgcaccaccaccatgacggccaacgcgacgttctccggcggcggcgcggttcgcgcgacggatgcggacgtgtccgtggggaaaggcgccagcataagcgggtgcagcctggagtaccgagccgcgtcgggcgccctcatcgatgccgtgggcacggttcagggcggcggggccctcttcgcgaacaactgcaaggtggacctcgccggctcggtggacgactgccacatggtcagcgccgagaacacggggaccggcgacttcttctcgggcggcggcgcgctgttcgtctacgactacggctgcaccacggccgtcggggtcgattgccggaccagcgtgagcggcaccgtcacggggtgcacggcgctcgcgggcggcggcgcgttctactggagccaagccgacggttacgaccagggcgacaacctgtgggtgggcccgagcggccccttgacgtccgccgaccaggtggtcgcgcgggtactcgacgcgttcacggtgagcgggacgttctccgaatgctcgacctacgacgtcaacaacaggcgcacggcctcgcttacgagctacgctgactacgagcgctacggcatcggcggcggggccgtctgcggggcctacaccggcctggtcgtgctcgacggcggcgcgctcctgcagagctgctccacgggcagcgagggcggcggcgtgtcgagctggggcacgtcggtgttctgccttgaccggacggccgacggccgcggcgtgccggcagtgctgggctgctcgtccggcggcatcgccggcggcgtgagcgcgggcgcctccgcgcacatcgagaacgtcacggtcaaagactgcaaggccggcacgctcggcgggggcctgtacatctacagcggctcgacgacgctctacgactgcgacgtgtccggctgcaccgccggcacgtacggcggcggcatcatgcagcacgtcgtgcacgacctgttcatgtacggcggcagcgtgaccggcaaccatgcgggcacgggaggcggcgggatcgcgctggtggggcattggggagggacgccctcggcgccgcgcggcctcagcttcaactaccctgcgagcctcaacggcggctacacgaacccggtctactacaagacggccatcctgcaggacaagatcgtggcgccgtcggtggtggcgggcaacacgcaggcctcatcgaaagcctccgatatctggacgcccccgtcgagccccgtcacgcgcatcgcggcgtcgggcggcttcctgcccgggtcgaaggtcggcgtgacggtttcagacggctcgagcgcctacaacaaggcgcggacgcagttcggctcggcctcccagcctaacctcgacctgtcgcccttcgcgagcgatgtcgacgcgacgctcgtcgcctcctacagcggcagcaccctgcgctgggtggagggcttcaccgtttcctacgacgccaacgttccggcgggcgctaccttggagggaaagccgcccttcgacggcgtggcgggcatcccgagcgcctacgcccgcagcggcgggacggccacggtgcagggcgcgggcacgctggcggcgaggggctaccggttcgtcgggtggagccccgtcgcctcgtccgaggaggcgccctatacgcccggcgacctgcttgcctacagcgcggccctcgatgccgacggcgacggccgcatcgtgctctatgcggtgtgggagaaggcccctgtgcgggcggacgtgtcgttcgtgaaggtgggggcagaccaagaggcgggaacccgcatgcccctggcgggggcgaggttcaacgtgtaccgctacgtgggcgacgtcgagctggggccggacaccgtgaacggcggctccatagacctcgcctcgccgggctctgcccagtgggccgccgtgatggggccttccggcgaggaggggcagccgggcggcctcgacgagccctacgccttcgtttcctccgacgggtcggaaccgggcgcgccggccgggacggtgacgctcgcggggctttcgccggatgcttggtacatgctcgtggaggcgtccgcccccgcgggctaccagctgccgacgggacagtgggcgttcagggtggtcgagtcgcccgagggatcgggctcctacgccatcgacgcgtccacgctgctcgcccgccagggctcggacgggtcgctgccgcccgccttcgcttcctccatccaaacggccgagggtgcgcgcgaggggctcttcctgccgaacgtgccggtgttcgagctgccccggacggggaccgcgccgtggcgcctcctgctcgccgccgccggcgcgctcatggcagcggtgggcattgcgctgggatcgagggccaggaggagccgcgcgtgaggtccgcctgcccgcacccccccgcaccccgaccgcctgctgccgcccgcccgcaccgccgccgtcccgaccgcgcgccggccccttcccgcccgcggcaggccgtcgccgcagcgtgcctggcggcaggcctcgccctcatgctctacccggtggtgggaacgctgctcaacgagcggtcgttcaccgacgcggtgggccgctacgaggagcaggcggccgcgctgcccgaaaaggagcgccaggagatgctggctgcggcccatgcctacaacgacagcctgcggggcgatcccgtccacgaccccttcatcccgaacagcggctgggcgcagcccgaggggtacgacgacgtgctggacgtggacggcgccggcctcatgggcgtggtggaggtgcccgccatcggcgtgcgcctacccatccgccacggcacgtcggacgaggtgctggcccatggggcgggccacatcccccagacgtcgctgccggtaggcgggccgggcacgcacgccgtgatcacgggccacacggggctgcccacggcgcggctgttcgacgacctctcgcggctggaggtgggggacgtgttcgtcgtcgaggtgttgggcgagaggcacgcctacaccgtggacgacgtgcgcgtggtggagcccgacgaggtggacgccatccgcatcgacgggaaccgcgacttcgtcacgctcatgacctgcacgccctacggcgtgaactcgcatcgcctgctcgtgcgcggcgaggcctgcgagctgcccgcagaaggcgcccccgcccctttccgaccggacgtcttgccgtggatcgcgggcggtgccgtcgcggtcgtcgcagttgccgtgggcaccgccgtcgcgttccgggcggcccggcggcgaaggggccgtcgctgaaaagggcgggcgccatgcgggcggcgttgtcgcgcacggcccgtctacgcggcggttgcggctcggtgccgaaacgcgcctctgcccttgcccgtgccccgcccgctttagagtggtttcccatgtaaaccccctaattgataggagcctgcccatgagcaccctcatcgtgctcggttatccgagcgaagaagaggcgaagtccgcctaccagaaggtcctcgacctcgacaagaacctcatcgtcagcctgcagtccatcgccgtggtggcgcgccatgccgacggcaagtacgacgtggtcacgcccggttccaaggtgggcacctccacggtgtggggcctgttctggggcgtcctgttcggcctgttgttcttcgtgcccgtgttcggcgcggccatcggtgccggcatcggcgcgctgacgggcgccatcgtgaagcacggcgtggacaaggacttccaggaccgcgtgcgcaacctgctgtcctccgacgacagcgccgccgtgttcatggtggtggacgagatgaccaccgacaagttcatcgacgccatccgcccgttcggcggcgacgtgctgcagacctcgctgtccgtcaaggacgaggacgagctcaagcacgccctcttcaagaactaggcacggcgccgcatccccctgcgtgcccgattccgcgctccccaacgacgaagccgccccagccgggcggcttcgtcgtctccgcgttccctgccggccgggctccggcgctccctcgcgcatccggctttcgcagcccgccccgaggcagcccggcgccgccccctacgctcgcgccttcttgcgcagcccccaggcgtacagcaccgccatgatcacggcggcccctcccgtgagcaccacgatgcccacgacgaagttcgtccacggcagcgtggccagcacggtggccaccgacgtgaggatgctgtacgagaagttcgagaacgacgacgccgcgcccacgcggtcgtcgggctggtccagcagcacgacgaaggccatcggccgcacgatgccctcggccagcgcgtagggcacgaaggccacgaggaacagcaccgggctcgccgtgccgaacgccgccatgagcgcgaacgagagcgcggtcagccccacgcacagcttcaggatgccgcgaaccttcatggacttggacagccatacgtacacgtagggcgccgcgatggtgaccacgcacgccgcggcgtagatgcagctgtacgtgaagtaggacacggcgaagaagtccatgagcacgtaggacaccacggcgatgaacgcgaagtacggcatgccggccacgcccatgagcagcgcgagcgccatgaacgagcggtcgccgccaagcgcgcgcacgccgcgcagcatgtcgcgcagcgagtccgccacgccgggggtgggcgcatcgccgcgcaggtgcgtctcggagatgagcagcgacagcaggaaccctatgacgccgcacacggccaggaactcgaagatgccgcgccagccggccaggctcagcacgaacgtgccgaggaacggcgcgagcgccggcccgatgatgatgagcgactgtaggcacgtcatggcgagcttcaggtcgggccccgcgtaggcgtccttgatcatggccgtctcgatggtggacaccgcgccgtagccgagcgcctgcccgatgcggaaggccacgaggaactccacgttcggcgcgagggcgcacaggatggacgatgcggcgaacaggccgcagccggccacgagcacgggccgccgcccgaagcggtcgctcaccggccccgcgagcaccacgcccacggcgcagaacgcgaagaacacgaacaccgtcaggttcaggtaggccgccgacacgtcgaaggcgcgctgcatgctgggcagcgccggcacgtacatgtcgatggacaggatgagaagcaggttgatggagagcgcgcagacgaagaacgagcgcggccccaaatgcttctggggaacggaaagctgcatggaaggtctccttggacggttctcgcggccgcgcaggtgcgcgggctgttcgccagtatagcaccgcctcctgccgtttggcgcgttgaccagcacttagtctcaaatcgagaaccctgcgcgcacgaggtgcaaagtgcgagaaggaggggcatcttgagacggcccgcggacgcacccgtgcggtgccggccgctgcgtccgacgcgatgccggccgccgcacccgatgccgccgacggccggaagctcccgcgccggcgcgccccgagctgcgcccccgcgccttccgcgccccgcgcgggctcgaacgccgtttcaggggtgcgccccgtcccgtttcgggggataatggccggtatacgatatcgcgacgagcaagaggggattgccgtatggacgagaacaagctggggaagaagataaccacgctgcgcgaggcgcaccacctcacggcgcaggacctggccgaccgctgccagtgcgacctgccggtcatcgagggcctcgaggcgggggaggtgccggcctcgctcgcgccgctcatcaagatcacgcgcgcgctgggcgtgcgcctgggcacgctcatggacgacgacgagaacctgggccccgcctacatcgacgtcgagcagatgcgcgaggtcgagcgcacgaagagcctcgagaccacctccggcggcgacctcagctacttcagcctggccgccggccgcccgtcgcgccatatggacccgttcgtcatcacggtggacccgcgcggcgaggccgaccacgagctggtgggccacgagggcgaggagtggctctacggcatggaaggcgagatcgagatcgagtacggcaaggagatctacgtgctccatcctggtgagagcatctactacgactccatcgtgccgcaccaggtgcgcgctcacaacggccagaaggcgaagttcctcgccgtcgtctacaccccgatctaagggaggcgacatgacgaccgaggaaacctccgcgcacgcccccgtcccgggcgatcccgactacccgctgcactccgagaagaccatcggccgctacttccgcgaccaggtggccatcgaccccgaccacgagttcgtcgtgtaccccgaccgcatgctgcgctggacgtacaaggacttcgacgagcgcaccgacaacctggcccggggccttctggccatcggcctgcgcccgggcgaccacctgggcgtgtgggcgcgcaacatccccgactggctcacgttcatgtacgccaccgccaagatcggcgtggtcatggtcacggtgaaccccatctacaagtcccacgagctggactacgtgctcaagcagtccgacatgaaggcgctctgcgtcatcgacgcctaccgcgacgtggactacctccagatcatccgcgagctcgtgcccgagacgctcacccagcagcgcggctacctggagtcggaggcctacccctgcctcaagcacatcatctacatgggccccgagaagcaccgcggctgctacagcgtgcccgagctcatcctgctggggcagcacgtgccggccgacgcgctcgaggaggccgagacccacttcgacaacaacagcgtggtcatgatgcagtacacctccggcaccacgggcttcccgaagggcgtcatgctcacgcaccgcaacatcctcaacaacggcttctacatcggagaaggccagaagctcacggccgacgaccgcgtgacgctgcccgtgccgttcttccactgcttcggctgcgtgctgggcgtcatggccaacctcacgcaccgctccaccatgatcatcgtggaggatttcgacgcagggctcgtgctgcaggccatccacaaggagcgcgccacggccgtctacggcgtgcccaccatgttcatcgccgagctcaaccaccccgacttcgacacgttcgacctgtccagcctgcgcacgggcatcatggccggcagcccctgcccgccggaaacgatgcgcgaggtcatggacaagatgtacatgaaggagatcaccatctgctacggcctcaccgagacgagccccgtgttcacgcagacgagcgccgacgacgacatcgagcacaagtgcgagacggtgggccgggcgcacccgccggtggacgtgcgcgtcatcgacccggccgacggccatatctgcgcgccgggcgagccgggggagctctgctgcaagggctacaacgtcatgaagggctactacaagatgccggaggagacggcgcgcgccatcgacgccgacggctacctgcactccggcgacctgggcaccgtggatgaggacggctactaccgcgtgaccggccgcatcaaggacatgatcatccgcggcggcgagaacatctacccgctcgaggtggagaacttcctgctcacgatgcccggcgtgctggacgcgcaggtggtgggcatcccggatgcgcgcctcggcgagatcgtgggcgcgttcatccgcgtgcgccccggctacgaggccatgaccgaggacgacgtgcgcgccttctccatcccgcggatcgcgcgctacaaggtgcccaagcgcgtgttcttcgtggacgatttccccatgacgccgtccatgaaggtgcagaagttcaagctgcgcgagatggccgaggagctggtgcgcgcggggaggtaggaaaggaaaggcggcttccaggagggcttgcttcgacgcagcccccccagcccctaccgccgcccctgcgcgagcagccggcagctcaggtggacgcgcagcaggtccgtgcccgcggcggcggggctctcaaggtcgatgccggagagggccttgatgcgcttcaggcggtaggccagcgtgttgcggtggatgaacagggcctcggccgtgcgcgtggcgttgcagccgctgcgcaggtaggccagcgccgtctccacgtacgcggcgccgtcctcggcgtcggcgcgcgcgagcgccacggcggcgtggtcgagcagccaggacgcgtcggtgtccagacccaggcgcacgcgcacgtcctcgaaccagcagtcgtcgtagaagcacgacagcgtggagccgaacgcgccgcccagctccgcgtcgtccacgaggtcgtaggcgagcgctgcctggtcggcggccgtgcgcacgagcgagaagtccgcgagcagcgaggagaacccggcgcggaaccgcggctccgcgctcgtctccacgtcgtgggccgcatgccgcgcgcggagcgcggccagcgggtagtcggcgtcgcgtgccaccatgagggccgcgtccccgtcgtcgaagaagcgggcgagcggatagaattcggccacgaggcgcatcgtctggccgcgcgcgccgacatcctcggcaggctccgcggcgccgaagcgcgcgacgaagaagcggtcgtcggcccgccagcccgctttcgacagggcgtactccagcacctgcggccgaaccgaccgcccgtccagcaggtcgcgcaggggcccgagtggctcctcggccggttgcggccggctctggagcggcatcacgagcgagagcaggttgcccaggtagtccacgagcgcgaagtcggccggctggaacggcgcgttcacgtccacgagctcgaagcagccgtagtacgcctcgccgcacatgaggttgcgcacgaggtagctgcgaccgtcgccggtggcgttctccatgaggaacgcccggtcctgcgcgccggggtcggacgagcccgccgcccatgcctccatgcacagctcgatggggcacgcgcccgtcgcgatggccgatgtccacagcctgtcgtccagctcctcgggaagcctgcccgccaccagcacgaagtagagcgtggcgtccgagagcatgagcgggttcgcgaactgctccgcggcgatgtcgaacacctcctgcaaaggggcgtcccgcgccatggccgtgagcagggtctcggaccatgcgtccaggcgcaggcgcatctccagaaggcgcgcgagcatctcggccggcccgggcaggcccgggccggcgggcacgtagagcacgggcggcgcgtccgccttatccgcttcctcgggcggggcgtcggctcccagcacgaggaaggacccggcggcggcgaaggcgtcgtccaatgtgccgaacgaggccgcgtcgaccacgaaaaggctcccggtgcgcgggatgctcgagggcccgagcacctccacgcggtcgaggtcgagccgggagtcgtgccggtaacgggccgtcgggcccaagtcggcgagctcggcgagcacgaggtcgaggttgaaattcacggttgcctccttgggctgccacgtgcggtttcggccggcgagcggcaggggcgacgcgcagcgctcgatgacggatcggcaacgccgcctcctcgccgccctgacaattacctatatcatcaggtatatcttacgccattgttcataatgcacaaaatcggcggtccagatttcggccgacgggacgatgacgggcccccgtcgcctccatacactgtgcgccgtcgaaaaactaccatcttggtgaaaagaagagcgaacgaagagaggaaggaccgtatggagctgacgaggcgcgggttcctcaaagggtctgccgcgtgcggcgcggccgcggcggcgggcatgttctccacggggggctggctggccccggcgaaggcgtacgcgggcatcggcccggccggcgccgaggcggcggccgccggcaacgagtacacggcctgcacgtaccaccagggccattgcggaggcatgtgcccgctcaagtgcacagtgcgcgatggccgcctggtgaaggtggagccgaacacgtgcgtggacgaccgctacgagaccatctgcctcaagggcatctcggaggtgcagcacatctacggctcgcaccgcatccagacgcctttgcgacgggtgggcgagcgcggcgcgaacgagttcgagcccatcagctgggacgaggcctacgacgagatcgtggagaagctcaccgccctgcagaaggagcacggccgcgactgcgtcatggtgggcgccaccaccgaggcgagcttcccgttcctcgcgcccctgctgggcgcgcagaccggcggcatgggcggcatcgacaacggcacgggcaacggcctggacccggccatcggccacggcggcggctacgcctacgccacgggcgaggcgcgcgactgggtcaacgcgaacatggtgctcaccgtgggcagcaacttctgcgagtcaacgctgccgcaggtgcgcctgttcttcgaggccaaggaggccggggccaagatggtcacggtggatccgcacttctccaccacggcctcgaagtccgacgagtggatacccatcacgcccggcaccgacgccgcgctgttcctcggcatggccacggccatcgtggagggtggctggtacgacgaggcgttcatggcggcgcacaccgccttcccgtacctcgtggacgtgtccaccggaaagctcgtgcgcgaccacgccgaggacccggccgcggaggagccggagaccggcgagcagaaccccttcttcgtgtgggatgccgccgcgaacgcccgcgccccgtacacgagcgtggcgagccccgcgctcgagggcaccttcacggagggcggcaccacgtacaagaccgtgctcaccttcttcaaggagagccagaaacagcacaccctcgactgggcgtccgagaagacgggcatcccggccgcgcgcatcgaggagctcgcccgcgcctacgcccaggacggcccggccaccatcgcgctcgggtggggcggcaacgacaagatggccaacgccgacatcgccggccacgccgccgccgtgctcgccgcgctcacgggcaacatctgcaagcccggcgccaacatcggcgtgttcgtgggcggcgcgtggaacggctacacgggcgacctcgccagctgggagctgcccgagggcatggcctccgccgacgacgagatggccgcctacgacatgcgcacgaggcagaacaaggtgcgcgccttcatctgctgcggcgacttcctccagcagcactacgccaacatgaacgccacggtcgagtgggcgaagaagctcgacctcatcgtgtccatcgacccgtacttcaccgagggcgccaagtgggccgacatcgtgctgcccgcgtgcacgcgcttcgagaacgaggaggaggtgggcaacctcaaggtgggctacaaccagctggtgctgcagaacaaggtcatcgagcccttgttcgaggcccgcaccgacttccgcatccagcgcgagctggccgagcgcctgggcgcggccgacgcgctgcccaagacctcccgcgcgtgggtggacgccatgctcgagaactccgaggacccgtacctgagcgccctcaccgtggaggcgatcaacgagaaccacggcgcctatcccctggagggcatcgagaagccccgccaggcgttcccggacctcgtgttcggcaccccgtcgggccgcatggacgtgtactacgacaacctggtgggcttcggccaggcgctgcccgtctacgaggaccccgccgaggcctacgacggcaacccggcccgcgcggacttcccgctgcagctggcgaacgtgcgctcgcgcttccgcatccacaaccagttcgccgacgcgtcgtggatccagcagtactacgagccctacgtggagctgaaccccgccgagctcgaggcgcgcggcatcgccgccgacgacacggtggaggtgggcaacgggcgcggcagcttccggtgccgcgtgaaggcgaactcggccgtccgccccggatcggcgcgcatgatcgagggcgcctcggccgactacctcgcgtccgggaacctccagaacgtgacgaacgacaccatggtcgagcgcggctacgagctcatgaccggcccggtcatcccgttctcggacacgctcgtcgaagtgaagaaagcgtagggtgacaccatgacgaaactggccatagccatcaacaaggagcgctgcgtggggtgccacacctgcgccaacgcctgcaagatgcagaacaacgtgcccatgggcatgctctggaaccgcatcctcaccgagggcgcggacacgctcgacggcgcggtgggcgagtacccgaacctcacgcgcacctaccttcccgtgcagtgccagcactgcgagaatgcggcgtgcctgaaggtgtgccccacgggcgccacgtacaaggacgagaagggccgcgtggagatcgactacgacaagtgcatcggctgccgcatgtgcatggcagcctgccccttcaacgcccgcgtgttcaactgggaggagcccgtgcgcgaccccgacgtgaactacggagacgcgcgcgtgccggtgcggaacaagggcgtcatggagaagtgcacgctgtgcaaggagcgcaccgacgacggcgacgtgcccatgtgcgtgcgcgtgtgcccggcccgcgcccgcacgttcggcgacctggacgaccccgagagcgacatctcgaggctcgcccgcgagcgcgccggcagcgtgcaccatctgctcgaggaaaaaggcacccgcccgcaactcttctacataggctagggaggaaaaccacttatgaatttctcgaatctcaagaacctctcggccccgtacaaggtcgtcatgggcgtgctggccgtgctggtgctggccggcgtgggcgcctacgtgtaccagttcatgggcggcctgggcgtcaccggcatgtcgaacggcacgtcgtggggcctctacatcgcctgcttcatgttcttcgtggggctgtcggccggcggcctgatcgtggcgtcgtccgcgtccatcttccacgtggccgagtacaagaaggtggcgctgcccgccatcctcgtgtcgctcatctgcatctgcatcgcgggcgcgttcgtgctcatcgacttgggcggcatcgtgcgcatcctgaacctgttcgcgtcgccgaacttcatgtcgccgcttctgtgggacatttgcgtcatcaccacctacctggtcatcaacctcgtctacctgtacttcatgacgtcgaagaagcccggcgcgcaggacaaggtggccatcgtgagccgcttcgcgctgccggtggccatcctcgtgcactccgtgacggcctggatcttcggcctgcagatcgcgcgcgcaggctggtactccaccatcatggcgccgctgttcgtggcctcggccatggactcgggcctggcgcttctgctgctggcgcttctgtggatgaaccgcgccaaggtgttcgccacgtcgcgcaagctcatcgcgaacctggccggccttctggccgtgtgcatcgcggtcgacggctacatggtgggctgcgaggtcctcacgatggcctaccccggcacggagcacggcatggcggagctcggccagctgttcgccggggccacggcgccgttcttctggatcgagatcatcgcgggcgtcatcgtgccgttcaccatcctcgtgttcgcgaagaaccgccgccgcatgggtcttgtggcgctcgcgtgcgcgggcgtggtcgtgggcgtgttctgcaagcgcctgtggctgctgttcaccagcttcatcttcccgaacgtgtccggtgcgccggggctcatctcggggtcgtcctcgtcgcagggcgcggccggcatcgacgggtgggcggttgccagctcgtatatgcccacgctgcccgagatcatgatcgcggtgggcatggtggcgctgggggtgctcgcgttcctcgtgctgacgaaggtgttcctttcctacgaccccgcgccggcactggccgacgacgtggcggcggggttggccccggccgatgcggcgcccacggtgggcggtgcgccggccggcggccggccgtgcgacggcgttttcggcgcgcaggcgggcggcgcgccggtggaaaggccttcgcatgccgacgcctgctgaggtctggacgcgccgggctcaccggttcgcgttcttgggcaacagcctgctcgctccgatggcggccgatgccgcgttcgggctggacgaggcattttgggacgagtttgcagctggcgaggtcgagggcccgtccgtccgccgcacgctcgagcgcctgaaggcctacgcccgtgccgagcaggtggacggcagggagatcggggaagccgtgcggcgcgtgaacgtggagtacgcgcgcttgttcatcggcccgccgaaaccggccgcgccgccgtgggagacgatgtacgcgcaggctgggcaggtgggggagatcggcttcggccgcgccaccgtggccatgcaggacctgctcgccgaggccggcctcgtgctggcgaacgagaacaaccagtacgccgaccacctgggcatcgagctgctctacctggccgagctctgccattgctgcgccgccggtgcggacggcggggcctcgggagtcgctggtgatgcggacggcgggtcctcggctgccgcagtggccacagaaacgcgtgaggacgccgcagccgcggttgccggtgcggcggcggacgagccccttggctgcgaggagcgcctgcatgcgttcgtgcgcgagcacccggccgcgtgggcgccggcgtttcgcgaccgcgtggccgaggccgctcccgacggctacttcgcgccgctcgccgcactggtgtgcgacctgctggaagaactataaggggaaggcgcgaacaacgcgccttccccttgctttttcatgggcaaactcatagtgtttccgttacctttatgctatcatttgcgcagcatatcacgcgggagggtcccgcacctacgtaatggctggcgagaaacggaaaatcgaacatgaaacgcagtccccgcttcctctcggcggcattagccgtcgtcttggccttttcgctgttcggcatcccggcgtatgctgtcgatgctgataccgacgacgctactccggctccgcaggagtcccaagaacctgcagccgaccccgcggctcccgaggtgccctcggatactccggcggttgtcgaaaacaacaccctgccgcccaacgcggaccagcccaagaacgaggcttcctccgacccggtgggctcgatacgcctcaccttggtcgagggccgaacggccatcgtagactccgcggcgggtatcagcgcagggtacactgtctcgctcgatggtgccgatggcttccatcgcaccgcgacgggcaatccctctacggcgaacctgcaaagcaccgtccgcttcgacggcctggccgacggcgcctacgagctcgcggtgagcgcgcccggtttcctgacgtaccgccagcagatcgaaatcaaagccgacgccgtgtcgcttgagctgcgcacgggtgactttaaggtgaacgaagaggcggcgcaccccggcctgatggtgtcgggcgacgtgacgggcgatggcgttgtcgatgtgtacgacgccaaggctgtcatcgatgccctcgagtccctcgattcccccgacgggcacgatcccgcatgcgacctcgacggcgacggcgccgtgacgctcgttgacttggagatcgccgctgcgaacatcggcaagacgcaggtgaatgccacccttacccgcacggtttcggctgctgcggtgaaggcgacggcgaacgaaggcgttgaggtttcggccgatccggcttcgctgctcaaaggagaagaatcggtcatctttgagtctaaagatgcgatctcggatagcaatcctgtcgtggtcccgctggcggcatccggcgtgtcgaggcgctgctgaagggcgtcgacgggcttctccacggaagccacgtacaccgacaacgcctcgtcgctcggcaatcgtaccgtagcctatgaggtgacggcggtggacaagttcctgaaccgctcggcagcgaagacgctcgaccccgtgaagctttccggcaacggcctgcaggacaagaccggttggacggtttccacgaacatggtctcgcagcaagacgtggtgccgccgtctaccgacgacgaccccgacgcccccgagccccagctggcttcggcacttgccgtggacggcaaagccgacaccgtgttcgcgggagtgtccgcaaaggaggatccctccttgactatcgacatgggcaaatcgacccaggtgacgtcggtgcgctacacgcttgaaggtgcggatgcggccgccgccctgggtgcttaccgcatcgagacgagcttggacggggaggcctacacggccattaaggaaggccggctgcagctgggagacgatggcacggcaacgctctacttcgacaacggcgacgatccgtggatctgcacctatgacgcacgttacctgcgcatcacgggcgtgggccaggcgggcaagacgcttgcggtgggcgagatcgacgtgtccgggccgtccggcgacaacgtggacttcctcgcggccggcgaaggcgaagccatcggcatcctcaagagcgacttcgtgtaccagcctgccatggagggccaggccgcgcgctcaatccccaaggggtcggtggtgttcgtgggcgactacaagggcaatccagcctacaacgtggtgatgctctacgacgcccagggcaacgtggtgggcggcgtcgatgagaacggcaacgtggtggcgaaccagatcatcctcgcgcccaaccccggcgatgcgttgctgggcgagacgtccgagggccggtgggtgtactggatcgagcctgcgatgctcaaggagatacagctacctacccaagtgcgcgccgagctctaccgcgtggacaacgcgctcacaaacgagggccagcgcctgacgagcgactcgctgttcgcgagtcggcccgaaacgctgccagagatcgagctgaccggcgacgtcgcgtccggcgcgaagaacgactaacccgagacgtgagaggaacggttgacgatatgatgagtacgatgaagaaatttgcggcaggcgccctcgcagcgtgcgcgctctgcctcgcgctggtgccgggtgccgcgtgggcggcggtggatcccgaggcggtgctccaaaaggtggacggctcggacgacgtggccgtgtccctcaagctgcccgagggcgctcgcgacaacgtgcgcatcctacgattgacgctgacggtgaagggcgccgacctcgatggggtggaggccggcttcgcgttcgacgggtcgttggacggcgtggcggtcaaggaggcgcgctaccggcatgaaggcagcgaaggcgtcttgagcttgtatttggccggcgacgcgaacttgtttgcgaacgacaccttagcactcggcagcgtgcgcctggcgggggaggaaggcgcgacggtcgagatcggcgtgggttccttgagcgtggtgaacgctgcgcacgatgcgtccgaccctgccgtgtactcgcagggatcggtgccggtggaactcggggccgaaagcacgaccccgaacccgcccgagcctcctgcgggcgaaggcgagggcaacgagcccggcaccggcgacaaccagggttccggtgaaggcaccggaacgggaagcggaaacgggggcacgggctccggcaacggttcggccaacacgagccccggcgcgcccaccggcacggaccagtcgctcgtgaccacgggcgatagcctcgcctcctcgcccgccgcattagggactgtcgcacttgccgccgctgccgtagtggctctcggcctcgtgcggctcggcaagcgccgctgacggcgccgctggcgccctttttcgcctacgggcgcttcttggccaagctgcccttcgcgcgcagcacggcgagggcgccccctgcgatgcccacggtgccgaccgtgatcccaagggcccaggcgaagccgggaatctggtcgttgccatgcgggggagcgctgtcgtctggcgcgctccggtacccgccggtttgcgcgccgttgccgcctgccgagcttgccccggtgcgttcctccctgccttcgctttccgcggcctcgtgcttctcggcgtcgcttcccgccccttctccgttcgcctcggaacccgaggcggcttgcgccctctccatgttcggcagcaggctcttcggcgtgctcccgggatccacgcgctcgctctctccttgcaccgcgccgccccggttgccgccgctgtcgccggcgcctgtttccggcgggttcacgatgttcggaggctcgtcgtcgggatcgccgggatcgtcggggcgccatccgccctcgtaggcgatgagcgcaggttcgaactcggtggtcgtcagcacgccgccctcgcgtgtcaccgcggttgcgcgcaggtagaagtcgcggtagtcgacggctttcgacgaatagctgacggtgcagtacagaatggtcgggtcttggtagttgtcgtcgaagacgggggagatgctgtccgcgcctgatgcgtattcctgccaatcctcatcccattcgaacgtgccccagcgctcccagttgcccggctcgtctgcatacgcccgatcgacgtagagcacttgcagggcggggtgcccggtatcctcgtcgcggcagtacggatcgaccggcaatgacggcaggtacagcagcgcgctcatgccgacatcggggatgatgcggatgacctggccgaacggctggtccacgtggccgatgccgcttccggggccgccggtcccgctgccgagggagcctccgccgccctcgctgccgggggcgatgcccccgacgccgcccgccatgccgccgcccggcgagccgccgagcgctcctcccgcctcggcatccgcccaagccgccgtcccgccgtttgcggccagcgcggccgccaagcccagggccgccgcggcgcgggcggcggggcggaggcgttttctggtaagatgccgcacggggtgtccttgtcgtcgggagggggtcgttgatgtcggttcgctcggccgtgcgcgcggccgttggcgcggcagcgatcttcctgctggcgggatgcctgctcgcgctggcgtactaccatgataacaaatacctttccccaccgccctatggggcgggcggcgtcctcgagctggcggatgccgacctcgggcgccccgtgcccctcgtggacggctggctgctctccgtcgacggcgcgtcgcaaatcgagacgttcatcggccagtactcaaacttctcctacgtgccgggcggcgcctcggccttcggaaccgccgtctacgagctcgagctgcgctacgtgggcaacgctcccgagcgtgcactcgtgctgctggtgcccgaggtgtacggagacttcaccctgtacgtggacggcgccgtggcagcggcgggcggcgacggtgcggaggtgggcgtcgtggtacgcgacggcacgcgcctcaagctggaggtggagaaccgggagcattactacagcgggctgtactacccgcccgtgctcggcacggcgcaggccatggggcggctgggcttcgcgagcgcgctcggcacctgcgtgctcgtgctgggcccccttgcggcggcgctgctctccttcgcggtgcgccgccggggcggcggcgatgcgctcctgcgcgacttcgccgtgctgtgcctggcgttcgcggtggccggcgcgcacgggttggcgtggcgcgcgggcatcgcgaacgcctggtggtacgccctggaggacgcggcgtgggcgtgcgtgctcgtggcggccgtggcgctggccgcccgcgctgcgggcctgccgtggacgcaggcggggcacccggccgcgcggtggggggcccgggcgctgtggctgctgccggccgtcacgttcgcctgggcggcggccctgcccgcgcttcccgcctccatcggggcgtacgccgcgttccagagcgcggtgcgcatcgcgtgctgggggctgttcgcgggctgcgccgtcgtgggcctgcgcaaccgcagcgccgaggcgcggttcgtgctgtacggctgcgcggtgctgggagccgccctcgcggcgaacctcctggacgacaacgcctacgagccgctgtacggcctgtggcagcacgagtacgcggggctcatgctggtgggcgtgttcgcctggatgctcgcggtgcgcgtgcggcgcctgcgggctgcgcaggagcaggtacgcgacctggaggtgcaggtgcacgccgccgaggcgggcctcgtgcacctaaggcacggcgagcgggaggcgcgcacggcgcgccacgacctgcgccaccacgtggccgccctgcggaggatggccgacgagggggcgtgggaggactgccgcgcctacctggacgagctcgcagggcagcaggacgccgcgccgcccctgcgctacacgggcaacgtcgtggcgaacgcggtgctggccgcctacctcgcgccggcgcaggccgcgggcgtgcgcgtggagtgcgacgtgcgcgtgcccgagcgcctgggcctgggcgccacggagctgtccgtgctgctgtcgaacctgctgtccaacgccgtggaggcgtgcgagcgcgcccgcgcggcgggcgaggacgagccgtacctggcgctctccatgcgcacgagcggcaacgtgctggccctgcgctgcgagaactcggccgagcccggcgcgtcgtttctggccacgagcaaggagaacccgcgcgagcacggcctggggctgcccgccatgcgcgagatcgcccggcgccaccgcggcgagctcttcgcggaggccgccgacggccgcgccgtcgtgcgcatcggcctcgcgctcgatgccggcggtgtcggcgggggcgtgcccgccggtccgggcggcagcgcttctgggggcggctccgctgacggcgggcccgtttccgccgaacccggcgccgccaccgtccgcggcgaaatgtggtgagattgcgagagccctgatcgcgtcactaggcaaccgtcgcagaatatggtataacctaccaagcaaacgcgcacgaggcgggtgagaggtacgtgcgcaccatactttcgaagcatgagaaagtgggcctgttcccgctttctttgtttgtagagggccggttcgccccacgccgcgaggcgggagggcgcccggtccggcaggacggcacggcggcgcgcaggagaaggcgcgccgggcgagagaggaggcggacgtgctcggcaagaaggaacagcagctgctcgacgcgctggccccccgcgcggccgaggagggcgtggagattgtcaccgtggaggtggtgggcgcgaagaaagcgcctaccatcagggtgtacatcgatgtggaaggcggcgtgagcttcgacgagctctcggccgcccaagggtggatcaacgacctcatggacgagctcgacccgttccccggcgcctacacgctggaggtctcgtctcccggcatcgaccgcccgctgcgcacgccggagcatttcgcgcggttcgccggcgagacggccgtggtgaagacggccgcccccctcgacgggcgcagcgccttcaccggcactatcgcgtgcgtcgcggacggcgcggtggagctcgacgtggacggcaccgccttccgcattcccgtatccgacatcaagcgcgcccacctcaagggcgctgtcgacttcagctcataggaaaggacttcagacgtggcaacttcagaactgatcgaggccttgcaggccctggcccacgaacgcaagatcgacgagttctacctcatcgagcggttggaattgtcgctggccaagagctatgagcgcatcttggacctcgaatgggacgcgcgcgtgaccatcgaccgccagacggggcatatctacgtctacgagctggtgccggtgggcgagcccgacgaggagaccggcgagtacagcgagttcgaggagcgcgacgtgacgccggccgacgtgagccgcatcgcggcgcagaacgcgaagggcgtcatcgcgtccatcgtgcgcgaggcgggccgccagtccatctacgaggagttctcgggacgcgtgggcgacctggtcacgggcacggtgctgcagggcacgccggacttcaccatcatcaagatccgcgaaggcgtggaggcggagctgccgcactacgaccagaagcgcaacccgggcgagcgcaacgagcgcccgtccaacgagcactaccgccacaaccagcgcctgaaggtgctcatcatcgacgtgcgcgacccgaactccgacgcgccgaagatgcgcggcgagcaggcccgcccggccatcgtcgtgtcgcgcacgcacccggacctcatccgccgcctcttcgagatcgaggtgccggagatctacgacggcatggtggagatcaagtccatcgcccgcgagccgggcgcgcgctccaagatcgcggtggcctcgcgcgaggcgaacctcgacccggtgggcgcttgcgtcggcccgaagggcagccgcgtgcgcatggtggtggaggagctgcgcaacgagcgcgtggacgtcatccagtggcacgaggaccccgcgtcctacgtggcaaacgcgctctcgcccgcgaaggtgacgaacgtcatcatcgacgaggacaaccactacgccaccgtcgtggtgcccgacgaccagctgtcgctggccatcggcaaggagggccagaacgcccgcctcgccgcgcgcctcacgggctggcacatcgacatcaagagcgcgtcgttcgccggcgagccgctggccgcgggcgacaacatgctcatcgacgaggacgtggaggccgacgacgaggccggcctgtgcgcctacgtgagcgaggacggggcacgctgccgcaaccatgcccggccgggcagccgctactgcggcgtgcacgcggacctcgacggggaatagcggccaagggaaacgagcgaggcgacggatggcaacggagacgaagaaacggcagcgcagctgcatcgcgtgcggaaagcaggccggcaaggccgagctctaccgcgtggtgcgcacgccgtcgggctccgtggcgttcgacggcaccggccgcgcgccggggcggggggcgtatgtatgctccgaggcgtgcttcgccgccgcatgcaagaccagaaagcttgaacgggcgctgaagacgaagctcgatcacgatgagttggaacgaatcgcagccgaggtgtcttcggcgctgcgcggagcgtaagggaagaggagttggtatatggccagcatgcgcgtacatgagttggcgaaggaattcgacatgacgagcaaggagctgctcgacaagttgaacgagatgaagatacccgcgaagagccacgcgagcatgctcgccgacgcctacgtggccaagatcaggaagaacctcgagcccgagataaagcagcgcgcgggccagctggaggccgaggaggccgccgagctcgcccgcgagcgtgccgaggccgaggcccgcaaggccgaggaggagcgcgcccgccgcgaggccgtggagcaggagcgcgccgcccgcgaggccgagcgcgcccgccgcgaggccgccgaggccgagggcggcgagcagggcggagagggttcccaggacgggcgcaagccggccaaggcgccggcctcgtcgccgttcgagagcctggcgagccagatcgagagcgagaaggagcgcgttgcccgcgaggctgccgaggcccgcgcccgcgcccgccaggccaaggccatggccgaggtggcgaagaagcaggccgtggaggaagcgctgcgccagcgcaacagcaagaagcagaagggctccgcgtcctccgcgccgaagcccgctcccgtgatcggcgcgaagaaggcctctgggttcgattcgctcctctcgcagatcgaggccgagaagcagcgcatcgaggcccagaagaagcaggctgcgtcggccggcgccggcgccaaggacgccgcgcgcaagggcggcaagcccgagcgcggaccgaagaagggcaagcgcggcggctcgttcgagcagatcgtgcccgagctggaggtccagcagcagcctgcgggcgaggaccgctacgcccagatggccgtgcaggccgagaagctgcagcgcgacaaggtgctggccgaggcccgcgccgccgtggccgccgcctccacgcacgagggggagggccgccgcaagaagcgcaaggagaagcgcgaggccgagaaccgcgagcgcctggagatggaggccatcgagaagggcctcgaccccacgctcgtgctggacgactccgtggtggagatcccgcagggtgccaccgtggccaagttcgccgagctcatcggcgtgcagcccaacgacgtcatcaagcgcctgttcatgctgggccaggtgcttacgctcacgcagtccatgggcgacgatttggtggagctcatcgccgacgacatggggcgcaaggtgcgcgtcgtgtcgcccgaggaggaatacgccgtcgtctaccacgacaaggacgaggacctcaagccccgcccgcccgtcgtcaccgtcatgggccacgtcgaccacggcaagacgtcgctcctggacgccatccgcgacacgggcgttgccgcgggcgaggccggcggcatcacccagcacatcggcgcgtcggtggtggagatcgacggcaagcagatcacgttcatcgacacgccgggccacgaggcgttcacggccatgcgcgcccgcggcgcccaggtcaccgacgtcatcgtgctcgtggtggccgccgacgacggcgtcatgccgcagaccgtcgaggccatcaaccacgcgaaggcggccgaggtgcccatcgtggtggccgtcaacaagatcgacaagccgggcgcgaaccccgaccgcgtgcgccaggagctcgtggagtacggcgtcatccccgaggagtggggcggcacgaacatgttcgtggaggtgtcggccaagcagcgcctgcacatcgacgacgtgctggagacgatcatcctccaggccgacgtgctcgagctcaaggcgaaccccgatgccgaggcctccggcttcgtcatcgaggcgaacctcgacaagggccgcgggccggtggccaccgtgctcgtgcagcgcggcacgctgcatcccggcgacatcgtggtggccggcacgtcctacggccgcgtgcgcgcgctggtggacccgcgcggcaagcacgtggacgaggcctaccccgccgacccggtggagatcctgggcctgaacagcgtgccggtggccggcgacgagttccgcgtgttcgacgacgagcgcgacgcccgcaagctggccgaggagcgcgcgctgcgcgcccgcctggccgagcaggagacgaagtcgcatgtgagcctggacgacctgttcagccgcatcgaggagggcaagcagaccgacctgaacctcatcgtgaaggccgacgtgcagggctccatcgaggcgctgcgcgacgcgttcgagaagatggaccagtccgaggtgcgcatcaacatcgtgcactcggccgtgggcggcatcaccgagaccgacgtcacgctggcctccgcctccgacgccatcatcatcggcttcaacgtgcgccccacgggcaagtcgaaggtgcaggccgagaaggagaaggtggacattcgcctgtaccgcgtcatctaccaggccatcgaggagatcaacgccgcgcgcgtgggcctgctctcgcccgatatcgtggaggaggacaccggcgtcgccgaggtccgcgagacgttcaaggtgccgaaggtgggcaccatcgccggctgctacatcaccgagggcgagatcaaccgcgacgacaaggtgcgcatcgtgcgcgacggcaccgtgatcttcgagggcgtcatggaatcgctgcgccgcttcaaggacgacgtgaagaccgtgaagcagggctacgagtgcggcatcggcatccacggctaccaggacctcaagatcggcgacaccatcgagggctaccaggtgaaggaagtcgagcgaacggagtaaccgttcgtaaccgatacgagcatcgaagcgcccgtcggccgtcccgcgatacactggacgcgacgggcgcgtttttcgcgcaacccccgactgtttaggaggcggcaccatgaagcaaggatcttcgaaccgcaaggtcaacgagcaggcgcgcgaggtcatcgcgagcatcctcctgttcgagatatccgatccgcgcctcgagctcgtgaccatcacgggctgcgaggtgagctacgaccgcagcgtgtgcaacgtgttctacaccaccgagcccgagcgctacgacgacgtggccgccgccttccagaaggcggcggggcgcatccgctcgctcatggcgcggaagctctcgtggcgcgtggcgcccgagctgcgcttcctgctggacacgagcgtcgaccaggccgagcgcattgcgagcgcgctcgcggccgacgcgcaccgcagcgccgtggccgctcccacggacagcgatgtgccggccgatgccgacgcgttcgccgccgagcgcgcggaggagcaggccgaggaccgctcccatgacggggagggcgcatgagcgtcacgccccagacgaacacgacgctgcccgggctggccgtcgcgctcggcgagcgcgacgacttcgtcatctgcgggcacgtgagccccgacggcgactgcatcggctcgcagctcgcgctcatgcacgcgctgcgctcgctcgggaagcgggccgtgtgcctgctggccaaggacgagcccatcgacgcgcgcctggcgttcctgccgggcgccgacgggctcgtgcccgcggcgctctacgacggtcccgccgccacgttcgtggcggtggacgtgcccatgcgcgaccgcatgaactccgcggcggcgcacctgctggacgcgtgcgccttctcggccaccatagaccaccacgcctacgacgagcgcatgaccgacctcgcctacgtcgaccccgcctccgcgtccacgacgatgctcgtgtgggagctcgccggcctcatgggcgccgagcgcggggccgagcttgccgcgtgctgctacacgggcctcgtcaccgatacggggcgcttccagtaccagaacaccgacgcggccgccctcgcggcggcctcggccatggtcgccgcaggcgccgacgcggcgggcgtggcgcgcgagatattccagagccgctcgctcccctccgtggagctcgaggcgctggccgtcgagcgcatgcgcttcggcgccgacgggggctgggcgctgagctgggtcatgcgcgacgacttcgaggccacgggcgccgtgaaggccgatgccgagcccctcatcgacgcgctgcgatccctgcgcggcgtgcgcgtggcgtgcatgctgcgcgaccagggcgactcggtgcgcggcagcttccgcgcgaaggacggcaccgacgtggcggcgctcgcgcgcacgctgggaggcggcgggcaccgggccgcggccggcttcaccgtgtccggccccatggaggctgccgtggagcgcataagcgcgctgctcgacgaggcgctcgcgggcacgccggacgatgcagagggggagcgcggggcgtgaaacggggagattcggggctttccctggtcgtgggggtgaacaagccggcgggcatgagctcgcacgacgtggtcaaccggtgccgccgcatcttcggcgagcgccgcgtgggacatacgggaacgctcgaccccatggcgacgggcgtgctccccctctgcgtggggcctgctacgcgcctggacgcctacctcgtgggccatgacaagcactatcgcgtgcgcatagcgttcggtgcggcgaccaccaccgacgatgccgagggcgaggtcgtccgcacgggcgacgtgcccgcgcgcgtgcttgatccggcgttcgccgcctcgttcgctaagggcctgacgggcgcccgcaaacagctgccgcctgcctactcggccatcaaggtgaacgggcgcaaggcatgcgatgccgctcgccagggcaccatcatcgacctggcgccgcgcgacatcgtggtgcacgacgcgcgcctcgtggcggtgcacgaagcgggggacggctgcgagctgccgtcatgggacgtggagttccacgtgtcgaagggcacctacatccgcgccctcgcccgcgacaccggcgcggccttgggttgcccggcgcatgtggcggcgctcgagcgcacgcagctgggcctgctgcacctggaggagtgcgtcacgttggagacgctggccgagctcggcgaccgcgccgcgctcgatccggtgcgcctgctgggcacgcgcttcctctacgccgacggcccgctggccgccggcgtgcgcaacggcaacgcgttgccgggatcgaccggactgttcgagcgccggcgcggcgcgctggacgcggagttctgcgcctgcgcggcgggcgtgcgcgagagctgcgaggcgccgcacgacggcgaagtggtggccgtgatcgccgagaacaagctcgtggcgctgtacgcttacgacgagggccgcgccgcctaccgcgcgcggtgcgtgttccagacgggggtttctcgtggcagagatctatgaggtgggggagggtttcgaccatgcgttcttcgcgggcacgtcctgcgcgttcggcgtgttcgacggcgtgcatgccgggcaccggtacctgctggcgcaggcgtgcgagacggctgggaggtcgggcggcaagagcgttgcgctcacgttcgacatcgatcccgacgaggcgttccaccccgaccgcctgaagaagctcatgacgaacggggagcgcctggccatgctcgcctccacgggcgtggacgccgtggccgtgctgccgttcacgcccgcgttcgccgcgctttcgcccgaggcgttcctcgaggccacgttcgacggcacggcgcccgcgtacctgcacgtgggctgcgacttccggttcggcgcgcgcgcggccggaaccgtgggcgagctggaggcatggggggccggcgccggctgcgccgtggcggcgcacgacctgaagagcgccgacggggcccccgtcacggccacgcgcatccgcctgctcttggccgagggcgacatagcggaggccaaccgcctgctcgagcgcccgtacttcatgacgggcacggtggagccgggccgcggggaaggggccgacctgggcttccgcaccgcgaaccttgcggtgcccgatcagctgcgcccgctcggcgacggcgtgtacgccgcctacgcccacgtggacggcgcgcgctacaaggccgccgtgaacgtgggcgtggccgccacgttcgccgaccgcgccaccgccacctgcgaggtgcacctcctcgacttcgccggcgacctgtacgggaagccggtcaaggtggagttcctgcactggctgcgccccatgcgcaagttcgacgacgtggacgagctcatcgccacggtaaagggcaacatccagtgggtgagggagaacctgtagcgagcgccagcgggtcagttgaggggcgtgcagtccggcgaatccgacaggagcaccaatttctggaagtagtccgtcgtggataggccttcgtcagtgccctggttgacgaggctctgccctgctgcgaaagtgctgcccgcttcgtcgagcgaaaagagcacgtcttggccgaaccattgctcgaacggtcggtaatcgaggtctgcgttggagggcgagtagctgcggaggagaagcgggccctgctccgtatgggcgagcaggatggagcacaccgcccctgcgacaggcgatccggccgcattgagtcgcatggcgaaccgattgtacgtgctggagcagaattcggtctcgcaggcgctctggatgacgtgctcgctgccgagctcgccgaagaaggcctcctgcgggtagcgttcagcaacgaaccggaagttcgccatcatcgcctcgtcgcgcaggtcgttcgacttcgaggaccgctccgcttccgttccccggtaatagcgcacggtgcggtcgaagttctcggcaaactgcaccgcccatccgtacgagctgccgaacgctgcctgcgcctcttccggttgctcgcgtatcgcctgccccagctcctccaatgcttgaacatcgccgcttagggccctttccaaggttgcggcgaaggcctcgccgacgtcggcggagccgtcggcgagcagggagaggccccgggcggcggtctcgggctggtggtctacgtccagcccgatcacatgaagcttctgctggtcgggcagggctgcattgtactcccggagccaaacccagaaatcccgctcttcttgggtatatcccatcgtgccgctgagctgttccaggtagaagtccagctcgtccgcattgcctgtttggaggtagcggtccagcagcaggccgctgccgaagccggtctcccagaggaggtagcgtacgccttcgtgttcatggaagtagcgcacaagcagcttctctgcctgcttgtccttcgccttcgtgtgggtttccccggcaaggaacactcggtagccgtcgacgttgccgatggagccctttgcaagcggctgttccaggtcgaacgggtttgcctggcgctcaagatattcgcgcacggcgtcggggatgccggttccgcatccgggcagggcgagcagcgccgctgcgagcgctattccgaccattgctctcatctggtccctcctaagaggccgtatgctatccgaaaggccatgcctaataatgatggggggggggggcgtgtgtcaatgactggccgacagataaggggacgaagggggtgcgggcggtttcctgtcgaggtttccggggatgctgcctcatcgcggatgaggcagcatccctccgtgcccgttcacctaccttgctgaccaggcggaatccttgttgaacaggttgtcgtactgcaccgtggcgtaggcgcgcagggcctccagcgcgctgggatccccgccgtcctcgtcgccgaagccgtgccaggcgccgtcggcggtcaggaagccgttgaggttgatggcgggaatcgcctcgcgcacggccagcaggaagcgctggtagcccgtcgtgggcaggcccgcggcctccaccagtctcgatcccaggtagttgaggctcgtgcgctcgtccgcgccgccgtccggaccgtgggcgccctgcgcgcgggcggcgtcgttcgcccagatgaggtatggcaccgtgtagcgctcctgcacggcttcgagccccaggtcgtcggctgcggcgccgtcgtgggtcgcttcgaacagccagtcgctgaagccgggctggtggtcgccgaagaagcacagcaccacgggccggtcgagcgcgttgagcttgtccacgaggtaggcgaggtcgcggtcggcctggcggatgacgctcgcgtactcgtcgagctctggcgacatgctgccgtcgccgagcggcacgctcacggccagatcgtcggacaggccgcccacatcgtagccgccgtggttctgcagcgtcacgtcgaagacgaactgcgggcgcccgtcggcttccagcaggtcgagcacgtagtcgtacgtcgcgcggtcggtggtgagcccgcgcagcgtgtcggcgcccgcgaacgcggactggtcggcgaactcgtcgaagcccagctggtcgtacacgcggtcgcggcgccagttcgtgctttcggccgggtggacggcatgggtcgcgtagccaagcccggagaagtaagacacgaggctctcggcgccgtcgaggtcgtacagcacataagggtacacgccgccgccgagatggcccatgctcgagccggtgaggaactcgaactcgctattgcacgtgccgccgccgagcgccgatacgtacgcgtcgcccgcttcgagcgcttccgcggcaatctcgtagtagtgcgcgggacgggcgccggtgccggcgaggccgggatagcgcgagaggtccgagaaggtctcgttcatgacggctatcacggtaggggcttcggttttgccggccgtctcgggcgcgccgccgagacggccgatcagcgcggccacgtcgtcggcgtcgtagccgtccggttctgccgggcttaggtcctgcacgcgcttgaggaagcagagcgccgagccctgctcggcgtacgactccttcacgccccagacgtccaccgtgcacgcgtacgcctcctccaggtcgtaggagcccaaccaccagccgaagcatgctgccacggccacggcgcacgccgcgttcaccgcgacccgccgcggcgagaccgtcgccctcggcaggagggagagcgccgcgaggcacagggcgagcacggcggcagcctccaggagccgttcgtcgagcgcgaacgtgtagccggaccccaccgatgcggccgtcgagagcgcgagcaggtcggccggcacgatgggctgccccttgaacgcgatcacgaagtggttcgccgtgccggccaggaagcacgcggccaggaacaggccgacggacgcgcgcgagcgctgcccggcgaagtacacgacggcgaggagcaacgcgagcacgcacaggttcgccgccgcatagtaggggtccatggcgagcagggcgtcgttccacggccgttccaacaggtagaagcctgcgggcacggcaagcgctacggcgaggggccgcatcgcgcccgccgttttgccgtcgatgcccggagcacgcccgcgcacaagcggcacgcagccgcaggcggccagcagcagggccgtgaaggccgtttgcggccagggcgcctcgacaaggccggctgcggcgtagaggcacaggccgagggcggccagggagccggccaggacggcggcgagcgcaagggcgcgcgggcgcgtgggagccttgggcgcccgcgaggcggatgggggctcggtcgggacggcaaggcgggtctgccgctcggtcattaggtactcctcggtgaaagacgatgcccgttcgacacgatgcccgtccgcgtgcataaaagaatgcccatcataccggttttcccgccgcccgcaccgcaggctctggcgagcggcacgcgcaggggagaaccgtaaccgtcgagcaggccgattggagcgtacctccagaaaacctcgatttccccttcacattatctccgaatcccctaaaatgaggcagttgctatcttcccacctcaatgcccggtgcgaaggcagcatcgtcagtaacggtcgaaccaaggaggaagacacgtgactactgcagtcgcatggatggcccccgtgtgcgccttgattggcatctgcatggcgggctacctgggttcctgggtgctcaagcaggacccgggtcccgacaagatgaacaacatttcgctgaagatccagcagggcgccacggcgttcctcatgagcgagtacaagctgctcgtcatcttcatggtgatcgtcgccatcgtcatggccgtggcgctgtcgcccatcacggcgctcgcgttcgtcaccggcggcgtcatgtcggccgccgcgggctacgtcggcatgcacgtggccacgcgcgccaacacccgcacggcccacgccgccgaggagtcggtggccaaggcgctcaacatcagcttcaagtccggcctgaccatgggcctgtgcgtggcgtcgttcgcgcttctgggcctgtcgctgtggctcatcgccatggtgttcggcatggctgtgggcgtggacatcaacgccgagctggccggcctcatgcacacgaacatcggcatggtcgagggcttcgccaccggcgcttccgccgtggcgctgttcgcccgtgtgggcggcggcatctacacgaaggcggccgacgtgggcgccgacctcgtgggcaaggtcgaagcgggcattcccgaggacgatccgcgcaacccggccaccatcgccgacaacgtgggcgacaacgtgggcgacgtcgcgggcatgggcgccgacctgttcgagagctacacgggcgccatcctggcccccaccatcctggcggccaccttcggcgcgctgggcggctacttcgccacgggcgacctggtgtgggcgctcgtgaccccggtcatcatcgccggctgcggcatcatcacgtccatcatcggcctgttcgccgtgcgtgccaaggaaggcgccgcgctgcacaaggccttgaaccgcggcacctacgtcgcggccggcatcgagatcgtcgtgatcttctgcctgttctacgtgtggagcacgcagtccgtcgacgcgcagccgctgtggctgttcggctcggtgctgtgcggcctggtggcgggcctcgccatcggcaagatcaccgagtacttctgctccgacaagtacaagccggtgcataagatcgccgacgccgccgacacgggcgcggcaacggtcatcatcgagggcatcggcacgggcatgctgtccaccatcgcccccatcgtgctggtggcgctggccatcatcggcgcgtacacgttcggcaacatggccttcccgctcgcgtcggccgagggcggcatcgccgtaggcctgttcggcgtgggcctggccgccacgggcatgctgtccaacaccgccatcaccatcggcgtggacgcctacggccccgtggccgacaacgcgggcggcatcgccgagatggcgggcctgcccgaggaggtgcgcgaccgcaccgatgccctcgacgccgtgggcaacacgacggccgccatcgcgaagggcttcgccatcgcgtccgcgggcctgtcggccatctcgctgttcgtgtcctaccaggccacgatgcaccatgccatcccgaacttcgagctgacgctcaccgatccgctcatcgttgccggcatcttcatcggcgccatgatgccgttcatgttcgcggccctcaccatgggcgcggtgtcgcgcgcggcccacgcgatggttgaggaagttcgccgccagttccgtgagatcaagggcatcatgacctacgaggccgagcccgagtacgacaagtgcgtggccatctccacctcgtccgcgctgcgcgagatgatgctgccggggtgcctggccatcatcgtgccggttgccatcggttgcttcaacccggccatgctcggcggcttcctggccggcgccgtggccacgggcatgctcatggccatcttcatgtccaacgccggcggcgcgtgggacaacgcgaagaagtacatcgagcagggccatcacggcggcaagggctccgaggcccacaaggccgccgtcgtgggcgacaccgtgggcgacccgttcaaggacacttcgggcccgtccatgaacatcctcatcaacctgatgaccatcgtgtcgctgacgttcgcgccgctgttcatcatgatccagggcctgttctagatcttcctgcggaaagagacgctcttctcggggacctcggcgccaagccggggtccccgttgttttccgggcgggggggggtggccgcctcgtgggccgaaggaccgcgccctgccagccagcccgaagggacgctacggctgctttagtgggggcaaatgctccgacttcccctttgacgcatagtcgacgatcgtgatcgtgccgcatgcgcaaagcaccttgctcatgtctgcggcgattcaatatatgactgaaaaagtaatggacaaaaaggatcggtagtctatagattttggacggaaatcaagcggcagtgaatgcggcgttttctaaacgcctggtagcaggcccggtgttttaactatcttttatccagaataacgacaactgcccctttttgtcacggcaccgtatgccccgcacgttaggcggctgcttcgaggacaactgcacgcgaaggtcgtcagattgtgccaatcagccgattgtgcgccaaacagggtcaaacagggaataagaacaaatgtttgcccattgccgtattctatggtatgttcggagagcacgctgtttcgcaggaaggaggctgcgcgtgatcgtcagcgcatcgcggcgcacggacataccccggttcttcatggactggatgctgaaccgtctggaggaggggtacgcgctcgtgcgcaaccctatgagccgcacgcaggtgagccgtgtggcactcggcgcaggggcggtggactgcctggcgttctggacgaaggaccccgagccgctgctcgcgcaatccgctcgcctggagcgtgcggcgcccgccccgtatttcgtgcagttcacgctcaacgcctacggcgccgacgtggaggcgtggctgccgcgcaaggtggagctcgtggagacgttccgcgagctggcgcgcgtcctgggccccgagcgcgtggtgtggcgctacagccccatcttgctcggcggccccggcggacgctacaccgaggagcaccacctgcgctacttcgagacgttcgcccgcaagctggagggtttcacgcacgcgtgccggttgagcttcctggacgtgtaccccaagatcgcgccccgcatgcaggcgctgggcctcttcggcgtgccggaggggcggaaggccgcgctcgcgctgcgtctggccgagataggcgccgcgcacggcatggaggtgggcggctgcggcgatgcggcccttgcgcaggctggcctggcgggaaccggctgcatcgatgcggcgctcgtcgcgcgcgtggccggggtggatgcgcgggctggctcgccggcggcgccgggggcgtgtcgctgcgcgccgagcgtggacattggaacctacgatacgtgcgccaacggctgcgtgtactgctatgcgaacccgggcgcgcggcgggcgggcgtcgagccggggccgccgagcccggacggctatccggggaagggcgccgcgggctacggcgaaggtagggcaggcggatgtgcggcgccgcgcggtccacgggccgcacgggcgggggacggtgcggcctggcgcctcgcgcgctacgatcctgccgcgccgatgctctgcgacgccctgcggccgggcgacgtcgtgaccgagcgcgccatgccgccgctgccgaaggccacgctgccgctgttctgaccgaccggggacggcgccgtcggctggaccgtccgtgggcgacgggcggggaggcgggtgggcgctgcggagggcggcgcacgggcgccggggagccggcgccggaaagcagagtccgcgtgacgggcgtcggccgcaggaggcggcgcaagcgccgagcgcttgtcgcacgcgacgtgcgccgaagcaggaaacgggagcgccctttgcttcgggtgcttgctagcgcaggttgctcacgtgctggcaagcgtcgccgtagggcacgtagcggtaggaggccacgacctcctggccgttcgcgggatcgagcgccacgaagttgtccagcgtgagcgcgtcggggtcttgcgcgtcgcggtagccgatgaggcagatccagtgctcgccgtacgggccggacacgtgggcgaccgtggggcgcccggccgcgatctcgtcgtaggcctcgcgcaaaagcgccccatcggagccgagggagcggaacgacgagttaccgccgccccagccgggccaggtgcagcagccgcatccgtagagggcgtggtcgttggccttcccggtgagcaccgcgtcgccgtaggcgcaggcgtagcccgggcagcacacggcatgcccgccggcgctttggttcccgatggcggctatgagggccgggtcgtacgcgagcaccttgtcggtgcgctgcgcggccgcggccgccgcccgctcggcctgctgccgctcgtagacggcctgcgctgtgacgagtacctgcaggtcagctgtcggggatgccgccgtgtcggccgcgggtggggcgggctcgtctgccgagagcgatgcggcgaggaacgacgagggggagggaaggggagaggaagaggctgcgcgagccaacggcaggctctcgtcgcctgcccctgcgcgatcgagggctgccgccgacggggcgaccgtcgtcgccggggccgcttctgcccggccggcaggcagggagagcaagagcagcaaggcgagcgccgctaggtatgcgggcgctgccgaaagggtgcgcgatgccatggtgcagcatcctttccacggctgtgtcgggttcgtttcgagggtgtttgcagccgtcggcatccgatggtaacgaaacggcaacgttcgaggcagcgggcctggttgaaacctgtcgaagcatcacatcgcgcacacgccttccccacagctcctgcaacgattctccacggtgcgccgggcggccccggatgcacaggggccgcgagccctcgaccacggatcgggcggaccggctcggggcggcgggccggtctttcgatgcggaggcttaacgtcaaggatgcggcgtgcggctcgcgcgccggcaggagcggggcgtgcgctacaatgcgggaagggcgcggccgcgcggtcgcggtgctgtgcagggaagcgaaggaggcgcgccatgggcgcacaggatatcgacgtcgtcatcgtaggagccggtcctgccggcatcttctgcgcgctcgcgctcgtcgagcgcgggttcgcggggcgcatcgtcatgctggacaaggggctggccgtggaggaccgtgcgtgccccaagcaggcgggcgggccgtgcgccggctgcgatccgtgccgcatcaccacggggttctcgggtgcgggagcgttctcggacggcaagctgtcgctttcgagcgaggtgggcggcgacctgcccgacctcatcggccacgaggccgtgcaggcggccatcggagaggtggacggcgtgtacctggcgttcggcgccgacggccgcgtggagtgcgccggcccgcgcccggaggtggacggcatacgcctgcgcgccatcgaggcgggtctcaagctcgtggactgcccgctgcgccacctgggcacggagcgggcgcgcgagctgtacgcgcgcctcgagcgccacctggctgacgcgggcgttgacctgcgcttccgcaccacgtgcacgcaggtgctcgtggagggcgatgcctgcacgggcgtggtggccgagggccccgagggcgcctacgagctgcgcgcccgccatacggtggtggccaccggccggcgcggggccgactggctggagcgcatgtgccgcgagcaccggatagcccacggcccggggcccgtggacatcggcgtgcgcgtggaggtgcgcaacgaggtcatgcgcacggtgaacgacgtgctgtacgagagcaagctcatcggctatcccaagcccttcaagaacaaggtgcgcacgttctgccagaatcccggcgggttcgtgagccaggagaactacgacgggggcctggccgtggtgaacggccactcgtacaaggagcggaagtccgcgaacaccaacttggccatcctgtgctcgcacaacttctccgagccgttcgaccagcccatcgcctacgcgcagaaggtgggcgagctcacgaacatgctgggcgacgggcgtatcctcgtgcagcgcctgggcgacatcctggacggcaagcgcacctgggacaaggagctgctgcgcagcaacgtggcgcccacgctgggagacgcggtggccggcgacataacggccgccatgccctaccgcgccatgacgaacatcctggccttcatgctggccgtggacaaggtggtgcccggcttcgccgcccccgagaccctgctgtactcgcccgagctgaagttctacagcaaccgcgtgaagatggacgagggcttccgcacgagcgtccggggcctgcgctgcctgggggactcgagcggctggacgcgcgggctcatgatggcctctgtcatgggctacttggcgggaggcttgctcgccgacgcctagaacaggggaaacgcgtgcgtactccatctgcgtgacacgctgcgcgcaggctgcatgacgaaaatcagccgtctgcacgatagccgggcggtgcgcgccggtccatactgcggagctgttgaaaccgatgggggcgaatcccccgcgcattggaggcgtactatgaagatcctcggtatgggcatgcccgaactgcttatcatcctcggcgttatcctgctcatcttcggcccgaagaacctgccgaagctcggcgccgcgctgggctcgacggtgaagaacctgcgcgagggcctgggcggcgacaagaaggtcgagagtgctgacgacgaggccgagatcgtggagtccgaggacgaggacgcctccggcgacgacgccgagggcgacgagcctaaggccgcgaagaaggtgcgcgcccgcaaggccgcctaacccgctatcccgcgcgctgcgcgcaagcgcatgcgctgttccttccctcgagcgcgaactccctcctcgcgctcggccacgcgcccgtgcaaccgcacgggcgcgtggccgtttcgggggagtttaccggacgagcacgttcgtccgtgctcgttttgcgggtgcgcccgctgcggggccggccgcgcgccggcatgcgctatcatggggctttcggtatccgcaggggaaaggaggcccgggcatgggcgcgcatcgccgtggcggcagggcctccctgcgcgccgtcgcagggttcgcctgcaaccagggcttcgtcttctcgctgttctacatgggcgcgaaccgggcgttcggcgagggaatcctgtcgttcgagcgagcggacctgttcggcacgctgctgttcatgatagcgtcgttcggcctcctgcgcgtggcctcctccaaggcgcgcggggcgctgctcgcgcggcctcttctgtggtgctacgccgtgctgctcgtggtgggctcgatcgtgccggcgctcgccgggaatccggctcccgcgagccttgcgctggagagcgcgctcgtgggcctgcccgccgggctcatgctggctgcttggggccgcgcgctgggcgggcagccgctggcccgtgcgctgccggcggtgttcgtgggttcggccgtgggcgccacggcctgcttcgccatggcaacggtgccggtggagggagccgccttcttgctgaagctgctgccgctgggcagcgcctgggcgctccaggcgctcgtctgcgcgggctcccagcccgacaggggcggtcgcgatgcgggaggcggcgttgcggaggccggcgccggcgcccgcgatgacgaggcccctgcggccggcagggctgcagcagccgagaccgtgcaggttgcctcggccgcctttgccgccggcgctgcgtccacgccccgcgccgtgcggggcgccgaaggcccgaagtccccgctgtcgctgcgggcgctgctggccacgcctgccgagcgggcgcagacggcgcgcctttcgttcaagatggcggccggcaccgtgctgttcggcttggcggcgggcttcatggagacgtacggctccgatcccggcatggcttccacgcccgccttccctgcgacgctgctgctgttcgtgctgttctgcattgcggcgctgcagcttctggccacggggggcctcgacctcgaggcgggcccgggtgcggcatcgggcccggacgccgcatccgccgacgacggcgcgcccgcagagcccgagggcccgctcgacgacgtgtaccggctggccgcgctcgtgatgatggcggggtttctgttcgtgcccgtgctcggcgacttcggcgtgccgggcgaggccatcgtgctggcgggctacctggggctgtcggccgtgctcgtgtcgctgttcctggtcatggcgcgcatcacggggcaggatgcggcgcagtcgttcgcccgcggcttcacggccctgttcgccggggagatggccggcgtggcgctgggcaacgtcatcgacgtggtggccggcaccgagcagacgccctccgtcgtggtggcctgcgccggcctcgcggcgctctacgccttcctgttcctgttcaccgagcgcgacttccgggcgctgtccgtcatcgcgcgcgacgccgaccgcttcgacgacgcgtgctcgctcatcgccgccgagcacggcctgtccaagcgcgaggccgagatcctgcccttcgcgctcaagggccgcacgggcgagcgcatcgccgccgagttctacatctcgaagagcacggtggacactcacctgcgccgcatctacgcgaagtgcggcgtccacggccgccaggagctcatcgacctgggcgagcgcaccgagcgccgcctgtcgggccgctagcgcccctgcccaggtccccgccctgcggcctccgggccctcgcccgcctcatcctgcgccgcccttgcgcggagcacgggccttctccgcctcctggccgctcctgcatgcctcgcggggcccggatggggtacaatcgcgatcatcgaagggtgggggctggcacggcgggcgccctggcgaggcaaaggcgggagcggcgcatgggacaggagagaacgcggggccccggccgttggagccgggtcgacgtccaggtgtcgatggtcgcggccgtcgtcgtcgcgctgtcgtttctgtgcgtgtacgtgttcaactaccagataacctaccgggacatgatatccacgctcaaggagcgctccgacagcatctacgggtacgtcgaggacgcgctggacaagtccacgttcctcgttatcgagggtgctgacgacgtcgatggcgacgacgatccggcccgtcccgcctaccgggagatgaaggagtcgttcaaggaggtcaaggccgccaccggcgtgcgctatctctacacggcgaagcgcgcggccgacggcacgctcgtctacctcgtggacgggctcccctcggaaagcgacgatttccgcaacccgggcgaccccatcgagcaggagatcgtcggcgatatggaacgcgccctggccgacgaggtggtctacccgaccgacatcaagtcgaccgactggggacacatcttcgtgtcgtactatcccatccacgacgaggggagcgtcgtgggcgtcgtgggcatcgagttcgatgccgagcgccagttcgagacgttccgcacggtgcgcatcggcacgccgctcataggggtcgcgttctgcctcgtggccgtggccgtgtcggtggtgctgttcaggcgcatctcgaaccccgcctaccgcgacctggcgaacacggactacctgacggggctcaagagccgcaacgcgttcgaggtggacgtggcgaactggaaccgcacgggtgtccgggtggccggggtcgtggccgtcgacgtcgacgggctgaaggcggtgaacgacgagctggggcatgcggagggcgacgagctcatccgcgcggcggccggggtcgtgtcctcgtgctgcgggggcttggggccggtgtaccgcgtgggcggcgacgagttcgccgtctgctgcttcgagctggacgagcgcgccggacgccgcatcgccgacgacctgcgcgccgcctgcgccgccgtgggcgtggccggccgatccctgtcgctgtccgtggggtgggcggtgcgggaggcgggcgaggatatcatgcaggcccaccgccgcgccgacgagcgcatgtacgaggacaaggcgcgtgcccaccgcggccgcaggccgggggagcatgccgggggctccgggttcggcgaggcggcgggatcgccggagcctccgccgcccggaggccgaggcgcctgatgcgccccggcgcggccgatccccgtcccagtccggccgaagccgcgccgagacgggggtcggcccctagcgcgcgggcatctcgaagccctcgagcgcgcggttgaggaagtcgttcagcggcttcatccgctcgaactcgcgcgcggccgcctcggcgaagccgggcgcggccacgtcctcgtcgggcacgggcagctccaggtaccagctcttgaacttgagccagccggcctgcgggtgcgccgcgtcgaagccctgcggcacgcgcttgagcgcctcgccctccacctgtaggggcgcgaggccctccacgacgcgctcccaggcgtcgccgtccgctgcgatggcgcgccgaacgcggtcggtggcgtccctgaacatggccgcgaacagcccgcctcccagaaacgagcggccgcccggcctgaccatgaggtagtagcccacgggcacgggcagcttgcccgccggccccacatgggcgcgcagcgacgggttatagggcgacttgtcgttggagaagcgcgtgtcgcgcgtgagcttgaacgtgagcttcttcgggtcgtggcccagcacggcggggtcgaacgcgcccacgcgctgctgcacgtcggccaccaggccgtcgaaggcggcaagggcacgggcccgctcggccttcgtctcggcgaaccaggcgcggtcgttgtgggcctccagctcggccaggtaggagagcgccgcgcccatcccggcatcgaccccggcgcccctctcggccgtcattcggacaccgcctgcgcgaacacgtccgaggccacgaggctgcgggcgaatgcggccgcgtcggagggacagcggtagcgcggcagcgacgcgaacgcgcccgatgcgtcgtcgaggagctccatggcgtcggtgcgcgcctcggccgacggtaccctggcgcctgcgcccgcggcgggctgcgcacctgccgcgcggccctcgacggcatcctcggccagctcctcgagcgcctggaagccgggccgggcggggtcgatgcggtgcgtggcgatggcgtagtccacgcgccgcgcgcagcggcagggcccgccggccacgccgcagtaggttgtgaggaactcggccatgcgcgcccgcgcgcgagaaagccgttggcggtacgcctcgggcgtgatgccgagcgcgtcggctgcggcgcggctgtccatcttgaacatggtgcccagcacgaacgcgctgcgcccctccacatccaggcactgcagcatgccgtgcatgcacgacaccttcagctcgcgttccagcaggctcctgtccgcgccgccggccaggtcgggcacgtcgcgctcgcgacccgaggcgatgtcctctccatatacgtcgaagctcacgggccgctgggcgaacaggcccttgcggtaggtggccagatggttgagcgcgatgcggaacacccaggtggaaaacgcgctctcgcggcggaacccggacaggcgcgtacacgccttcaccagcacctcctgcgtggcgtcctcggcgtcgggcacggtgcccagcatgcgcagcgccaggttgaacacccggtcctgcacgcccgccaacagcttgcccagggctttctcgtcccctgcgagcgcggcgtcgatcaatgcgttctcgtcggtcatgcggttcctctctcgttctcgccgtcaggtcgggacacgggccgttgcgcggggcctttgcggccgaggcgggcgcgcccgcgccctctggtgcattggacgctcctgcgaccccgcgtgtgacagggaaacggaaaattccggaaaagctgcgatccgcatgccccgacgaccgtggcgccgcgcaccgcagaacggcgccgcacggccggcctaccagccgccttccgcgagcgtctcgccggcgagcgacttgagcgcgaacgccccgcgctcgtacacggcgtagcccgccgcgccgtctttcgggagggacgtgctgccggggttcgcgaacagcacgccgccgcggtcgccgagctccttcacgtgggtgtggccggtgaggagcgcgctgccgggcgcgagcgcgggcgggtcgtcgggcgtcatgcgcggcacgtggccgtgcgtgaggtacagcaggtgcccgtcggcctccaccagggcgtagtcggccaggcaggggaaatcgagcaccatctggtcgacctcggcgtcgcagttgccgcgcacggccgtgatgcgcgcggccatgccgttcagcacggccgcgacctcccggggcgcgtagccctccggcaggtcgttgcgcggcccgtggtacagcaggtcgcccagcaggagcacgcggtcgggcgcctcggcctcgatgcgcgcggcaagcgcgcgcacggccggcgccgcgccgtgcaggtcggatgcgatgacgagcttcatgggacctccgatcagtggggagttcccagtgtagcgcaccgcctcccgacacgcgaccccgctgcaccgagaccgcccggcgcccaagcccccatctgcctcttccggctcatccgaggtcggcgcagtagccgcgggtgacggtgcgcagggggctctcggggaacaggtgggcgaacagcgacgtgaagtaccggtcggtcatggacgccaggtagtccaccacgatctggttcggctcgccggccaggtactcctcgggcgttatggtggcggagcgggcggccaggctgcgcacgtggtggcggaacaccggcgagccctcgtcgccgcgcacgaggtcgtcgagcaggcgcgcgtagagctcctcgaacatggcgcccaccacgttgccgtcgttgcccgccatgccctcgcgcgcgtagatgagctcgtagttctgccgcttcgcccgcttgaggtcgtcgaaggcggcctcggagagcgcgatgcggtcggtcccgtagctctcgttcacgatgtccaccgtgaggttgttgatgatgcgcgcgttgtcgcgccccaggtaatccgactcgaacgcgtcgagcgagtcaaccacgcccagctcgatggcgtcgtagcggtccttgcccacgtaggcgatcatgtcggccacgcgcacgacgcagccctcgagcgtggaggggcgcagccggccgatggcgccctcgtctgccgtgcaggcctccaccaggcggtcgagctcgtcgaaggaggcggtgctgcccgtgcgcagcacctgctgggcgaactcgccgttgtgacagagcacgccgtcgagcgtctgcaggctcacgttgcggcggtacagccggtcgagcacgcgcacggagtgcacgttgtggttgaagaagcgccccgtgcgctcgtggtagcactgcgaaaggtagcgctcgccggcgtgcccgaacggcgtgtggcccacgtcgtgtccgagcgcgatggcctcgatgagctcgcagttgagccccaggagcgagccgatgccccgcgcgatgcggctcaccagctgcacgtgcaggccgcgccggcagatgtcgtcgttctccacgaacgagaacacctgcgtcttgtcggcgtagcggttgtacgcgggcacgttcaggatcttctcgatgtcgcgcgcgaacgcggggcgggcgagcgtggcctcgtcgtggggcttcggctcgcgccgcacgacgtcggcatcgtcgaaggcgcgcgggtgccggcgccccgccttccggtcggcgcggatggcggcctcgacctcggggtcgagcgtgcggtaggggatgctcgtgcgttccataggcgtcctctgcgaagaagcggcgccgccgcggcgcgcgtcgtgttcgtcggggacattgtagcgcacggaggcgcgtcccgccgcctgaaccgcgcagcgaacgaatgtttcacgcgaagcgggtgggtggcggaagggcgccgatccacgatacgggtgccctgacgtcccctttgacgcatggacggtgaagcggatcgtgccgtatgcgaaaaacgccttgcgcatgcctacagcgcttcgatatatgactgaatgcataagggacaaaaaggcccggtaatctatagatttcggacggaaaccaagggatggcgaatgcagtgttcgcgaaacacctggtagcacccccagtgttttgactatcttttatccagaataaagaaaactgccccttttcgtccacagcaccgcatgccccgtgcgtcgaggaggatgcctacgagaggtgcggcgcgtcgtggtgatgccgccgaacgtgcgaccgaccctgcgcggcgggcttcgcggaacccgatgcggccgaacccgggccccctggctcggcgccaaggggcccgcctcgatcagtaccggtacagcgccgccatgccggagtcgccggggatcttctcgggggcgagctcgaacacctcggcgtcctgggcgagcgccgcgcgggcgaacgcgtcggccagctcggggccctggaagcggccgtgcggctcgcgctcgaacaggaacacctcgccggtctcgtcgtcgaaaccgccggggatgtaggcgccctcggccacgaacagcgcgcgcaccttgcgctcgacgagcgccagcccgatggccgagaggtcggtggagccgccgccgtgcggcgcggcgtcgcccagcttctccagcagctcgtccgcgcgcgcctcgcgcacgtgctcgatgacggccttggcgtcggccagcagctcgggcgcctccatgccgccgatatccttctctatgccctcgtccaaaaggcgcggcacggtggagatgcggcggaaggcggcctggtgctcgggcaggctcaccaggatgaccggcagctccgttccctgcaccaggtactccgtcaccaccttgttcacgtgctggaagaacttcccggcctcctccttccgcacgtcgttgcgcgacttgtagccgtggtagggcggcatatggttctcgagcgacgagtagtcgagcgcgccctcgtggccgtcgtacacgagggggaattcctcgctgaactcgtccagcacgtcggcaggcagttccacgcggtcgagcgagccgaagtcgccgtgcacgaacgcgaagcggtcggccgacagccccagcaggaagtagcgcgagccgaacgagaagttcttgagcagcgggcgcacgtagaaccgctcgcctgcgaacgcgagcggacccgcctcgtagcccagctggtagagataggcgcggtcgtttcccacgagcacggccaggctgccgccgggcacggggctcgccagctcctccagccgtgcggccacctcgtccaaccgcgcgtcgacgcccgtatgctcgcggtgcgcgaactcctgggcgagcttgccgcgcgcctcctccacgaggcccttgaaccggatgcggtcctcctcggcgccggcgcggccgtgcgtgggcaggtagagcgataccaggggaggctcctcgtgctcgaaaagggccgagtcgaagtccgcgagtaccgagatgccgtcttccatggggaacctcccgtgtccgtttgcttgtccgtgggcgtgcgtcggcgctcccggcccggacgccggggcgcgacgcatcggcccagcatagcaacgcgcccgcaggcccgcccgaccccgcgacgctctgtaagcatccggttggcaagctgctgacaactcggcgcggacgcgcttgcgctatactgtgcggaagggcgggacgacgagacggaagggccgtgcatgaggaatcgggaatgggtgtacgcggcgatcgcggtggcaagcttcgtcctgatgacgggcagcctggtgctcgccttcggcaaggggggcgagggcctgtcgggcgcgcgcgacttcatcccggccatcgggttcggcgccctgttcctggtgaacctcgtgctggccaagcagaacaggcggaggtagcgggggcgcatggcgggcaccatcagcgaagaggacatccagaaggtgcgcgaggcgtccgacctcgtggccattatcggcgagcgcacgcccgtgaagcagcgcggccgcgacttctggtgctgctgcccgctgcacaacgagaagacgccctcgttcaagatcgaccccgtgctgcagctgtggcattgcttcggctgcaacgaggggggcgacgtgttcggcttcctcatgaagaccgaggacctgtcgtttcccgaggcggtgcggaagctggccgagcgggcgcacatcgacatcgccgacacgggcggccgcggcggcgtgccgagctccaagaaggcgcgcctgaaggcggtatgcgaggcgacggccgcgttctaccacacccagctcatgcgcaacccggacgccgacgcggccgccgcccgcagctacctggcgggccgcggcctgggcggcgacgtgccgcgccgctggcggctgggcttcgcgccggggcgcgggcagctcgtgcggcacctgtccgcgcagggcttctcggccgaggagatggtggaggcgaacgtggccatgaaggaccgcggcggcaagctgcgcgaccgcttcttcaaccgcgtgatgttccccatcggcgacgcgcagggcgagtgcatcgcgttcggcgggcgcgtcatcggcaagggcgagccgaagtacctgaactcgcaggagacgccggtgttccacaagtcgcaggtgctctacgggctggaccacgcgaaggcggctatggccgccacgggcgtggccgtggtggtggaggggtacaccgacgtcatcgcgctgcacgaggccggcataggcaacgcggtggccacgctcggcaccgcgctcaccatgcgccacatacgtctgctcgcgcgccacgcgcagcacaagatcgtgtacctgttcgacggcgacgaggcgggacagcgcgccgccgaccgcgcgctcggcttcatcgacgactccatgacgccggaggcggggcgggcgaaggtggagctggccgccgtcacgctgccggacaacctggaccctgcggagttcgtgggcgcgcgcggcgccgacgcgctgcgcgagctcatcgcgcgcgcccagcccctgttgaagtacggcatcgagcgccgcctggccgcgcatgacctgggcagcgccgaaggccgctcgcgcgcgctcgtcgacgccctcgcggtgctcgcgcccatcaaggactcgcttctggcgaaggactacgccgtgcagatagcgagccgctgccgggcccgcgaggaggacgtgctcgagcagctggcgcgcctggagccgccgcgccgcgccgccgaggcgggcgacggcgggccgggccgtgcgggcgcacccgcaggcgacgggcgccttcccgcggcggatccgggagccgcgccggccacgggcgggggcgcgccgcgccgcgcggggctgtcccagcccgaggcgaaccggcgccgcttcgaacgcgagttccttagccttgcggcgcagcaccccgagctcgccctggcacatgccgacgcgctcgccagcacgcagtggcatgagccggtgcacgccacgctcgcgcagagcatgctggccacgctggccgaggaccccgccgcgcccgcggcgcgcgtcatcggcgacgccgcccgcgtgctgccgcaggcgtcgggcatcctcacgtccggctccatggccggcgcgaccgagccggagccgctcgcgcgcttcctggcggaggagctggccatcggcgacgccgaggacgccgtggccgccctgcgcgcccagctgtccgacccgtcctccctgcccgccgacgagtacgagatgctgttccagaccgtgaccgccatgcagaaggacctgacccgccgccgcctcgcgcacaaggccgtgtagcacgaggagggcacgtccaaggccggctgatgcgaggttcgcccgctcgcgctctcttcattccgcctggcgccacctcggcggcacggacgacatggtatactcgagcaaagagaaaggagtcgccatgagtcccttcgtctggctgggcgtcgccgccgtcatgggcgtcgtcgagatcgtctcgctcagcctcatcaccatgtggttcgtcgtgggcgcgctcgtcgcgttcgccgcgagcctgctcggcgccgacctcgtcgtgcagctggtcgtgttcctcgtcgtctccgtggcctgcctcgtgggcctgcgccccgtgttcgtgaagtaccgcgaccgcggcaagcaggaggagcccacccatgtcggccagacggccgtcgtggtggaggatgtcgacaacgacggcatgaccggccgcgtggagacggacaaccgcatgacctgggccgcgcgctccgcggacggcctccccatccccgcgggcgaggtcgtgcgcatcgtgggccaggaaagcgtcaagctcatcgtcgaaaggaaacgctgatgttccccttgaaccccctcaccatcgccatcgtcgtggtcgtcgtgctcgtggtgctgttctccgtcacgtgcatcaagatcgtgccgcaggcgcaggccgccatcgtggagcgcctgggctcgtacctcaccacctggaacaacggcctgcatgtgaagatccccttcatcgaccgcgtgcgcgcgggcatcacgctcaaagagcaggtggccgacttcccgccccagcccgtcatcacgaaggacaacgtgaccatgtccatcgactcggtggtgttcttcaagatcatggacccgaagctctacgcctacggcgtggagaacccgctcgtggccatcgagaacctggccgccaccacgctccgcaacatcatcggcgacttggagctggacaccacgctcgtgtcgcgcgacaccatcaacgccaagatgcgctccatcctggacgaggccaccgacgcgtggggcatcaaggtgaaccgcgtggaggtgaagaacatcacgccgccggccgccatccagcaggccatggagaagcagatgaaggccgagcgcgagaagcgcgaggccatactcttggccgagggcgagaagcagtccgccatcaccgtggccgagggcaacaagcaggcgcagatcctggccgccgaggccgagaagcaggccgtgatcctggccgccgaggccgagcgcgagaagcagatacgcgaggccgagggcgaggccgccgccatcctgaacgtgcagcaggccaccgccgacggcatccgcatggtgcgcgaggccggcgccgacaacgccgtgctcaccctgcaggccttcgaggccctgaagaccgtcgccgacggccaggccacgaagatcatcattccctccgacatccagggcgtggccggcctcgccgccagcctgaaggagatcgtggtggacaagtaggagtcgcttgctttcttccccttctcaccttgggttttgtggatgtttcccgcatgctactggacaaggggcagccgaaaccgcacaatgtccccataaggagcttttccgcgtcccggcctgcgccgggacgcgtgcgataaggaacgagagggacgtgtcttcgtgataaccatcgtgcaatcaccgaacccgttgctgaacacggtctgcgagccgtgcgatttgggcgacaagggcctgcgcaagctggccaagcagatggccaaggccatgtacaagaacgacggctgcggcctggccgcgccgcagctgggcgtgacgaagcgcctcgtggtggtggactgcgaccaggccgagtccggcgagcaggaccccatcgtgctggtgaaccccgtgctcgtggacacccagggcgacccggtggtggagggcgagggctgcctgtcgtgccccggcatctccgtgcccatcgcgcggccgccatgggcgcgcgtgcgctacttcgacctggacggcgaggagtgggagatcgagggcgacgggcttttgggccgctgcctgcagcacgagctggaccacctggacggcgtcaccatgttcgagcgctgcgatcccatcgcgcgcatccaggcgctgcgcgactacgagctggcgcgcgccgcgggcgcgaagccgggcgagacgtcgctcgatacgcgggtgcgctgaccatgcgcgtcgtgttcatgggcacgccggagttcgcggccaccatactggaggacctgtcccagcagcacgaggtggcggccgtgtacacccgccccgacgccgtgcgcgggcgcggcaggaagctggaaccgtcgccggtgaagcgcaccgccgagcgcctggggctgcccgtgctcgaaccgcgcacgctgcgcgacgaggccgtgcaggccgagctggcctcgttcgagcccgacgtcatctgcgtggccgcctacggcgccatcctgccgaaagcggtgctggacctgccgcccttcggctgcctgaacgtgcatgcgtccctccttcctcgttggcgcggcgcggcgccggtggagcgcgcgatactcgcgggcgatgccgtggcgggcgtgtgcatcatgcgcatggaggagggcctggacacgggcgcctactgcgtgtgccgcacggcgcgcatcgacggcaagacggcccccgagctcaccgacgagctggcgaacctgggctcgcacgccctgctcacggccctcgtccacgtgcagagcggcgcggccgagtggaccgagcaggacgagtcgcaggtcacctacgcctcgaaggtggggaagcgcgagctggacctggaccctcgggatacggccgaggcggctgtccgcaaggtgcgcgcctcgagcggcgcccaccccgcgcgcgccgtcgtagccgcccgcccggtgacggtgctcgcgctgcgttccgtggaagacgcccgcgggtgcgagctggcaggggggctggtggcgggggaggtgcgcttcgccggaaagcggctgttcctgggcttcgccgacggtgcggccgaggtggcctccgtcaagcccgacggccgccaggccatggacgccaaggcgttcgccgccggcgtgcagggcatcaagcagaagacgctttcatgggaggctgcgcatgagtgacgagaagaccgcgggccgcccgtcgaaggcgagcccggcgcgccttgcggccctcgccgtcggcggcgacgtgcgccgccgcgacgcctacgcgcaggacgtcatcgcccggcgcatcgacggctcgcgtatgagcccggaggaccgcgcgttcgccacgcgcctcgcgctaggggtgacgagcagctggggtacgctcgacgaggtgctggaccgcgcgctcgacaagcccggcgacgtgcaggacgacgtgcgcgacgcgctgcgcattgccgcctacgagatactgttcctggacaagacgccgcatgcggccgtcgaccagggcgtggagctcgtgcgctccgtgcagccccgcgccgccggccttgccaacgccgtgctgcgccgcgtggtagccttgaaacgcgacttccccttcggcgacccctcccgcgacgtggcggcgctcgcgcgcctgcatgcgttccccctatggctggccaagcgcctcatagccgacttgggcccccaggcggccgtggacctcatgcgcgcctcgaacgagcccgcgccgctgttcgtggccgtgaacgaggcgaaggcgacggcggaggaggtgcgcgcggccctgggcgaggcgggcgcggacgtgcgcccggtgtccatcgacggcgtggaggtgccgggctgcctgcaggttgccgagccgcgcgcgctgcaggacgggcgcgtgcgccggctgttctcgcagggcaagctgctcgtgtcggacgcggcctcgcagctcgtggccgcgagcgtgctgcccgcgcacatgcccgcgtcgtttctggagatagggtccgggcgcggcacgaagaccatcctcttgcagagcggcgccctgcgcgcctacggcagccagatggagctcgtggcgctggacaaccacgcgttcaagaccgacctcttgcgcgagcgggccgtggagtacggcgtgcacgtggccgacgcggtcacgggcgacgccaccatgctcggcgccgtgctgggacgtcgccgcttcgacgccgtgttcatcgacgccccctgctcgggcctgggcacgctgcggcggcatcccgagatacgctggcgcctgaccgaggagcatctgggcgagctggccgcgctcggcctgtcgctcctgcgttcggcggccggccaggtggcgcgcggcggccagctggcctacgccacctgtaccgtgacccatacggagaacaacgccgtggttaagcgcttcctggagagccccgagggtgccgatttcgagctggcccccatcgctggcaaggcgtgcgtggccacgcgcctcgcgcccggaacccccgacgcgcacttcgccgtgcgcttcgcgcgcaagcgatagggcgcatgcccggccggcgcgccgggcacctgcgacgctttcccggggccggccggttggggcttctcggtcgacccgcaagcgccgtgctccgcttatcggccgactggcgttttttgccggacggccgtggacgcacggcgtcccttcctccggtttattgcgcgtccgcctgcggagatttcggccttctggggccgaagccgaccgatttgctatacaatgggaaaactttttaccaggcaaggcagggccgccccccatccaagcgacgctgccgcgacgttgagaaggaggtcaagcgactatggagccgaatatcgaagaggtggcagggcgaattcgggcgctgcgcgaagacctcgacatcacccagcaggagatggcggacgccaccgggcgcacccttgccgagtacgccgcccaggaatcgggcgcgcaggacctgtcgttcacgttcctctacaagtgcgccgagcgcctgggcgtggacgtcatcgagctgctcaccggcgagaaccctcacctgtcgggctactcgctcacgcgcgcggcggacgggctgtccatcaagcgccgcgcgggcttcgagtacctgcacaaggccccccacttcaagaacaagctggccgagccgttcctggtcactgcgccctacctcgaggaagagcaggatgctcccatccacctgtcctaccacgtgggccaggagctcgacttcatcctgtcgggcaagatgcgcttcgcctacgaggaccatatcgaggagctgggagcgggcgatctgctcatgtacgactccggccgcggccacggcatgatcgccaccggcggcgagccgtgcacgttcctggccatcgtcatgaagccccacggggacgcgattatctaggcgccgccacctctcctcggctcgtcgcccttgatgggccgaggcgggcgtcaggtcaggcgccgacgcatcgatgatcgtatccgcctcgcggcgggctgcccgccgcattgcctccaaggaagagaacacccatgagaaacatcaacctccgcttcgtcgaagagacctacgacgaggaaggcctgctgaccgatttcgccgtcaaatgccccgagagcttcaacttcggctatgacgtggtcgacgacatcgcgcttgccgaccccgaccgtcgcgccatggtgtggtgcaaccccgagggcgaggagcacgcgttcacgttcgccgacatgaaggagtggtcggacaagaccgcgaactacctggcggacgccggcatcggccgcggcgactacgtcatggtcatcctgcgccgccactaccagttctggttcgtggccacggcgctcgcgaagctcggcgcggtcatggtgccggccaccttcatgctcaaggagcacgaccttgagtaccgcctgaacggcgcgtccatcaaggcgatcatcgccacgtcgctcggcgacatcgcgaacgtggtggacaacgtggccgacgcgtgccccacgcttcaggtgaggatgctcgtgaacggcgcgggcggcggcctcacgcccgaggacgcggacggcaacctcgtgttccccgacgacgggctgccgctcgggcccgcgctctccggccccgacggcgtctgcgcggccccggccgagcgcgcgggctggctcgacttcaacacgggcgtgcgcgcggcctcggccgacttcgcgcgcgtggagacgaaggcggccgaccccatgctcatgtacttctcgagcggcacgtcgggcaatccgaagatggtgctgcacgactccgagtacgccatcgcgcacctggtcacagccaagcattggcacaacgtgcagcccgacggcctgcacttcaccatcgccgacaccggctggggcaaggccgtgtggggcaagtactacggccagtggctcatggaggcgtgcgtgttcacgtacgacttcgaccgcttccatccctccgagatcctatcgctcatcgggaagtacggcatcacgacgctgtgctgcccgcccacgatgtaccgcatgatgatggccgaggacgtggacgcctacgacctgtccacgctcgcgtactccacgaccgccggcgaggcgctcaaccccgacctgttcgacttctggaaggagcacacgggcctcaccatctacgagggcttcggccagaccgagacgccgctcaccatcgcgaacctcacgggatccaccccgcgcccgggctccatgggcaagccggtgccgctgtacaacgtggagatccagcgcgaggacggcagccgctgcgacacgggcgagacgggcgaggtgtgcatcgacgtgcgcgagaaggccgccggcatcatgctggagtactaccgcgacccggagaagacggccgcggccgtgcacgacggctggtaccacaccggcgacaccgcctggtgcgacgaggacggctacttctggtacgtcggccgcaacgacgacgtgatcaagtcgagcggctaccgcatcgggcccttcgagatcgagagcgtgctgctcgagcacgaggccgtgcgcgagtgcgcggtcaccggcgtgcccgacccggtgcgcggcaaggccgtgaaggccaccgtggtgctggccgagggcttcgccggcacgagcgagctcacgaaggagctccagacctgggtgaagaagcgcaccgcgccctacaagtacccccgcatcgtggagtacgtggacgcgctgcccaagaccgtgaacggcaagatccgccgcgccgccatccgccaggaggacgagaagcccaagacccccgaggggctggtgtgacgcccgcggcttgggcgcctgccgcgcccgtcctggtggtgaccggccactacggcgttggcaagaccaacctctcgctcaacctggcgctcgacgcggcggcgcgcgggctggaggtcacggtggtggacctggacgtggtgaacccgttcttccgctcgagcgactaccgcggcctcttggacgaggcgggcgcgcgcgtgatagcgccggtgttcgcaggcacgaacctggacgggccgagcctgtcgggcaccatcctgccggccgtcgagcaggcgcgcgcgggggaggggcggctgctcatcgtggacgcgggcggcgacgacgtgggcgccacggcgctcgggcgcttcgccaagacggtggcggccgggccctacgagatgctctacgtggtgaaccgcagccgcaacctcacgcagaagcccgccgaggcggtggaggtgctgcgcgagatcgaggcgaagtcgcaccttgccgccacggccgttgccaacaacacgcacctgcaggaggacaccgacgcgtccgtggtggccgcgggcatccccttcgcccaggaggtcgcgcgcctcgcgggcctgccgctggccttcaccacggtgcctgccgatgcggccggccaggacgctgaccggcaatttccccgctttgggcgggacggaggggcgggcgcgccctatcctgtgcgagtatatgtgaaaactccctggcaataagacgagagagcggcggcgcttcggcggcgccgagcgtgcatgactgacgagacgaggaaggcggatcatggcgagaatcagcgtagacgactccttctgcaaggggtgcggcctgtgcgtggacgcatgccccgtgcatatcatcgagcttgacgacgacacgatcacggcgaagggctaccacccggcgcattgcgtcgacatggacgcgtgcacgggctgcgcgtcgtgcgcgacgatgtgcccggacgtggccatcacggtggaaaggtaggctgggcatggcagagaaagtgctcatgaagggcaacgaggcgctggccgaggcggccatgcgcgccggctgccgcttcttcttcgggtatcccatcacgccgcagacggagctcgcggcctacatgtccaagcgcatgcccaaggtgggcgggacgtttttgcaggccgagagcgagatcgcggccatcaacatggtgtacggcgcggccgctgcgggtgcgcgcgtcatgacgtcgtcctcgtcgccgggcatctcgctcaagggcgagggcatctcctacatggccggcgcggacctgccgggcgtcatcatcaacgtgcagcgcggcggcccgggcctcggcggcatccagccgtcccaggccgactactggcaggccacgcgcgcgctcggccacggcgacttccgcgtggtggtgtacgcgccctccacggtgcaggagatggccgactacgcgttcacggccttcgacgtggccgacaagtaccgcacgcccgtcatgatcctcgccgacggcatgctcggccagatgatggagcccgtggtcatgcccgagccgcgcgacgagcagatcgagaagccctgggccaccaccggccacaagcatgcgcggccgcacaacgtggtgaactcgctctacctcacggccgacgagctggagcgcctgaacatcgagcgctacgagcgctacgcccagatcgagcgcgacgagcagcgcgccgagacgttcctcgtcgacgacgccgacgtggtggtcgtggcgttcggcgcgagcgcccgcgtggcgcgcagcgccgtggtcgaggcgcgcgcgaagggcgtgaaggccggcctcatccgccccatcacgctgtggccgttccccgtggacgcgctcgaggcagccgtgcccaccgccaaggccttcctcaccgtggagatgaacatgggccagatggtggacgacgtgcgcctcgccgtgaacgggcggtgccctgtggagttcttcggccgcaccggcggcgtcatcccgacgcccgtggaggtgctggcccagatcgaggacctgaacgatcgcatgatgaagggaggggagtaacccatggccgagaaagagaccaaagtggtgttcgagcgcccgcacgcgctccttcccgtggtgacgaactactgcccgggctgcacgcacggcatcatcaaccgcctcgtggcggaatgcctcgacgagctggacgtggagggcgacgccgtgggcgtggcccccgtgggctgctccgtcatggcctacgacttcttcggctgcgacatgatcgaggccgcgcacgggcgcgccccggcggtggccacggcggtgaagcgcgtgcacccgaacaacgtcgtgttcgcctaccagggcgacggcgaccttgcctccatcggcatggccgagaccatccacgcggccacacgcggcgagaacatcaccgtcatcttcatcaacaacgccatctacggcatgacgggcggccagatggcccccaccagcctgccgaaccaggtgactcagacctcgccctacggccgcgacaccgacgcggccgggttccccatccgcgtgtgtgagctcatgagctcgctcgacggcgtggcgtacctcgagcgcgtgacggcggacagcccgaagaacgtgcgcaaggcgaagaaggccatcaagaaggcgttccagacccagatcgacggcgcgggctactcgctcgtggaggtggtggccacgtgccccacgaactggggcatgacgccgcaggactcgttcgactggatgcgcgagaacatgctgccgtactacccgctgggcgtgtacaaggacgtgcgcgccgagggcttcgcgaacgcggccgaggccgcggcggcccgcgctgcggactgcccgatcgcgaaccccgcgccgcaggcggaaggaggtgcgcgatgagccgctccctgaacatcgtgctcgccgggttcggcggccagggcgtgctgttcgccggcaagctgatcgcctacgccggcctgctcgaggaccgcgaggtgtcgtggcttccctcctacggccccgagatgcgcggcggcaccgcgaactgcagcgtgtgcctgtccgacgaccccatcggaagcccgctcgtgctcgcgccgaacgcgctcatcgccatgaaccagccctcgctcgacaagttcgagcgcagcgtgaccgagggcggcgtcgtggtggccgactccacgctcatcgcggacatcccggacgtgccgggcgtgaacgtgtgcgccatctccgccaccgccatggccgaggaggccggcttcaagaagctcgccaacatcatcatggccggcaagctgttcgccgagacgcgcttctgcgccgaggacacgctgtggaaggccatggagaagtgcgtgccggccagcaaggccgccatgctggagatgaacaagaaggccctacgcttgggcatggaagcatagggaggcagcatggtaaccgaattcgccgagatagggctgcgcatcaagggcctgcgcgaggcgtgcgacgtcacggtcgaggacatggcggccgagttggaagtgccggtggagacgtatgaggaatgggaggccacgggcgcggacgtgcccatctcggccatctaccacatggcgcaccacttcggcgtggagttcaccgagatcctcaccggcacggccgccaagctgcagacctaccaggtggtgaagaacggcgagggccgcgaggtggaccgctacccgggctaccacttcgaggacctggcctggcgctacaccggcaagatcatgcagccgctgctggtggtgctggatccctccgacgagccggccaagctcgtgacgcacaccggtcaggagttcaacctggtgctggagggtaccgtcgtggtgacgtgggaggacaaggagttcgagctgaacgccggcgacagcatctacttcaaccccgagcacccgcacggccagcgctgcggaggcgacgtgcccgccaagttcgtgaccatcatcgcagagtaggaagcgcgacccgtgaaccatatcctgaaaaagtattgcccccgtatcgagttcgattcctacgaggacttcttcgagaacttccagatcaacgtgcccgaggcgttcaacttcggcttcgacgtggtggacgagtgggcgcgcgtcgagcccgaaaaacgggcgctcgtgtggtgtgacgaccatgaccatgagcgcacgttcacgttcaccgacctgtcgcgcctgtcgaaccgggcggccaacgcgtttagcaagctgggcatcggcaagggcgacgtggtgatgatgatcctgcgccgccgctgggagtactgggtgtgcgccgtggcgctgtgcaagctgggggccaccatcatccccgcgtcgctgcagctgacgaagaaggacatcgcgtaccgcgccaactccgcgcaggtgaagatgatggtgtgcgtggacgacgactacgtgtgcacgcagaccgaggaggcgctgcccgattcgccgtccatcgagaaccgcatcatcgtggcaggcgagcgcgcgggctggacgccgttcgacgagctgatcgccggcgagtccgacgagttcgagcgcccgatgggcgaggccggcgtcacgagcaaggacaccatgctcatctacttcacgtcgggcaccaccggcatggcgaaggccgtgtgccacaacttcgcgcatccgctgggccacatcatcacggcgaagtactggcagcaggtggaggaggacacgctgcacatgagcgtgaccgattccggctgggcgaagttcggctggggcaagatctacggccagtggatcgccggcgccaccatcttcgcctacgacatggacaagttcgtgcccacgaagctgctgcagaagatccaggactaccagctgaccacgttctgcgcgccgccgacgatgtaccgcttcatgctgcaggaggacgtggcttctttcgacctgtcgagcgtgcacaacttcgccacggcgggcgagccgctcaacgccgaggtcaccatcgcgtggaagcgcttgaccggcaagaacatccgcgagggcttcggccagaccgagggaccggtgctcctggccacgttcccgtggatcgagccgcgcccgggatcgatgggcaagccgtcgccgctgctgaacatcaagctgctcgacgaagagggcatcgaggtgcccgacggcgaggagggcgccatctgcgtcacgggcctcaaggaggcgtacccgccggggctgttcacgggctactaccgcgagccggagcgcacgcaggaggccgtgggcggggagtactacaacctgcacgacatggcgtggcgcgactcggacggctactgcttcttcgtgggccgcaacgacgacgtcatcaagtgctcgggctaccgcatcggccccttcgaggtggagagcgcactcatcgagcaccccgccgtggtggagtgcgccgtcacggccgcgcccgaccccatccgcggcaaggtggtgaaggccaccgtcgtgctggcgcgcggctacgagccctccgacgagctggtcaaggagctgcaaaaccacgtgaagcacacgaccgcgccgtacaagtacccgcgcatcgtggagttcgtggacgagctgccgaagaccatcggcggcaagatcaagcgcaagctcatccgcaacaacgacggcatcgaggactaggggctccgccgcgcctgaagaaccgcaaggagcacgcatgagatcgcctgccgagatgttcgcgctgttcgaggaaatcgcctgcgcggacgagcgcatccgcgccatgacgctcgaagggagccgcgccaacccgaacgctacctcggacgcttggcaggactacgatgtgaccttcctcgtctcggacgtggagagcttcacgtgctccgacgggtggctcggacgcttcggcgacatcgtgctcatgcagaagccggaggcgatggagctgttcccgcccgacttccccgcggggtggttctcgtacctcatgctgttctcggacggcgtgaagatcgacctcaccttggtcccccgcgaggacggggaagcgtacttcgcacaggatccgctgatccgcgtgctgctcgacaaggacggcctctgccccgacgcgttgcggccgtccgacaagcggttctgggtgcagcggcccccgtcggcgcatgtgagggattgcgcgaacgaattctacctctcctgcacgtacgtggcgcgcgggctgctgcgcgacgagctgctgtgcgcgaactggacgttcgagcagatcgtgcgcgtcgagctgctccgcatgctcggctacgcggccggcgcgcgccacggcttcccgctgaacgcgggcaagcacgacaagctgctgccccgcctcttggagccggccgagcgcgagctcctgctcggcacgtaccggctcgattccgtcgacgcggcgtggaaggccctgcgcgccgcgatggatctgttcgaggcgtcgatgacggaggcgtgcgaagctctctcgtacgagtgcccgaacgaccgtccgaagatcgacgcctacctggaaaccctcaaggaccttcgataggccctcatgttctttgttgcgacggcggccgagcgggtcgtatccgaaaagggcaggccttttcagacgctttgcctatcgggcgtggaagggcgaacctgatccgatttctttcgaccgggcgacgaagacacgcccgtctgcttccttctggtacaatcgagcgcaacgcgggcggggcaacggaacgggaggtgtgaaccatggttgaaatcgtcgatctgcgagattgcggcaaaagcggcttgttctacggcgggcgcgccgggcagaaggagggcatcctcatcgacggagagccttggatcgcaaagtacccccgtaccacacgcgatctggaagggaaacacctgccgccctacacctcgagtccggtttccgagtacgtgggcgctcgtatctacgcatcgctgggcatccctgtgcatgagacgatgctgggttatcgggcggggaaggtcgtgtgcgcctgcaaagacttcacttatcccgacaagcgcctgttcgaattccgggagatcaagaacgcgctttctgacgatgacgcggggttcaactctgcgccgtccgatggcgagagcgtgtacttgggcgatgttcttgctaccatcgagacgtctgacctgctgcgcgcgatgccgggcgtgcgagagcgcttctgggatatgttcgtggtcgatgccttcatcaagaaccctgatcgcaacaacggcaactggggcttgctcatggacgtcggccgctcctacgagctggcgccggtatatgatctgggaagctcgctgttcagcaagaggagtccctcgcttgcggagagccgtctgacaggcgatgaaaatatcgagcaggacgccttcggcacgaacgtgtcctgctatcggttgccgagcgaggatggtcgaggcagggccatccatccgttcgagtacctagcctctacgcgcaatcccgatttggacgcggcgctcgttaggttcgttgagacggtggacatggaggccgtctgcgcccttatcgacagcgttccggcagaggctttcggtcgggtgcttatgacagaaggcgtgcgatcctcgcataaactgctgctccgccgtcgattggaggacggcttcctgcccgtctatcggcggattaccggataggctctgcgcgcggcccgtttgcgctatcatgctcgcatggactccgaattcccgacataccgcgactacgccttctgggcgcgccagtcgctcgatgagatcgcgcgcgactgcgacgtgcaggtattccgggcgagcggcccgggcgggcagtgcgtgaacaccaccgactccgccgtgcgcatggtgcatgggccgagcggcatcgcggtgacgtcccgcgagtcgcgcagccagttccgcaaccggcagctgtgcctgcagaagctgcgccgcctgttcgaggccgaggcgcgtccgccgaaggttcgccgcgccacgaagccctcgcgctgcgccagggaggcgcgcctcgccgacaagcatcgccgcgcgcaggtgaaggcgcagcggcgccccgtggacggggagtgagggcgttgctcaggggagctccgcggcttcggaggcgcatccttcggtgacacccctgcgctgcaccgtgcgggccagccccaacgccaacgcggcggccgcgagggcgaacagcgctccgacggggccggtggccagcaggcctcccgcgttcaccacgaggccgcccgcgaacgatcccagcgcgatgccggcgttgaacgccatggggtgcagcgaggcggagaacgtgagggcgctggggtagtcggtgcgggcgacgtcctggaacagcatctgcacggtggagttcatcacgtacatgagcaggcccaccgcgaggatgttcgcgatgccgacggccccggcgggaaggctcgcggacaaaagcgccagcaaggccgcgtgcaccgcgaagacgacgggcagcgcgcgcagcccgaagcggcccgccacccagcctgacagcaggttcgagcccacgcacgcggcgccgaacagcagcagcacgaggctcgcgcccgttgcgtcgaggccgatgacgtcggcgaggatgggcgcgagataggtgtagaacacgtaggtggatgccgcgcctgcgaggatcatggcggcggcgcccagcacgcgcgcgtcgccgagcaagcgcagttgcgatcgcagggtgggagccgcgcctgcagcatgcgcggaggagccgcgggggagcgccggcagcagggcggcgctcacggccaggccgagcgcgaacacgcaggcgtaggctgccttccagccgaacgggccggccagcgccgtgccgatgggcacgccgacgacgctcgacaccgagaacccggccagcacgaggcccagcacggcggccacgcgctccttcgccacgatgtcgggcacgtaggtgagcgcgagggccaaaagcgtgcccgatgtggcggcggacagcatgcgcgagacgagcagcagcacgtaatcgtcggcgaacagcgtgagcaggttgccgacgccgaacaccgccagcagcgccgccatcaccttgaagcggtcggcgcccgctgtggcgagcgcgacgacgggcgtggcggcggcgcaggcgagtgcgtaatatcccacgaggtcgccgacgagcgtgagcggctcgcccagcccctcggccacggcgggcgtgattccgatcagcacgaactcggcgaagccgagcgcgaacgcgagcgccaccagcagcgccgccgcgaacgcggtgcgccgggggctcgcgatgtttccggtgttcataaaggcctcctaagaatggtccttgttttccttatccaccgtaccgctctcgtggtaaaatagctaatgcatataattaaagcctttatatgcctatcgggtatatagattcggaggacgccatggagcttcgaacgctcaggtacttcctcgcactcgcgcaggagggtaccgtctcgaacgcggcgaaggcgctgcatgtgacgcagcctacgctgtcgcgccagctggccgacttggagaagggattcggcaagcagctgttcgagcgcggggccaagcgcatcgtgctcactgacgagggagtgcgcctgcgcgagtacgccgaggccatagtggagttggccgacaaggccgaggccgagctggctcagcccgagcgcgccgtggccggtgacgtgtacgtcggctgcggcgagtcggacgccatgcgcatcatcctgcgcgcggcgaaacgggcacgcgacgagcatcccggcattcgcttccacctgttcagcggcacgagtgccgatttgatggaccgcttcaacgaggggctgttcgacttcatggtggaattcgaggccgtgagccgtcccgactgcctgtcatgcccgttgcccatgctcgacacctggggcgtgctcatgcgcgcggattcccccttggcggatctccccgccgtgcgtgccgacgacctggccgcgcatcccgtcatctgctcgcgccaggcgctcaaggcgggcatcatgcaggcgtgggcgggcgaggcgttcgattcctgggacgtggtagccacgtacaacctcgtgttcaacggggcgctcatggtggaggagggcctcggatcggccatctgctacgacgggctggtgaagacggcccccggcggcccggtgtgcttccggccgctcgatccgccgctctcctcgaacatcgacgtggtttggaagaagcaccgccgcctctcgaaggccgccgaagcgttcctaggctgcttgcagaaggaatgcggcgaaccggagacgcggtaggcagggtgcgcgcggagccggacgtcgcggcggtcggcgatgggcggttctgctgggagaggtgagggatctcgatgttcccgttgaggggaaggggcgcctccgcaagcccgatgctcccgttgcacccgtcccgcgcgccgccgccttgcgctcccgcctatcttgcaatgctcgataaacatgagttaaagtatcatggacaaaatgaccagtattctttatctaaatacgagcataatacgaagatcggccttttcaccaggggttacgtagagcgccgcgtgcggacgacggatatcgccgcgaaaatctagagaaaagtggccgttttgtccaaggccgccggctgcgggaggcacggggatttcctgcgggaaggagtggcctgcgtggcttcatggccgcccgccgtcgcccgcttctcgcgacgagtgcgcgggccctgtcatgtcaccctcgcgctcgtcgatgcgcattatcagggtccgcacttccattacatgcctagcaagcataatcaactactcattataggtattagctttgtccttttcccggacgcacaatggaggcaccggatcggcacgaggtgccggcagggggaaaggagagacgaagatgagtttgttgcacagcaccatgagccgccgcagctttctgcgagcgagtgcgggggccacggccgccgcggcggcgctcggcctcgccggttgcttgagcgcggaggcgccagcgcatctcacggacgacgacggcgcactggctatcgcgtcggatgcgcgcgtcatcggcggggagggggagtggatccccatccactgccaccagaactgcaaccagatgtgcctgaacatgggctacgtggtggatggcgtggtggttcgccagaagacggacgacgctcgcgaggaccgcttcgactgcccgcagcagcgcggctgcctgcgcggccgcagcctgcaccagcaggtgtacaacgctgatcgcatcaagtatcccatgaagcgcaagcattggcagcccggcggcggcgagggcgcccacggcgagctgcgcggcaaggacgagtgggagcgcatcggctgggacgaggcgctcgactacgtgaccgacgagctcaagcgcgtgtatgcggaatacggccaggacgccgtcatctgcaacggctggcgttgggcccccgcttcggccatgttccccgtcatcggcggggcggtgtacaacaccgagaccgagtcgttcggctgctgggcgtttcaaaccgaggcgctgggcctgtactcgcacggcgaccatcccgacctcatgatgggccccgacaagtacgacctgccgaacgccgacaccatcgtgctgtacggctgcaaccccgcgtgggcgcagcactccagcatgtactggctgaacaacgccaaagaagcgggcaccgagttcgtgtacgtgggccccagctacaacgtgagcgccgcgcagctgggcgcgcgctggatccgcgtgcgccccggcaccgacacggcgtttttgctggccgtgatccacgagatgatccgcttggacgacgagcgcggcgacgtcatcgactgggacttcgtgaacgagcgcacggtgggcttcacgcccgagaccatgcccgacgatgcggccgacgacgagaacttccgcgactacgtcctgggcgcctacgacggccagccgaagacgccggagtgggcgagcgagatctgcggcacgccggtggaggacatcgcgtggtacgcggagctggccggcaagaacaacaaggtggtcttcttccacagctacgcggcgtcgcgctacctgggcgcggagaacctgccgcaggcgttcatgaccgtgtcggccctgggcggccattacggcaagtcggggcacggctcggccgccatctacacgtgggacgcgggcgattcgggctaccgtctcatccagcatgcgggcggcgactacggctatgtcgacaacctcgttggctcgccgggcgcaaccgggccgaaccgctgcatcgagggcaactcgtggtggagctcgcttgcagaaggccgttacctctccacgtcggccgggccctacgacctgggatcgggcgacgatcccgccaagctgcgcgccaacacgcccacctaccacgaggcgcgcgagatgcccgtcaacccgcgcctcttgttccagacgaactccaacttcatgcagacgcggggcaacctgcccacagccatcgaggtgatgcgcgccgcggacacgtgcatctcgctcgagatcaagttctcgctgaccgcgcagttcgccgacatcatcctgccggtggccacgcattgggagggcaacgacgacgaggcctggggcgagctgtgctggccgagccccttcggcgacggcaacggtcagaagcagcgcaaggacgcgcttctggcgtggcgcccgctcgtgaagccgatgtacgaagcgcgtgaggagaagcgcatctgccgcgacatcatcgagcgcatgggtttcgaccccgacgaggcgtatcccaagagcaactacgaccagtggctcggctacttcctggggatgcgcgagctctcgagcgacctgtcgcgctgggaaccggtgatcgcctggacggccgccgacaacgagaaacacggggcggactacccggagcaggagggcaaggtgggcttcgacgagttcatggagaggggctcctacgtggtcgagcgctccgccgacgaccggcgcaactacgtgggctaccgcgacgacaagctgggcatcggcgaggacggcacgtcggtgacggttgccgaccccgcatggccgcgtccgtcgcgctcgggcaagttggaaatatactgccagttcaaagccgacaacgtgaaccgagtgggcctcaaccccgagcccatcaagccttatgcgaactacttcgtgccgaaccgcggctaccaggagacgttttccgactggggcgccaaggcgaagggcccctatccgctgcaggcgtacacgccccactatatgcgccgtgcgcacacatgctatgacaacatgacgtggacgcaggaagcgttcgccaacccggtgttcatgaacgcccaggatgccgaggaacgcggcatcgcggccggcgacacggtggcatgctacaacgagttcggccgcatgcttcgccgtgcccagcccttgcacggcatgatgccgggcacggtggctatccctcacggcgttcggacgctgctcgacgagagcgatcccgaacgcatcgtcgatcgcggcggaagcgagcagatgctctccgacgggcagcaatcgaactacttcccccaagtggacgggtacaacagcctgctcatcgaaatcgagaaatacgacggcgagcccctgcctgccgactgcgatcgcggcccgttcctggcgcccggcatcgatgccgaggacacgtccgcgtacaccgtccggggcatctacgagaacgaggaggcgtaaaccatgagcttgggattctacgttgacctgcaacgctgcatcggctgccgcacctgtcaggtggcgtgcaaggaccgacgcgacctgcaatcggccggtccgcgcccgcgaagggtggactcgttcgagtgcgggacgtatccggacgtgagcctgttccacctcgcgctgtcgtgcaaccactgcgacgagccggcgtgcgtggcgggctgccccacggccgccctgcacaaggccgacgacggcaccgtgcaatacgatgccgatcgctgcgtggtctgccgcaactgcatgacggtgtgcccctacggcgcgccgcagcatgacgaggacgcgaacctcatcgcgaagtgcgacgcctgcaaggcgctgcgcgacgcgggccgcaaccccgtatgcgtggacgcgtgccccatgcgggccatcgagttcggcgagctggacgagctgcgcgctgcgcacggggacgatctgacgagcgagctgcccgtgctgccgagcgccgacgtcacgcaccctaacctgctgctgcgcccgagcgcgggagcgctgcgcgaggatttccgcgaggtgaccctgtgagcgcggtcgcggtcgcggcggcgacggttgacggggtggcggaggagtcgttcgcgctcgaggagctgctgctgtcccgcgcctatctgtacacgctgttccacaagctgctcggcgccgcgccggacgcgccggcgctcgacgcgctgctggggcgggagaccgccgaggtagcgggcgcctacgctgaagatgacgcgacgatgcgcgggttcggacgcttcctgcaaggcttggccgcgcgcgaggaccgcgcggccctgctcgacgaggcgcgcgacgagcacgtgcggctgttcgtcggccctgggcctctgccggcattctcctgggagtcgccctaccgcacgcacgagccgtcgctgttccaggagagcacgctggccgtgcgcgccgcctaccgtgcgcacggactcgagccgaagcggctggcgcgcgtgcccgacgaccatgcggccttgctgtgcgcgttcatggcgcggcgttcgggcgcggcgctggcggcgctgcgtgcgggcgacgcgaacgggctcgccgccgagctgcgcgacgaagaggcgttcgcggcagcgcatctgaccagctggctggacgcgttcgcaaaagcggcgcgtcggtcgaggacggcggtgctgtacccgcagctgatcgaggcacttgcggcgttcgctcgggtggatgccgtgttcctggccgaggcggcgtactgggccgagggcctggccgccgaaggggctgtcggtgcgccgggcgtgcggcgggggagcgtcgaggcccgcgcgctcgaggctgcgcgcgaggcgcttgcggcgctcgaagcgctgcgcccgtacggcatcgaggattacgagctggttcccgcgcgcctgtgcgcgggaacgcgatgaggatggtgatggcattgattaccgaatttcccctgttcgcgttcacgaccctgggcggcatggctgccggggcgtacgcggccgccgcgtgctttgcggacgacgggcgagaggcgaagcgcccctggttgttcccgctcgtgtgcctcgcgctgttgggcgtcgggctcttgggcgtgctcggtcacctcgggcgccccgagcggttcctgctggcgatgagcaatcccgcgtcgatgatcgcggaggaggcgtactggtccatcgcgttcggggtgctgatgctggtcgatttcgtgctgctgctgcgccgtggcgcgagcccgcgcgccgtgcgcgtcgcggccgcggtggccgcgctcgggctcatgggcgtcatggggtgggcctacttcacgagctacggcaactccgcatgggcgacgtggcagacgctgccgctgttcgtggcgggcgacctggccatgggtgcggcgctgtgggccctgtttcggggcgagggcgcgtaccgctcgggcgcgttcgccgcggccttcacggtcgtcggtgcgctcgcgatcgcgtcgttcgcgctggtgaccgcgcacttcgcctcgctcggctacgacgcgctgccgttcgccgcggccgtcgtactggtggcggcgggcgtcgcgtcctgcctgctggcctggaagggcaagctcccggccgcagtcggcccggcggcggcgttcgccctcgtgctggccggcgtggcaaccgcccgctacgccttctacgccgcgagcatattgtagcgggtgtcccaaatgggggcagcccccatttgggacatgtttacgcttgacctgaagtgcgctccagccgctatggtaccaggaagccgacgacgaaagggatcgcgatgaacgagatgaatggcgctcgcaaggcagcgcgcatggatcggcgcacgttcgtcatgggcgcggccgcgctcggggcggcggcgctttcgggcggggtgctgggcagctgcgcggacggcgcggcggaaccggcggcgacacccgaacccgccgctcccgaaacgccggagcccgcacccgatgcgccgcgcgccgcgcagcttccctacgattcggcgttcccgccgcacgagcccctcgggcgcggcgtgggcgccctgccggggcgcgtcgcctgggtgcgcgacgcggcggccgtgacctgggacgggtcgggctactggtggcagcgcgagcacttcgacgaggacgccgtgcggcgcatggtggacgacgggatcgccgccacggcgggtgcggacgacgcggcgtccgggtggcgggcgctgttcgaggcgcacaacgcccaggtcgggcgcggcggcggctaccgggcaggccagaagatcgccgtcaaggccaacatgaacggcgcgggcacgaacggctcggacgtcgacagcgccatgagctatacgacgcccgtgctgctgcgggcgctgctgctctcgctcgtggaggatgcgggcgcggcggcatccgacatcacggtgtacgacgtgtgccgcatcgtccccgagcacgtgcgcgcgctgtgctcggagggcgcgctcgccggcgtgcgcttccgctacaacgacgagggcgggccgaacgatgccgtcggcgacgagggcgcgccgatcaggtggtctgctgacgtggccggcgacgccaacgtcgtgcccgcgtgcgtttcggaagccgactacctcatcggcctcgccagcctcaagggccattcctacgggctcacgctcagcgcgaagaaccacttcggctcgctcgtcaattccagccgcctgcgcccgcccgaggccgcgggcatccatcgctacgtgtccggccaggtcatgggcatgtatacggtgctcgtcgacctgctggcgaacgtgcacctcggcggcaagacggtgctgtggatgctcgacggcctcgtgcccgctacgtccgagggcgcatcggtcacgtccgaagccgcccgatgggagggcgctcccttcgacggcggcttcgctgccagcctgctgctgtcccaggatccggtggcgctcgactcggtgggcgccgacttcctcatcaaccagccggcggtcacgtcgcgcaacgccgcgctcgacggcaacctgggcgtggagaactacctgcacgaggccgccctcgtcgccgcgccgccgtcgggcgcggcctaccgcgacggcgcgggcggcccggtgggaaacctcggcgtgcacgagcattggaacaacgcggtcgagcgtctctacagccgcgaccgtggcgaagcggagggcatcgagctcgtccgcatactgcgatgagcctgcgcacatgcaatctccatttgacctggagccagctccaaggcgtagagttcaaggcggatcagacgatcgcaagcgatgggaggcacgtatgaagaagcgagacatggatcggcggactttcgtgatggggtcgttcggcttcggcatggcagtgctcggcggcgggatgttggccgggtgcgcggcgggcgacgagcccgcggcacccgaagcgtccgaacccgtagcggcacccgaaacgcccgagcctgcggcggcccccgagccgaaagccggcggcggacgcgccctcgtggcggtgttctcgtactcgggcaccacgctcacggtggccgagcgcatcgccgaggcgacgggggccgacctcttccgcatcgagacgaccgacgcgtggcccgacgactatgacgccatgacggcgcaggtgcagcgcgagcaggacgagggctatctgccgcagctggccgccgccgtgcaggactgggatgcttacgacaccgtgtacctgggccatcccatctggtgggggcagctgccgcacgtcgtgcggtcgttcctcgctcagcacgacctggcgggcaaaacggcggccccgttctccacgagcagctcgagcggcaacgcagccgccctcgacgccctgcgcgagctgtgccccgaagccgatgtgcgcgaagccctgcatctcacgcgcggcagccttcccggcgcgcttgacgaggtggagccgtggatcgaggggctggcgcgcgcctagcgttccgcgggctttccggcgcgtgcgatacggcgtcgggaggcgacggcgaatgcggcggcagcgaaacaggcgagggcggcggtgtcggcgaccgcagaggtcgccgcatcgccggtaggggcgagcttgccaggtgccgggagcgctgcgggctcggtgggcgcgccctcgctcgggggaggggcggtcggctccccgggcgtgtcttcgccctgatcgcgcgcggttaccgtgaacgtgcggctggcgaacgaaagggtggagcctgccgtgcagcggtacgcccctaccacttcatgcaggtcggtcttcgccgatagcggcccttcgtagggcacgaatctgagagggtcgacgtagctatcgtcggttgcctcgaagcagaacagctgtccgccgggcacgtcgtgtgcgaaggacagcacgatgggatcgccttcgctcagctctccgccgtcagggtccgcctgcacgcggacggccacgggcaacggcgcgtcgccgcttgcataggcgatgcgcgggtcggcttgggcgtcgaccgcgaatgagccgccttcaacgtcgacggccgtgagcgagccgccgcccggtatggccgctgcaggttcggcgatgtagaggagcggcacgtcggatccgaacacggtggagcgtgcggtcgggtcattggacaggctgcgcggccccgtctcctcgcgcagcaagacggccatcccgaagttctccacaagttcgtcgaaggtgcgcacaacgcagtcttgcccatcgcccaggtacccgatcttttccagcgctgcggtcagcgcgtcgcgcgtgcaggtctcgtacgttccctcgtcgtcggtcgcgctttgcgcttccatcacggcgcggtagatgccctcgcctccgcgcatcgtgccgtcggtgctcgcgagcccttcggtctgcgaggccagatagagtccgaacaggaaccacgcgccgtacgacgaggcggattcgggacggtcgacgccgggcacgtagtcttcctcgtaaacgaacggcggcaggtagccctgattgcccgtaaccatagcgagcgccgtggggtcgtccgtctcgatgcccatgaggccgatggccgcctgagagaacgcctcgtttagccaggagtcgctgtatcctccggtacgggcgtagttgatgaggtgctgaaactcgtggacgagcgtcgagagggccaggtcggcgtcgaaggcgtcggatgcgggggagccttcgtagaggctggccgcgttcacgtgcagcgcatccatgacgttccctgtcgcgtagtcgtctgcgcctgcttcgaacagatcaccgccctggaagaagcccatcacgttctcgtatccctcgaggaaagggtagaacacgaacgcggcgcgcccgtcgccgtcgacgtcggctccgccttcgtcgcgccagtctccgaacagcttcacctcgcgatcgatgaactcgtgcaggttctccgccagcagatcgaggtcttgcggcaggacggcgtccggatgctcggtatccatccagaacgtatagttctcgccgacggccacgcattcgatggcgaagtcggccttcccggcgcggtagtcgctgtagaacgcgcgcgtgtcgcccacctgcggctccgaggcggcaagggtgcgcgatccggcagagttgcttgcaagcgcgtgtcccttcgacggtgtttgcagatagggcgcggcgcagacgggggatgcggctgctccgtcggcaagttcggcggctgcggcgccatcctcggcaaccgatgccgcctcgtcggttggaaggaggcgggtcggcgtgcgcgcttcgagctcctcgtcgcttccgatgggcgtcgggtcgatcgccgcaaccgtcgatccggtgagcgtgtcatcgttgaaggcgccggacggggtggcggcgtatgcggcgggggcgctgccgcatacgagcgccgcagccagaacgacggctgcggcgcgctgtgcgagagggcgggcgagggggcgcatgggtctccttcggaaaagggaaaattcgagctccagtatagcgtgatcccgcgggcggttccgaacgctccgtcacgcgtgcgctgaaatcggccaggtattcgacgaatgccgggtcgtggtggttgaagaaagggctccctctttgcggttttccatgaagtttcctgttgacttcgagtcgactccaaggtctacgatagtctcggaaccgatttgagcaaaaggagaccctcttatgacgaacgacaagaagattctcgtggcgtacttttccgcaagcggcgagacggagcggctcgcgcggacgatcgcgcaggcgacgggcggcgacctgcacgagatcgagcccgccgtgcgctacacggcggccgacctcgattggatcgacaagcgaagccgcagcagcgtcgagatgaacgacccctcctcgcgcccggccgtcgcgagccgcgtaggcaacatggacgcctacgacatcgtgtttgtcggcttccccatctggtggtacgtggcgccgacgatcgtcagcacgtttctggaagcctacgacttctcgggcaagacggtcgtgcccttcgccacgtcgggcggcagcggcctgggcggcaccgagtccatcctgcacgagcgctgctcgccggagacgacgtggaagcccggcaagcgcctctcgagccgtgcgagcgaagccgaggtggcccgctgggtggagagcctcgggctgtaacgcgtaggcgggcgcgggttgcaacggcgctgcgccgcagcccacgcccggcccgcccgaaacgctacgacgcctccggcccgaggctgcccgccctgccctggacgctcagccgagcttcttgataaacgcgtcccagccggcgcggcccgaagcgtcgcacttgaacacgccggtgcaggcgaggatgcgcgcgaacgccccgccgacctcctcgcgcaggacggggccgatcgcctcggcacgcgcgtcctcgcaggccagctcggccgctcgtcgggcgagcacgctgacggcccaggcggcgtggggcgcggtcgcctcgcgctcgagcaggagcgcttccgcctcctgcggcgtccggcccgcccgcgcggccttggcgagctcccgctccacggccggcagctcgcgggcgaggcgcggcggcaggatggcgaggcccatgatctcgatgaggccgatgttctctttcttgagatggtgcaactgcgcgcccgggtggaagacgccccacggctgcgcgtcgtcggcgcggttgttgcgcaggacgaggtgcatcacgtagagcgcgccttcgcggtgcacgatggggttgagcgtgttgtgcgggccgtccgcgtcatgtgcgacgatgccgcacggctcgaaggagaagcgctgccacgcctccaggatgcgcgttgcagcgcgggcgagcgcggcgcggtcatgcgaggccagccgcagcgcggaggccggccagcgcacgacgccgcagcccacctgaggcagccccgcgagcgccacctcacgctcgacgggggctttcatcagggggaacacgtgacgtcctccctggaagtggtcgtgggagaggatcgatccgcccacgatgggcagattggcgttcgatcctatgaagtagaacgggaacaggtcggcgaaatcgagcagccgctcgaggcagggcgcgtcgatcctcatgggccggtgctcggccgagagcgcgatgcagtgctcgtcgaagtacgcgtacggcgagaactggaggccccagcgctcgccgcccagctcgatggcggcgatgcgcaggccgggcttggccgggcgcccgggcgcgccggggaagccctcgttctcccagcagaggtcgcagcgggggacgctggggcccgtgggagcgtccgctgccgcgccgcgcgccgccgcggcggcgatggcgcgcgggtccttctcgggcttggaccggttgatggtgatctccagctcgccgtaggggctcgccgccgtccaacggatggtgcgcgccacggccgcctcgtcgaggtagccgctcgaagcgcccaggtcgtgcaggtaagcgatggcagcctccgcgtcctgcgcgagcaggcggtcgaactccgcgcgcacctcttccggcgcgggcagcggcgcgtccatcagccgatcctccgcgcgcacgcacccggcgcgccgatggccacgggcaggcaggcctcgaagcccagcagcgcgtccatctgcgcgcggaacgcctcggccttggcgtccggcacgaaggcgagcacgctgccgccgaacccgccgccatggatgcggtacgcgcccctctcgcccaacaggtgcgcgcacagcgcgagcaccaccatcgcgggctgctcggcgcccgaggcgtcggcgcgcggcgatacgttctgcaagaactgcgccgacgacatccccgactggcgcacgagcgcgaggaacgccgggaagtcgccttcttcgagcgcccgccgctgcgccgccacgcgccgcgtctcctcgaagtagtggagcgcgcgcagggccgcgcggtcgcccagctcggcgcgcacgcctgcgaggtcctcgaggaactcctcgaacagcacgtcctcgagccgctcgcgcccaaagcgcttcgcgacggcgaacatgtcggcggggacggccacgaactcgtcggtgtaacgggagtggtcgcagcggctgtccacgaggaacagggcgtgcccgcttgcgcgcacgtcgaaggccacgggggagacgcgcggctcggcgccggcgaagtcgagggccacgatgccgccgaaggcgctcgccagctggtcttgggcgcccgtgggcttgccgaagtggacgtcctcggcccatgacccgtcgagtgcgagccgcacgaggctgcggcgcgggtccaggccctccggatcgcagagcgcgcggatcagcaggcccgtcagcatctcgaaggcggccgatgaggacactccgcatccggcggggatgtccgagcacgtcacggcgtcgaagccgcgcagctcgccgcccgcgcgcacgtaggcggccgccatgccgcgcacgagcgccgccgacgaaccgcgctcctccgcgcgcggctcgaggtctcccacgtcgatggccgcctcgccgaagccctccatgctcacgcggatcacgtcctcgccgttcggcgcggccaaggcgaacatccgccggtcgatggccgtcgatatcgtgcgcccgccctggtggtcggtgtggttgccggccagctccacgcgccccggcgcggacgcgaacgcgagggctcggccggccatgtcgccgaaacgattcgcgaaccgccccttcaagcactcaaacgcctcttcctcggtccgcatcacgacgcgcctccttccgcgagcttgttcacgcgccgatcgtacgtcagaatcccgttcgtctcctcctccacgtcggagagctgggtgtacacgtagcccgcgagcccctctccctcgagcgcgtcggcttgggcgagggtcgcgcgcacggcgccctgaaacgacgcgaggtcgctcgaggagccgtacccgtacgacgtctccagcgaggagtgcccgtccacgtgatgcgacagcccgccgaactccgagatgacgaacgcgcgcggcggccgggccgcgtcggggtacacctcgagcggccggaagtagttgtgcacgctgaggaagtcgccgcagcgctggtcgtaccacccgctcaccgcgtcgatggggcgcgtcgggtcgagcgcgcgcaccgcctccacggcccggcatgcgtcgaactgcccccacgcctcgttgaacagcacccaggcgacgacgcaggggtggttgcgcagatggcgcaccgtccccgcgcacgtggcggtccattccttgcggaaggccgggtcgtcggcggccagcccggggaagtggcgcgggtcgtcgtcggcgaaccggccccacgaggcgcggaagaacgtgggcttgtagctcgagtgccacgggtcgggggttccgccgccgctcgccatgtcctgccacacgagcatccccagcttgtcgcaccaccagtagaagcggtcggactccaccttgatgtgcttgcgcaagaggttgaagcccgcctcgcgcatcgcgcgcacgtcgtgggcgagcgcctcgtcgtccggcgcggtcatgaggccgtcgggccagtagccctggtcgagcacgccgtgcaggaagagcggctcgtggttcaggcagaagcgcggcacgccctgcgcgtccggctccacgcccacggtgcggaaggcgcagtagcttgtcgcgcggtcgcggccgaaggagagctcgaggtcgtagaggtgcgggtcgtccgggctccacagatgtgggtcgggcacgtccagcgcgagctcgcaacggccgttctccgcgcgcgcctcgccatgcgccacttccgcgtcgtcatcgagcagccgcacggccagcgtcgcctcgccgcgcacggctgcggagagcacgagcttcccctcgtcgggccgcgggtcgatttccagcgcgaccacgtgctcctcgggcaccgtttccagccagacgctctgccagatgccgctctgcgcggtgtaccagatgcccccgcgcgcaagccgctgctttccgcgcagctgcgttcccgcgtcgctcggatcccagacgcacaggacgagctcgttctcgccgtcggccagcgcgtcggtcacgtcgaagctgaagggcaggtagcctcctgcgtgctcgccgatgcgcgtcccgttcacctgcacggcgcaggcgtagtccacggcttcgaaatggagcagggcgcgctcgccgcctgcgggcttcgtgcaggacagcgcgcgccggtaccacagaagctcgtcgggccgcacctgccggcgcacgcccgacaacggcgcctccggcgagaacggcacgcggatgcgcccgtcccaggcggcgggcgggggagcgtcgcgccacgcgccccccgcatcggcgacggccgcgatcgcgtagtcccaccacccgtcgagcagctcgaaggcctcgcgtgcgagctgcggccgcggatgggccttcgcccgctccccgcccgctgccaacgcctcgccccacggcgtgagcagctcccgcagctctgcgtccttcggcttgcgcggcgcgctcgccagcacgcgtttgatatcgagcattttcgcctcctccgaaaatgtcatagaaggggacagtccccctttatgacattttgctcttcttgatgaacggcagcacggcgaacgtgagcagcgccacggccgcaccgcccaggaagatgagcgacgacggcgtgaacccgtcgcccaccacgccgagcccgagcgcccccgagcccgcgctcaaagccgagccgatccacggccccacgagcatcggcacgagcacggccatgaagatgcgcacgccctggaacgaccccacgcgcccggcgggcgtgttgttgcgcacctccgccccgaagcacgcgaccgcccccaggtagccgcagagcatcagcaccgaccccgcgaacacgcccgccatgcccgtgagcagcgtgagcaccacgcaccccgccacgaacagcagaagcggcagcaccaccgcgcgccggaacccgcaggcgtcgacccgcttgccgtagaggatggtgaacacggccgcgatcgcgatgcccggcgccatcacgaacacatagctctcgcccaggatgtagggcaggcgcaggtacagcacgtagtagggcatgaacgcctgcagcgccgtggcgaacacgaggtagcccagaagcaccaggtaaagcatccggttctcgcgcaccgcctgcgggcggaagccgtagagcgcgcttgccaggtagccgcccgcaggcgcgcggccgggcgccgagtcgtccatgaacaggagcacgcccgcgccgagcgccatcacggcgacgccgacgatggtgaagaacagcgggtagtcgtaggtcaccgtgccgtcgggccgcacgatcatgaagaacagcgcgccgccgaataccgcgagcatcgcgagcagcggcatggcggagttcacgccctccacgcgcccgcggttctcctcgcaggtgatgtcggtgacccaggcgttgaagcacgagtcgttcgccaggctgccgaagaacgtcatcacgcaatcgaacacgatggtgagcgtcacgccgaacgccatggccgccgccgcggtgccggcgagcgccgacgagatagactgcaggtaggcgaacacgatgatggaagcgccccacagcacggtgcccacgccgatgaacgccttgcgccgcccgacgcggtccgaccacgcgcccgcgaacagcgtcgtggccgtggccgtgagcgctgaggcggacaccatgagcgccacgtcggagagcgacgcgccgaacgcgtcctggatgaacaggttgaagaagttgttctcgagcgcccaggccacctgcccgaagaacgacagcaggatgatgagcgcccacgacttcctcgtcaggccggggcggggcagggaggcgtgctcggcaggcatggcatcgtcgattctctcggaggaaacaactcggtgccatcctaccggattccgcgccccggcgcaccctccttctacgccctgcgcacgggccgcacgtacttgcagaagcgcgcggggtcgaagtagaggtagatcaccttccccggcgccgtgtcgaactgccagccgttatcggcggcctcgaacgcggccatcgcggcctcgatcttgtcctccaccgtgcgcatctggcgctcgtagtcgaagggcccgtgctcgaacacggcgtactcgcccgcctccacgtccatgaggcgcaggttcggcggcacctcgcccgcccagtcgcggggcaggcgcgcgcccaggcactcgacgcgggggaagccccaggcgcacaggcgccccgccgggtcgctcacgtaggccatcacctggccgccgccggcgttggcctccgcgccgccctcgtcgtcgagcttgcccttcacgctgtccagcaggccgcagacggtggccatgtcctgcccgggaatctcgttctgcttctggcagaagtcccagtagccgttgctctctcggttggccacatgcaggaatcggtgcgcgggcaccgtgatgaaataaggttccacgttctcgttctcgtccgtcatgccgatctctcccattcccagcacgtagcggtcgaaggcggtgatcttcgtgcgcagcaccacgggccgcgggtccgcccggtacgcgctcggcgtcacgccgaaggcgcgcttgaacgcccgggtgaacgcctcgtgagacgagaacccgtggtcgagcgcgatgtcgagcaggctcgcgtcgccgtcgcgcacctctttgagcgcgaaagcgagcctgcgtcctcgcaggtagtcccgcagcggcatgcccgagacctccttgaacctccgcgtggtgtggaactcggagtacccgagcagctccgccaaggcgcgcagggtgagcgcctcgtcgtcgcgggccgcgatgctctcgtcgatcgcgtcgacgatctgctgcacctgccttcgccattcgtgcatgtcttgtccgttctccttgccggtcagcgcgcgctgagctgcactatacggcacgcggggcacgcgcgcttgatccgacttgcgaacgttgcccgcgggctctcggcgcgggccgccttactgctcgacggaaacgaacgggggaaagcggtcgaagcctcccgttcggcgcatggtctcgacgtccacgtcgaaggaggcgccgtcgtactcgtagcgcagcttgccgccttcgcagcggaagcgatgctcggcttggaaggcgacgggctttcccctgtgtcgagcgcgcagggcgtccacgttccagcatcgcaaggcctccaatctggcaaagattccgaggtaggtgagattttctctgtcatcgtcggaagtggatgtgtgcaagtaaaagactaggtcgatgcttgctatctggtcgtttcgggttgaacatgctaaatcgaaagtcgcatacctcaagatctctgccattttcgggtatgcatcggttatgggtgctgccgtcctggcctaaatgctcatgtacggtaaagaagcaagcaaccgaaaacaatagatagaccgccagcactacactattccgaaccaaagaccaaaagataagcattttgagaaaatctaaacttttggattttcctacaatgccgactacggcggaatccctcccactccttatatatttctttctgtatacattgaatttgtatttagtaaaatgcagacaacaccacggatcggcttttggctggacaattccaaccaaacaccgcagcagacagtagaaaccattctgaacgttaggaagccggtatgattgttacatataaggggaagaaaaatttcttttagatacttgttttcctaaaactgatgtgatataataattcaattccagaaaaggagtaaaaaatatgcggcaaggtattcttaaataaaactataatcaaatagtgggaacaaaggattatgatagtcccttttgtagtggcttagttttttgtacccaatttaagaatacttttgccttatcaattttgacatatccccaaaaacagcactcacaaacaggtgtatgctgtatatgtgtatgtccgcaaattatcatccccagtggtaaaagtattttactgctggggatttttatgcccttcggggcagtaaagggaggacaatcacatgaaaataatcaatattggaattcttgcccatgtagacgctggaaagacgaccttgacggagagcctgctatatgccagcggagccatttcagaaccggggagcgtcgaaaaagggacaacgaggacggacaccatgtttttggagcggcagcgtgggattaccattcaagcggcagtcacttccttccagtggcacagatgtaaagtcaacattgtggatacgcccggccacatggattttttggcggaggtgtaccgctctttggctgttttagatggggccatcttggtgatctccgctaaagatggcgtgcaggcccagacccgtattctgttccatgccctgcggaaaatgaacatcccaccgttatctttatcaacaagatcgaccaggctggcgttgatttgcagagcgtggttcagtctgttcgggataagctctccgccgatattatcatcaagcagacggtgtcgctgtccccggaaatagtcctggaggaaaataccgacatagaagcatgggatgcggtcatcgaaaataacgataaattattggaaaagtatatcgcaggagaaccaatcagccgggaaaaacttgtgcgggaggaacagcggcgggttcaagacgcctccctgttcccggtctattatggcagcgccaaaaagggccttggcattcaaccgttgatggatgcggtgacagggctgttccaaccgattggggaacaggggagcgccgccctatgcggcagcgttttcaaggtggagtatacagattgcggccagcggcgtgtctatctacggctatacagcggaacgctgcgcctgcgggatacggtggccctggccgggagagaaaagctgaaaatcacagagatgcgtattccatccaaaggggaaattgttcggacagacaccgcttatccgggtgaaattgttatccttcccagcgacagcgtgaggttaaacgatgtattaggggacccaacccggctccctcgtaaaaggtggcgtgaggaccccctccccatgctgcggacgtcgattgcgccgaaaacggcagcgcaaagagaacggctgctggacgctcttacgcaacttgcggatactgacccgcttttgcgctgcgaggtggattccatcacccatgagatcattctttcttttttgggccgggtgcagttggaggttgtttccgctttgctgtcggaaaaatacaagcttgaaacagtggtaaaggaacccaccgtcatttatatggagcggccgctcaaagcagccagccacaccatccatatcgaggtgccgcccaacccgttttgggcatccatcggactgtctgttacaccactcccgcttggctccggtgtacaatacgagagccgggtttcgctgggatacttgaaccagagttttcaaaacgctgtcagggatggtatccgttacgggctggagcagggcttgttcggctggaacgtaacggactgtaagatttgctttgaatacgggctttattacagtccggtcagcacgccggcggacttccgctcattggccccgattgtattggaacaggcattgaaggaatcagggacgcaactgctggaaccttatctctccttcaccctctatgcgccccgggaatatctttccagggcttatcatgatgcaccgaaatactgtgccaccatcgaaacggtccaggtaaaaaaggatgaagttgtctttactggcgagattcccgcccgctgtatacaggcataccgtactgatctggccttttacaccaacgggcagagcgtatgccttacagaactgaaagggtatcaggccgctgtcggcaagccagtcatccagccccgccgtccaaacagccgcctggacaaggtgcgctatatgtttcagaagataatgtaacgtcttgcgcaatgcaagcgttcattgctggctattgcgaaatatcattgataaaatcagtatcagagaggagaaactattttgaaccaggaacagacgaatattacaacaggaaagcaaatacgtcatctgcgaacacaattgggaatgacacaggaagaactagccggggaattgaatgttacccggcaggcactatcgaattgggagagagatgttaatgaacccgatttaaatatgttgaaaaaaatttgctttctttttggagtcaacatggacgattttgcgaaggaggtaataacaaagatggaaacatatgaaaaaaaaggagaaacgacaatttaataagtacgatatggcaattggacttttttatggtgttggtatatttcttggcattggtattttctttgttggcggttttatgacaatgtcaggtgcagggtggggagcatcactatttggcggtggctgtttttctcttgtatttggcttgatatgccatgcagttattacattgagaagaaatgacaaatgatgacatatcctgctttctatacttttcggtaataccgagtaaaaaaagccgctgcttttggctttccaatagcggcggcttaatgcaagcggcggcaaagggaaatatcctttgaataccttacagaagaaaagttttgcagcattacaaaaataaaagcctataccattttggaaagaaaagatacataatagtcaagacgacaacaatcagaagttatggagggtaacaatgtttatccgcaccgaccttttgacggcgggcgtgctttccaatctccggcaagtgacggaatacgccgccaggcatgagagccgctttgtaaagctgctcatccagcagaacgaaatcggcggcaagagaaagaccgccgcagccacgaagcagcttgaacaggcccagacacgcattgccgaagtgaaccgcattatcaagcggctgtatgaggacaatgtaagcggcaaaatcagcgacgagcgtttcatggagctgtcggcggactatgagcaggagcagcgggaactgaaagaccgggctgccgctttgcaggaggaactttccaagtcgcaggccgccaccgtcaacgccgagaaattcatggggattgtgagaaagcaccttgcttttgaagaattgacccccaccctcttgcgggaaatgattgagaaaatcgtcgtgcatgagtgcagctatgacgagaacggcacccgcaggcaggacattgagatttattacagctttgtcggcaagatagacttgccggaagcctaacgcctgacctatccgacacagccctaagtgccggataggaacggcaaaattttttacacttctattacttctttatcgcacattagcaatcccgtgcggcttcaaacggctcgcttggagaaagggccattcttcttctcgcttgggaccacttccttgattcttcgtctgctatggcgtatcttatgaatgaaaaataattcattaaaggtaggggggacagatgccgaaatcgccggagcggtgcgcggagttgcggggcgagatgcgggcgcggatactgcgcgagtcgctgcgctacttcgcgcgcaacgggttcgcgggcacccgcatagcggacctcgcgcgcggcatcggcatcgcgcaggggacgatctaccgctacttcgactcgaaggaggacctgttcgccgccttgcgcgagctcgcggcgaacggcgacgacgtgcgggagctcaagctgctcgcccggctgccgctgacggcgaaggcgaagatcggccgcctttccgcctccatcctggggcgcctggccgacgacgagctgttcgcggcctcggtggtgctgaacacgcagctcatgctggaggaggaacccgacgcggacggccggcccgccccgtaccgctcggagctctacgcgcacacggcgcgcatcgtcgagcagggccagcgcgagggcagcgtggttgcgggcgatcccctcaaactggccgactactactggggcgtcgcgtacctctacgcgctgaagcggctgttcacggcaggctacgccatgatcgacgcggccgatctggatcgcacgctgctcaagggaggacgctagcatgggcgcgcgcatcgccgtcgtcacgggcgcgaccggcggtatcggccgcgccttcgcggagcggctgctcgaggacgagggcatcgacgagctctgggcggtgtcccgcacccccgagaagctcgagcgcctgcgcggcgatctgggcggtcgcgcggtgccgctcgccgccgacctctcgaccgccgaggggttgcgcgtcgtggagcgcgccctgctcgcgcagccggagcgtcccacggtggcctacctggtaaacaacgcgggcgcggccaagatgggcgcatgggccgagttccccgtcgacgagatcgagcgcacggttgccctcaactgcacggccgtcgccgcgctctgccgcatctgcctgccgttcatggggcgggggagccgcatcctgaacgtgtcctccgcttcggccttccagcccacgcccttcctcggcctgtacgcggctacgaaggcgttcgagctcagctactcgcgcgcgctcggcgccgagctggcgggcaccggcgtgacggtgtgcgccgtgtgcccgagctgggtggacaccgacctgctcctgcacgaggtgaacggtcgccgcgtggcgttccccggcctcgtgccgcccggtaaggtggccgccctcgccctgcgcgacgcgcggcggggacgcgccctgtcggtgcatcccctgtacgcgaagtacctgcacgtggccgcgaagctcgtgccgcagcgcatcgtcatgaccacgtggctgcgcatgttgaagcgctacgggggctgagggcgcgccggtcgttcgacgcgcgcggcggcccccttgcggcccttcgccctcctgtggtataaacgacggcgtcaacactacctgaggagcatgacttctgttacacgcacgcacggagattgccgtaagccgggaggtttacgagcgctagtctccgccggaacctcccaaacagggcaacgaccatcaacgttttgggagaaccaccgtggaaaacatcaagagaggcaaagccttctaccaggctcatgcctgcatggacagcttcatctgcaaacagtgcggctgcctcgtcacgcccgacgaggcgggaagccgccatcgcaaccattgcccccagtgcctgcacagcctgcacgtcgacgagcggcccggcgaccgggcgtccgtgtgcgaaagcatcatggagcccatcagcgtgtgggtgcgcaacggcggggaatgggccatcgtgcaccgctgcaaacgctgcgggcacctgagctccaaccgcatcgcagccgacgacaaccccgtcaagctcatgtccatcgccgtgaagccgctggcagagccgccgtttcccctcgagggcctgcgggcggacgcgcccggcgcgcaggcgcgcgagggaggcgaggcgtgatggcggccgtcgacttgcgcgcctacggcgtgaccgacgcgctcatgcagcgtgcgcgcgaggcgtccggcgtcgaggaccccgtcgtgggacgcgtcctgtcccaggcccacgagctgtatcgcgtcgtcggcgcgcagggcgagctcttcgccgaagcggcgggcaggctgcgccatgcagcccgctcggccgccgacttcccggcggtgggcgatttcgtcctcatggaccgcgatgacgacgcaggcgggcgcgccatcgtctcgcaggtgcttccgcgcacgagcgccttcgtgcgcaaggcggccggcgcgtcgttcgaacagcaggtggtgggcgcgaacatcgacaccgcgtttctgtgcatgtcgctcgtcggggacttcaacctgcggcgcctcgagcgctacctgacgctcgcgtgggaaagcggggcggtgcccgtcgcggtgctgacgaaggccgatgcgtgcgacagcttggagcggcggctgcgcgccgtgcagtcggtggccttcggcgtcgacgtgctggccgtgtcgtcgatggaggagggcggctgcgaggccgtgcgcccctacctgcgccccggcaggaccgtcgcgcttctgggttcgtcgggcgtgggcaagtcgacgctggtcaaccgcttgctgggagaggacgtcctcgaaacgcgcgacgtgcgcgccgacggccgcggccgtcatgccaccacgcgccgccagctcgtgctgctgccgggaggcggcctcgtgatggacacgcccggcatgcgggagctggggctgggggacgttgccgagggcctcgagcaggggttcgccgacgtggagcgtctgttcgcctcgtgccggttctcgaactgcacccacacctccgagccggggtgcgccgtctacgaggccatcgcggacggcgagctgtccgagcgccgctggcaggcgtaccgcaagctgaaggccgaggccgcgttcgccgaggacaaggccggctacctcgcccaaaaggaacgcaggtacaaggacatctcgaaagccgtgaggcgcctgcccgcgaagcgctgacatggcgagctcctgtgcggcaccccggagcatgccggtgcggggcggcgccggcgcccccgcctggtttgtgcgcgcgggcctacaaccgggtgacggttcgcctgcgtcgtcccgcatcgggcgcgacggccggtagagtgggcgcatacgcgaaggcgaaggcgcaccgcggggccgcgcgctcggggcggcgcgcctgcgaactaggaggcactcatggcagacctgcaaagcccgcaagacaagatcaccctgcgcaacggctacggcgtgccgtgcatcgggttcggcacgtggaagatgccggacggcgaggtgggcatcgatgccgtccaccaggcgctcgccgacggctaccgacacatcgacacggcggcggcctacgacaacgaggccacggtgggcaaggctctggccacgtccggcctcacgcgcgaggagctgttcgtgaccacgaaggtatggaacaccgaccgtggttacgagcccacgctcaaggcgttcgaggaatcccgcaagaagctccacctggactacgtggacctctacctcatccactggccggcggcgcagggcgccgaggacgactggcagcgcacgaaccaggagacgtggcgggcgctcgagacgctctacctggacggccaagtgcgcgctatcggcacgagcaacttcaagccccaccatctggagccgctcatgaacgccgccgagatcctgcccatggtgaaccagatagagctgcacccgggctgcaaccaagaggccacgcgcgatttctgcaaccgcaacgacatcgtggtggaggcctggtcgccgctcggcgcagggcgcgtgctggagaaccagctgctcatcgacatcgcggccagctacggctgcacggtggcgcagctgtgcatccgctggtgcctgcagcgccgcgccatcccgctgccgaagtccacggacgccgggcgcatctccgagaacgcccgcgtgttctggttcaacatcaccgacgaggacctgcagcgcatcgacgagctggaccccctcggccaaagcggcctcgacccggacaccatcgacttctagggcggctcccgttcttccggttcgaagcggagcagggcgggatgccggccatctcctcgccgagcggaaagcccttggtagcgggggttttccgcccctgccccgctggcgggaacttagctgccagctaatgttttggctgggcggtttcgatacccttgttccgatgggtaaaccggagcaaggagggaccatgaggaagaacatcggtactttggcggcggcctgcgctctaaccgcctgcgtcgggctgttcggctgctcgtcgggcggctcggaggcaccgagcggcgagaaggcggacgacgcccctcaggccgcgcagaaggagcccgagcggaaggagtcgaagtacgccgtgactatcgacgagtgcacggtggggcaggactatgcgggcaaggcggccatcgtggtgacgtacacgttcaccaacaacgcagagaaggccgtgccgttcttcacggccgtgtcggccaaggcgttccagaacggcgtgcagctcgacacggcgatcgtgagcgacatcgactcccagagctccatgaacgagatcaagcccggcgccaccaccaccgtccagcaggcctacctgcttgacgaccagtcgcaggtgagcgtggagtgcaccgagctcatcagcctggacgacaccgtcctcgccgagaagacgttcgacgtggcgtaaggccgtgccggccgccggaaccggggcgggcgccctcgcgacgccatggccggttccggcggccgtctgataccatgagaccggacacgaaacgtagaagaaggaagcgccgcgtgaaagagcccttgaccgacgagctgctgcaggagctgctggatgcgccggatccgcgtgcatttgccgagcggcaccgcatcggccggcgcagcctgccggactacctgcagcagctgctcgacgagaaaggcctcgagcgggccgaggtcgtgcgccgggcgggcctcaacgacacgttcggctaccagatattcatggggcaacgcggcgcctcgcgcaacaaggtgctgcagctggccttcgccctgggcctcacgctcaaggaggccgaccggctcctccaggcagctggcgcaagcgggctgtactgcaaggatcgccgcgacgccatcatcatcttctgcctcgaccacggctacagcctgcagaagaccgacgaggagctctaccgcttcggcgaggacacgatctgctgaggctgcgaggagcctgcgcgaaccgctccggcgtccggtgcgcccccggctccttctgctaccatgtacctgtcatggacgagctttcggaacatctcgatgcactggcgcgcgacggctgctaccgcgtggacgccgtcatgaaggagagcgcgttcgagaccacgcagctcgtgtacttcgtgggggcgaacggctcggagcaggggccgtacgtgcgcaagtaccttgacggcgacgcgggcctcggcgcggcttacgagaggctctggcgcgcccagcgctcgggccggcggttcctccacctgcccctggtgctcgactgccatgcggtgggctcccggcgcgtcgtggtcatggagttcgttcggggcgagacgctcgccgacgtcgtgtaccgctgcgatccgtccgtcgccctcgcatgcgacgtgttcccgaagctttgcggggccgtgcgcgagctgcacgaggcgttcgacccgcctcttatccatcgcgacctcaagccctccaacgtcatgctgacgcgcgacaacctcaccctcatcgacttcggcatcgcccgctccttcgacgaggcggcagagcaggacacgcaccacttcggcacgagggcctacgcgccgcccgagcagttcggctacgggcagagcgacgcgcgcaccgacgtctacgcgctgggcatgctgctgtacttctgcctgacggagaggactccggacgccaaggcgcgtcgagcgggttaccgcgacgagggcgtccccgagccgtttcgggcggtggtggaacgtgcggcgtcgttcgatcctcgggaccgctacgcgagcgtgcgcgagctcgaggaagcgttcggggaagccgcgcgccgtgtgctccctcccggcggcagcagggcggcagggatggcgccggggcggtcggcggtggccgcaggggaggcgaagggcgcggcggcagcgcaggcgcaggctgcgtcggcgggccccgcggcgggaaggcagacggcggtggtgcccgagcccgcgggagctgcgcctttgtcttcgaaggcccttccgatacggcctgccccgcttcctgccgtctcgcgcgccgctgcgcacgggggcggggcgttctggggacgcgtgccgcgctgggcgggcgtcgcgtgggacgtggcgctggccctgctctccgtgctcttcctctgcgtggccaccgacctggcgttctcgccgcagccgggcgacacgggctatggcggtcccctcgccgcgcgggttgcggcctactacggcatcgccgttctcatgttcctgcccggcttcttcctggcgagcgaccgccggccgctcgttcgcctcgtgcccgcgctcggtcgcgtcccgctcaagacgcaggtcgccgcctgccttgcccttctcgcgatcggattcgtcgtcgtggccgtggccacgggcttcctgccgcgcacctagggcgctcgctggccgcgagccccgtcaacgctcccgccacgggtcgatgacggcgtgcggttgcgccggggcgggcacgcggggaacgctagagtgggacggacggccggccgatggggccggcgggcgcgcggtgcgcgcgccgtttccgacctgccgaaaggagccggcccatggcgaacgccccttccgcgccgagcagcaccccttcgaaagggggctcgggcaagccgaagctcgcgcgggtgctcagcgtgcccgacatgatcgtgtacgggctcatcttcatggttcccatcgcgccgttcggcatctacggcggcgtgttctccgagtcgggcggcatgccggcgctcgtctacgtggtgggcacgctggccatggtgttcacggcgctgtcgtacggcatgctcatccgcgagtggccggtgtccggctcggtgtacgcctacacctcgcgcggcctgggcaagggcatcgggttcgtgtcgggttggacgctgcttctcgactacctgctcatccccgtgctcatgtacgtggtggcctccacggcgctgtcgggcatcgtgccggaggtgcccccgtgggccttctccatcgtgttcgtggtggcgaacacgttcgtgaacatccgcggcatcgcgctcaccgacatcgtgaaccgcatcgcgctcgtgttggaggtgctggtgctggccgtgttcgtggtgctgggcgtgcgctggctcctgtccgaccccgcctcgcacggtttcacgcttcagcccttctacaaccccgccacgttcagcctgccgctcgtgttcagcgccgtgtcgttgggcgtgctgtcgtttttgggcttcgacggcatcgccacgctgtcggaggaggccgaggacggccgtcgcggccccggccgcgccatgatggcgtcgctggccatcgtgggagcgctgttcgtgctgcagacgtacatcgccgggtgcatcagccccgatggcgccgtgttcgcgcacgacaagggaaatgcgttctacctggtggcacaggtggtaggaggacggtggctctacgtggtgtgcgccgtgtccacggcgctggcctggggcatcttcacggcgctcgcggcgcagacggccgtgtcgcgcatcctgttcgccatggggcgcgacggcgggctgccgcacgcgctcgcgcgcatccatccgaagtaccacaccccctacgtggccacgctcttcgtgggcgcgctcacgctcgtgctcgtgctgacgttcgggcagctgggcaccgacaccatctcgctcttcgtgaacttcggcgcgctcacggcgtttcttttgcttcatgttaccgtcatctggtacttcttcgtcaagaagcgcgacgggcgctgggtggcgcacctgctggtaccgctggcgggcctggcggtcatcggctacacatggtgggggctcgacgtgccggcaaaggtgctcggcgtggtgtggatggccgcgggcacggcctactaccttgtgctgcgcttcgtgctcaagcgcgaggtgacgcttggcgggtgagcgcgcggcttccctgttgcgtaaacggccgcgaagcctgcgaaagcggcactggacagcaaagcccccttggctggacaataggaaaacgtgatttgtaccggggaagaacacgaggaggatgggcttgagaatcgcgctgtgcgacgatgacggggcgcaacggcgggagttgagggcggcggtggaccggcatctggtcgcccgaggctaccgtacccgcttcgaggagtatgcgggcggcgggccgctcgtcgccgaggtggccgcgggtgccgatccgttcgacctggtgttcctcgacgtatacctcgagggcgaggacggcatcgccgtggcgcggaagctgcgcgagcacgatcccagcgtgcccctcgtgtttctgaccgtatcgcgcgaacatgcggtggagagctacgaagtgcaggctacgggctatctcgtgaagccggcggacccgcgcaagctggccgccgtgctcgaccgtgtgctgccggccacctcgccgcgcctcgcgttccgcgtgggctctgcgcgccgctatttcgattaccgcagcatcgtctacctggaaagccgcgaccatgcggtgctgctgcatcggtccgacggctcctgccatcgcagcctggcgaagctcgacgacgtggccgacgagcttcgcgatccccgcttcctgcgctgccatcgcagcttcatcgtgaacatggacttcatcgtggacgtgcgcgacgacttcatcctgcgggacggcacctgcgtgcccgtgcgcgtgaaggagcggcgcaagatgcacgaggcctattaccgttatttcaccgacgcgttcagcgtcggataggggcggccgagccaagagcctttataatcatgtggggataaggaaggatcggctcggcaatgttcgaggggaaggcgaggcggatggtgagcggggggcaggctgaagggggtgtgtcgctcttcgatgtcgatgccgtcgtggcggccatgacccttgaggagaaatgcgcgtgcctgacgggcgagggctactgggagctgggcgggtgcccgcgcctgggcataggccccatcacggtgtcggacggcccccatggcctgcggcggcaggcgggggcggcggacaacctggggctcgcgggaagcgagccggcggtgtgctttcccacggcgagcgccgcggcgtgctccttcgacgcggaccttgtgcgcacgatgggcgaggcgctgggcgacgaggcgcacgggcagggcgtggccgtggtgctggggcctggtgcgaacatgaagcgcagccctttgtgcggtcgcaacttcgagtacttcagtgaggacccgcacctggccggcgagctggcggccgcctacatcgagggcgtgcagagccggggcgtgggaacgtcgctcaagcacttcgcctgcaacaaccaggagacgaaccggctgatcgtggacgcggtggtggacgagcgcgcgctgcacgagctgtacctggagccgttccgcatagcggtggagaaggcccggccctggacggtgatgacggcgtacaacctgctggacggcgcgtactgctccgagaacgcgcgccttctggcgctggcgcgcgacgagtggggcttcgacggcgcgtacgtgagcgattggggcgccgagaacgacaacaaggcgagcctgcccgcgggcctcgacctggtcatgccgggcccgcgggccgactaccgcgccgacgtggccgctgccgtgcaggcgggggagctctccgaggagcgcctcgacgcggccgtccgccgcatcctggagctgcacgccaagcatgcggctgcggagggcacgcctgtcgtgcggagcctggacgagcgtctggacgtggcccgcgccgtggccgagggctcggccgtgctcttggagaacgacggcgcgctgccgctcgcgccgggtgcgcgcgtggcggtgatcggggccttcgcgcgcgagccgcgctatcagggcgcgggctcgtcgaagatcaacccggtgtcgctcgactgcgcctgggatgcgctcgtggcagccggcgcggcggtctcctacgcgcccggctacgacgccgtcacgggggaggcggacgaggcgctgctggacgaggcagcgcgcatcgcggccgcggcggacgtggccgtggttttcgtggggctcccggacgcctcggagtccgagggcgccgatcgggtcgacatggcgctgcccgccggccacaacgcgctcgtggagcgcgtgtgcgtcgcgaatccgaacacggtggtggtgctgcagggcggctcccccgtggagcttccctggcgcgggcgcccgcgcgccgtcctgctgtgctacctggccggttgccggggagggcaggcggcggccgacctgctgctggggcgcgcgaacccctcgggcaagctggccgagacgtggccggtgcgcttggcggacacgccgtgcgcggagcacttccccgagaagggccgccaggcgcgctaccgcgagagcgtctacacgggctaccgctactacgacgctgcgggcgcggacgtggcctatccgttcggccatgggctgtcgtacacggagttctcctaccgcgacctgcaggtgggagaggctcccgacgggggcttttccgtgtcgtgcctcgtgcgcaacgacggcccctgcgccggcagggaggccgtgcagctgtatgtggccccgctcgagccgggagcgttccggccgccgcaggagctcaagggcttcgcgaaggcggcgcttgcgccgggcgaggaatgtcgcgtgacgcttccgctgccgaggcgcgccttcgcgcactacgatgcggatatgcgtgcttgggatgtggaagccggcgcctacgaggtgcgcattgccgcctcgagccgcgacgtgcgcctgagcgcgcgggtggaggtggcgggctcgccgcgccgtgaggacggcgccccggaggcctaccatcgcgtgcggcccggcgggttctcggacgaggcgttcaggaagctgtacggccgcgcgctgcccagggtcgtcgtgcccatgcggccctacacggccaacgccacggtaggcgatttgaaggcgtcgctcgtcgggcgcttggtgcactacctgctgcgccgcgagctcaggctgcttctggcaggcgacgccgagcggcgcgcccaggccgagctggccgtcatggagacgcccctgcggacgctggccatgtcgggcacgaatatgaacctggtgggcgccgccgtggacgttctgaactaccgtttcatccgcggcttcaagaagctgcgtgcgctcaagcccgccccgccgcccggcggtgcgggggcgccgtccgagagggaaggggacaacgtatgaccgaagatcgcaacgacgaggggcgcatgcccgacgggcagcgcgtgccgttgccgctgaagctgttcggcgcgctgtgcgtgctggggggcctcgcctcgcttggcgacctggtgccggtggccgtctcgctcgtacaggggctgggaggcgccggctaccgcacggcctccgtcgccatcttcgccgcgctcatggcggtgctcgcggcgtcggccgtgctgttcgtgttcctgggcgtgcgccttctgctcaaccgtcggaagcacgctgcggccacggcgaacacgctggcggcgctcacggtgctttccatcatcggcaccctcatgctgttcggcctgtcggcgcaccatatcggctacctggtgcagctcgtcatcctcatcgcggtcacgagctatctggacccgtcgcttgccgaggagcgcgcgctgcagcgcaagctgcgcaagatggacaaggagcagcgccgcgaagagcggcgtcgggccgccgaggctaagccgaagcgcggcttcatcacgctgaacttcttcaacctgttctggatcttcgtggtgtgctgcgtgctggggctcatcatcgaggtgctgttccacttcgcgctgtaccacgagtaccaggaccgcgcgggcctgctgttcgggccgttctcgcctatctacggcttcggcgcgctgctcatgaccatcgcgctcaaccgcttccacgacaagcccgtgtgggtgatcttcctcgtgagcgccgtcatcggcggggcgttcgagtacttcacgagctggatcatggagttctcgttcggcatccgcgcgtgggattactcgggcacgttcctgtccatcgacgggcgcacgaacttcgtgttcatggtgatgtggggcgtgctgggcgtggcgtggatcaagctcctgctgtcgcagctgctgaagctcatcaacctcatcccgtggaactggcgctacggcgtgacggcggcttgcgcggcgctcatgctgctggacggcgtgatgaccgtgcggtccatagactgctggtaccagcgcatggcgggcaaggcgcccgacacgcccatcgagcagttctacgcgaagcactacgacaacgacttcatgcagaaccgcttccagaccatgaccatgaacgtggacgacgccacccgcgccgaccgttaggggcggggcggggccggggccgcttgtgcctgggggagaacgctatggcctcgagaccgggcagccgagcttcgtcgcggcagtgtgtccggtcgctcaatgagaaagcgcccgtgcctcgggggaggcgcgggcgctcgtggtttttggcggagatgcgtgcgaatcgaacacacccgagacgttctgcgcgcctcacaacggctttgaaggccgcggggcccaccaggacccatccatctccaagagcaaaagacaacgttgactataataaggcaaaacggccgaaaacgctgcaaaatgcaaaaaaagtggcatcttgccgaaaggggaccgtttccgaaggggcttgccgcaaacgcttccttccccgacttggccgaggcgatatgtgcgttgtcgcagcggggggggggacttgtacagaaatcaccgattattgcggattcgcgggctcagcgtgctgctgtagcttggacccggacgtttgcgcccaacgttttccctgatggcgaaatgatgggtgcccaatttgccgaccaagggccgacaatgcgtaaaaaaccggtgatttctgtgcagaaaggccggtggggagaggcacttcctcctgcagggaacccgggcgcccaaccctgcgacaggatgcggcaccgttgcagggttggggtcgggaggatggaggccggagggcgggggcttacgcgcgcttggggcccagcacgcgcaggtcgccgtcgcggcgcgtgacgccctgggcgtcgaagtgctccagcagcgggatggcgtacttgcgcgtggtgcccatggcgtcgcgcagttcggccgccgtggcgccgccctggccgcgcagcagcgcgacggccgcctgctcgagcgcctcgtaggcggccgcgtcgaaggccagctcgccgctcacgcggcggatgcgcccggccttctcgagcgcgccgagcgcgcggtgcgcgacagaggcatcgacgcccgcctgcgccacgagctcggccacggtaggcggggcggctgcggctgcggcaagcaccgacgcgagcgcctcggccgcctgctcttcgagcttgcgcgccccgccgccggcgcgcgggtggccgatgaggccgccgtccaccaccacgcgcccgtccgtgcgggcgcgctccacgagcgcgtcgatgcaggcatcggacagcgcgccggggagccgcgcggcgagcgcgcccttcgagatgcccgtggccgccggctgctcggcgtggaagcgcagaagcgcgttctccagcgcgctgtccagcttctgcagcacggcgcgctcggcgaagtgagcgcccgccccgtcgcccaggcgcacgagaccctgcttgcagcgctctccgaggcgccgccccgccgctgcggccgggatgcccgccgccgcggccagctcggccgccgtgacgggcgcggccgccagcgcgagcgccgcatcgcaggcaccgtcctcgtcgccggcgcgcagggcgtcgagcagcgcctcctcgccgggcttcaggttcgtgcggcggcgcgggtgcgcgtgcagcacctggccgccgcccaccacgtgcacgggcgtcagggagcgcacgacgaagcggtcgccgcgggacaccggcagcggctcgtccaggcggatctgcgcgtaggcgccctcgcgcgcgccgagcgcggcgcggccgcccatgagcagcacgcgccccggcacctcggcggtgccgtgggccacgcgcacgcgcgtgcccgtctccagcgcctccggcgcgccgggcgcacccaggtacgtgagccaggcgtcgaagcggtcggtgggctccaccgtgccgggggctgccagcagcatgccggggcgcacctcgccggtgtccacgcccgccaggttgagcgccacgcggttgccggcctcggcgcgctcaaccggttggccgtgtatctgcgcggagcgcacgcgcgcccgcgtgccgccgggcagcacctccagctcgtcgcccggcgccacctgcccgctccagagcgtccccgtgaccacggtgcccgagcccttgatgctgaacgcacggtccacgggcaggcgcgcggaagagccgtccttcgcgcgcacgaggccgcgcgcggcctccgccagcgtcgcgcgcagctcgtccaggccctcgcccgtgcgcgccgacaccggcacgacggccgcgtcggcgtacgggccgcccgccaggcgcccgcgcacctcgtcggccatgaacgcggcccactcctcgtccaccaggtcgcgcttcgtgagggccaccacgcagcgcgcgatgcccagcagctccagcacggccaggtgctcctcggtctgcggcatgacgccgtcgtcggctgcgatgcacagaagcgccaggtcgatgcccgtggagcccgcgatcatctggcgcacgaagcgctcgtggcccggcacgtccaccacgccgagcgcgctgccgtccggcagctccagctgcgcgaagcccagctcgatggtgatgccgcggcgcttctcctcggccaggcggtcggggtcctccccggtgagcgcctgcacgagcgtggacttgccgtggtcgatgtggcccgccgtgcccagcacgacgcggcggccgcccgcggcggcgctcatgcgcccgctcccgccgagcggccggccgcgggcgctgccggggcaggggagccttccgctgccccttccgctatcccggccgacgccgccgcagcgcccggcccctcgaagtaggcgcgcaccgcctcggcgatctcggcgatgtcgtcctccccgatggtgcgcgcgtccagcagcacggcctcgcgcttgatgcgaccgatgacgggcaccgcgcgcttcgacacgaggaaggcctcgcattcctgcgcgtcgccgcgctcgaaggagatgctcgccgcgaacgtggggatgtcgcacagcggcagcgccccgccgccggcccgcgccacctcgggcaccacctcgatgcgcgcgcagcccgcgggcacggcccggcgcagcgcgtcggccaggcgctcggcgcgtacgcgcacggctccgtcgggctcggaaagcatgcggagcgtggggatggccgtaagcgcgcgctcggggtccaggtacaggcgcagcgtggcttcgagcgcggccagcgtcatcttgtccaggcgcatggcgcgcgcgagcgggtttttcttcaggcggtcgataagctgcttcgaccccaccacgatgccagcctgcgggccgccgagcagcttgtcgcccgagaacgataccaggtcgcatcccccgcgcagcgactcggccacggtgggctcggcgtaggcgccgaagcaggccaggttgatgaacgcgcccgagccctggtcctcgtacaccagcacctcgtcctccacgcccgcggcgcggcggcgctcgttctcggcatcggcgagggcgcgcatctcgcgcatgcccacctgctccgagaacccgacgatacggtagttggaagggtgcaccttcagcagcatggccgtgtccggggtgagggcccgctcgtagtcggccgcgtgcgtcttgttcgtggcgcccacctccaccatgcgggcgcgcgagaacgccatgatgtccgggatgcggaacgacccgccgatctccacgagctcgccgcgcgacaccacggcctcgcgcccctgggcgaactcggccagcaccatgaccacggccgcggcgttgttgttcaccgcgatggcggcctcggcgccggtgagcgcgcagagcaggccctccacgtggtcgtggcggctgccgcgggccatcgcgtccgtgtcgtactccagcgtggaatagccccgcgccgcctccgtcacggcatgcacggcctcgtctgccagcgggctgcgtcccaggttcgtgtgcaccaccacgcccgtggcgttcaccacgcgcctgagcgaggggcgcaggcaggccagcgcccgggcgcacgcgtcgtcggcgagggcggcgccgtccaccggctcccggctcccggccaatatggcgctgcgcacggcatcgacggcatcgcgcacgcagtcggccaggatgtcgtgcgggagcagcggcgcgagcgcgctcacctggggggagcgcagcacctcctctacggggggcagggatcgcagcaagtcgcgggcgggcgtgggtgccatgggatgcctttctcgataagcgggccggacgcaaggtttcccgagcagtataccaatgtcggaccgggccgccggcccgaaacggcggcgtgcgacgaatccccgcaggacggggaggggaaaggcagcgcgcgttgcgcgagaggggccggcagagggaagggcgcgcggaaggggcggcgcggggcgcgtcccgccgacgtggggcgcattcggagacgaggcatcccggaggcggcttcggtgggggaggggggcctcctcgggtgcattccgaacagccagccgggcgcatgcgctcggggctggaaggcgggaaggaagatggtgggaatttctggggcgaaccgggcccgaatctgcgataatggtgcgttcgcgggccaaaacgcccgccgggtgaggcccggcgggcgttttgccgcagcaagggaagagcagggagaaggggattcgacgtggcggtgatgcaagaaggcgcggggctcaagttggaggccttttcgccgaccgaggtggaaaagcgggtcgaggacgcggcgtgcgcgaaggctgccctgccgatgggcaggtgcttcgtctcggcaatgctcgccggggcgttcatcgggttcggcggcatgttcttctgcacgttcctctccgatgccacgctgcccttcgccgtgcagcggctcgtaggcggcgtgtgcttctgcctgggcctcgtgctcgtgctctgctgcggcgccgagctgttcaccggcaacgtgctcatggtgtgctcgagggtctcgggccgcgtgccgtggcgcgcggtgctgggaaactggggcctggtgtggctggggaacctggccggctcgcttgcggcgatggcgctcgtgctgctggcgaacgtgcagggcatgaacggcggcgaggtgggcgcgacgttcgtgtcggttgcctcggccaaggcgtcgctcggccccgtggagctgttcttcaaggccgtcatgtgcaacgtgctggtgtgcctggcggtgtggatagggttcgcgtcgcgctcggtgacggacaaggtcgtgggcatcctgctgcccatcgccgccttcgtggcgtgcggcttcgagcactgcgtggcgaacatgttcttcctctccacgggcatcctgctgaacgttctgggcggagtgggggccgccggggccgtgtcgctgggcggcgcggcggcgaacctcgtgctggccacgctcggcaacgtggcgggcggcgttctggtggggctcgcgtactggtacgcctaccggggcagggaagcgcgctaggcggcgagcgagatccagcttgcagcagcgtgcgcccgcgtgcggctgcagcgctgtgggcgtgcgcgccctcggtcgcgccctgttgtcgctgcagccctgcggtgccggcggcctgccccggcgacacctggccgaacgggtcatgctctttctgcgcgcggccgacctgcctgcgctatactggtttccgacggcagcctgcccgccggacgcgcaccttctgccaaaggcgcgtcccccttctgcatcggggccgcatcgccgtccacccaccgtgcttcaagggaagccggcggacgcgcctctgcccccgcgcccgcttgttctgcaccgccgttcccggcggcgttcccgtctgccccgggctcggctccatcgacagacgagaagacgagacgcagacccctgcgaaggaggatacccctatgaccgactaccgccagatgtggaccgatttggacatggacctggagacgcacgaccagctgtgcgccgtgttgcccgccgccttcggcgacacgtacctctcccaagagaaccgtcccgagaacatggccttctatgacttcgtcgtgtccgagatccacggcgtgcgccccgccgagctcatcgaactgcagaaaaagggcggcaaggtgttcggcacgttctgcgtgttcgtgcccgacgaggtggtggtggcctgcggcggcgccgtcaccgggctctgcggcggctcgcagttctgggtgcccgagggcgagaaggtgctgccgagcgacctgtgcccgctggtgaaggcgtcgctcggcgcgcacttcggcaagacctgcccttacttcagcgtggcggatatgtacgtgggcgagaccacgtgcgacggcaagaagaaggcctacgagatactcggcgccgacaagcgcacctacgtcatggacatgccgcagatgaagcgccccaaggacatcgagaagtggacgggcgagatcgccgagttcgcgcgcgaggtggaggacgtcaccggccgcgcgctcacgcccgaggcgctgggcgcggccatcgggctgatcaacgagaagcgccgtgcgctcgcgcgcgtgttcgaggcgcgcaaggcggagggctgcattcccatcagcggcaaggacgccctgctcatgatgcagatcgcgttcttcgacgatccggcccgctgcgccgagatggcgaacaagctggccgacgagctggagcagcgcatcgccgacggcgtgagcgtgttcccggcgggcacgaagcgcatcctggtcacgggcacgccgctggccatccccaactggaagctgcaccacatcatcgagacgagcggcgcggccgtggtatgcgaggagatgtgcacgggcacgcgctacttcgagaacctggtggacgagtccgccgatacgttggaaggccagttccaggccttgtccgagcgctacatgaagaacaactgcgcctgcttcacgccgaaccccggccgtatcgccgacgtggtgcgcatggcgcgcgagtaccacgtggacggcgtgatcgatgcgaacctgaagttctgcacgctctacgacgtggagaagccgagcctggccgcagcgctcgaggccgagggaatcccctgcctggcgctggagaccgactacaccgacaacgatgccgagcagctgcgcacgcgcgtgggcgcgttcgtggaaatgctgggggagtaggcccgtggagcccgtcggcggcgagcccgccgcgcagggggcgggaggcccgggcgctgccgatgcgccggaggctcccggcaacggccccggttcccccggcgccccggacggcgacgcgcagtccggggcgcccgtggactgctacgtgctgttccgcgggcacaccgtcgggctggccctgttcggcgcgctgaagggcaccggcgtggacgcgcgcatctcgcccacgccgcgcgccgcgcgcgccgagtgcggcatgagcctgctcgtgtcgtgcgacgacgaggagcgcatccgcgcggtcgcgcaggcatgcggcgcgcacatcgagggcgtggcgcgcctgccgcgccagatacgccccgaccgggaccgctactgctgaggcaccgccctcgtgggatgcccgtgcggggccgtatcgaaagctccgcctcgccgcctctggcaggtcgctcgtagggcaagggctctgcccatgccggcgagcggggtcgcctcgcaggttacggcaagggcagagcccttgccctacgagacggttccctggcgaacttgcgctctgggacttttgacacgccccctacgggcaaaccgcggagcgccccggttttcggggcgtccgagaccgtaccaggaaaggaaggccatgcattacgtgggcatcgacgtggggtccaccgccacgaaggtcgccgtgctggacggggacggcgcgctcgcgcgcacgttcctgtgccccacggggttcagcagcgtggacgccgcgcggcgggtgcgctctctcttggccgaggcgggcatcgacgcggacgggagctcggtcgtggccaccggctacggccgggttgccgtgccctacgcgaacaaggtggtcacggagatcacctgccacggccgcggcgccgcgcgcctgttcgggcgcgacggagtggtggtggacgtgggcggccaggacacgaaggtcatcgcgctggcggggggcgcggtgaggaagttcgtcatgaacgacaagtgctccgccggcacggggcgcttcctggagatcatggccgaccgcctggcggtggaccaggacgagctcgcgcgcctcgcgcgcgccggcacgcccaccgtcatctccagcatgtgcaccgtgttcgccgagtccgaggtcatctcgctcgtgggaaagggcgagccgcgcgagaacatcgccaacggcgtcatcgagtccgtggtggcccgcgtggccgcgctcgcggcgcagatgccgggcgaggcctacttcctcacaggcggcctgtgcgacaacggctacgtggtggagcgcctcgccgcgcgcctgggcaagccggtggaaacctgtcccgaggcccgtttcgccggcgctctgggcgcggcgctctgcgcgctggagcaggcggcacaggggggcgctggaagacggtgagcgccctgcgcgcgttcgggtgggcgccggcgcgacggaaggattccgcggcggaggctcggcggcgcggcggagacccgtttttcctgtcggttccgtagcaggtgcggatgcgttttcggcacaaggcggggaactggtatgatgcgggaagaagaatgacggaaaggctctcccatgatctacttcgacaacgcggccacgacccggcgcaagccgcccgaggtggccgaggccgtggcgcgcgccatcggctcgttcggcggcgtggggcgcggcgtgcacgaggcgtccatcgacgccggcatggccgtgtacgacgcgcgcgacaagatggcgcggctcctgggcgcgccctcggcggcccgtgtgtcgttcgcggccaacgccaccatggcgctcaacatcgccatcgcggggcttttgcccgccggcggccgcgccgtgacgacggctgcctcgcacaactcggtgctgcggccgctgttcaagtcgcgcgacgagcgcgggtgcgcggttggcgtggcgcccgtcggcccggacggcgccctcgacttcgccgcctacgagcgcttgctggaagagggcgccgacctcgtggcggccacccacgcgtcgaacctcacgggcgacgtgtacgacgtggcccgcatggcgcgcctcgcgcacgaggccggcgcgctgttcgtgctcgacgccgcgcagacggcgggcgcgctgccgctggacatgggcgcgctcggcgccgacatcgtgtgcttcaccggccacaagagcctgtacgggccgcagggaacgggcggcttggccgtggcggagggcgtggacgtgccgccgcttctggagggcggctccggcacgcacagcttcgacgaacggcatccgcgcttcatgcccgaggcgctggaggccggaacggtgaacgcccacgggctggcgggcctggcggccggcgtggcctacctggagcgcacgggcgtgggcaacgtggccgcgcgcctgcaggcgctcacggagcgcttcgaggccggcgccgccgccgtgcccggcgtgcgcgtgctgggcgggcacggcggcatcgaccggtgcggcatcgtggcggtggacgtggcgggcgccgactccgccctcgtggccgaccggctgtccagcgacttcggcatctgcacgcgcgcaggcgcccattgcgccccgctcatgcaccgcgcgctcggcaccgaggagcgcggcgccgtgcgcttcagcttctccagcttcaccacggaagacgagatcgaagcgggcctcgcggcccttgcggccgtcgcgcgcgacgcaggctgacggccgccgggtcgcgcgcagggccgccgccgggccacggggtcgcccgcatcgcggccctgtttcgcgccggtcgaaccgcggccggcacgactcgtgcgactgcgcaatagccccgtccgacgcgcagggcgggcggggaaacgggaaaagacggaaaggaacctaccatgaagataatcgacgccttcggcatgcagtgccccaagccgctcgtgctggccaagaaggagatagacgcgggctgccgcgagctgtccgtgcaggtggacaacgagacggccgtgaagaacctcacgcgcctgggcggcaagacgggcctggccgtgtccgtggacgagatcgagggcggctggctcgtgtcgttcgccgagggagacggctcggcggccccggccccggctcccgaggcggctcccgtcgccgcaggcgcgtcgtgcgcggcgggcggcgggtgcggctatgccgtgttcgtcggcaaggaccatgtgggcgcgggcgacggggagctcgggtacaacctcatgaagatggcgctgtacacgctctccgaatccgacgacgtgccggcgtcgctcctgttcatgaacgcgggcgtgaagctcgtggccggcggcgagcagcaggtggtcgacagcgtgcgcgcgctcgccgagaagggcaccgaggtgctcgtatgcggcacgtgccttgacttctacgggtgcaaggaccagctggccgtgggcgaggtttccaacatgtacgacatcctgggccgcatgcaggaggcggccaaggtcatcacgctatagggaggacggacgtgccccgctacctgctggccttcgagtccacccatgcggccatggccgccaacaaggcgctcgccgccgtgaaccccgccgtcatccccaccccgcgcgccatcaccgcgagctgcggcatgaccctgcgcttcgaggccgaggacgcagccgcggcccgcgccctcgccgtcgccgtgcccgaagcccgcggccttgccgccctctacgccgaccaggcgggggagtacgtgttgctggaaaagctgtaggcgggggatgccggcgtccggcacagtaatcaccgctttttgacatgattgccccgcgtatggccggactcgctttcgacgaacgggcagaacgtcccgcataggccatccatggcgaacgagaggcgcgatcttgtctccgagaatgcaggaatcggtgaaaactgtgcttctcgagaaggggaagggggcgcctcggagagaaggtagggcgcgacttgtggcaagaggggaggggcgccggcgtcgcccctcccccagcctcaccctgcgaagcggatcgtccccggctcgccggcttccacgcgcccgatgcgcgcgggcagccggccggcgcgtgcctcgaaggcgcgctcgaaggcgccggccgcctcgggcggcacggcggccagcaggccgccggaggtctgcgggtcgcagaccacggccaggcggttgtcgtactcctcgtcggaaagcgcgccctgcgccacgtagcgctcggcctggtccatgatggtgaacaggcggttcggccggcagtaggcgcgcgcgtggtcccacacgccctcgaacagcggcagcgcctcgaagtcgagcgcggcggcgcagccgctcgcctccaagagctcgtgcaggtgcccggccagcccgaagccggtcacgtccgtggccgcgtgcacgccggattccgcgagcgcggcggcgccggcggcgttcagctccatcatggactccacggccgggcgcaggcccgcgtcgtccacgaggtcgcaggcgcgcgccgccaccatgatgccggttcccagcggcttggtcaggtacagcgcgtcgcccggcaccgcccccgcgttgcgcacgatgcggtcggggcgcacggtgccgaacaccgcgaggccgtacttgggctccgcgtcgtcgatggtgtggcccccggccacgagcgcgcccgcctcgcgcacggcgtccgcgccgccgcgcaggatggcgccggccacgtccgcgcccagcgcgcagtcgagcgccagcaggttcagcgccacgtgcggctcggcccccatggcgaacacgtcggagagcgcattggccgccgcgatgcgcccgaactcgtagggatcgtccacgatgggcgtgaagaagtccacggtgagcacggctgccgagtcgtccgagagctgccacacggcggcatcgtcgcacgtgttgaagccgagcagcagccgtccggccccgctgcccgcgtcgccggcagcgtcctgcccgcctgtgcccgacgcgccgccgccggcagcggccgcaagcgcgcccagtatgtcgtcgaggtcgcccggaccccacttggccgctcaaccgcccttcgacgtgagcttcgtcaacctgatgcgctcgatctcgtccacggtgcctccttccgcatgccgcgcctcgccgcctcgggcgggcctctttcgtcgtcggacagtatagcagcccgccgcgcccccgcatgccgcgcctgccagcggtcagccgcccgtcacgtgccccgtcggcatgcgacgggctatcgccttcccggctccgggcgccgtgccgcgcgggggtttgcgttgcgcaacgtgggagcggcaagcagcccgagccgcacgccggctacgccttctcgctctcgtggccgcgcttgtcgggcacgaggaagatgaacacgagcgagcttgccagcagcaggaacgggtagaacaggaagggcatgatctggaacgcggacaccgcataccccagctccgccgccgccgatatggccacgagcatctgcgcgccgtaggggatgacgccctggaacacgcaggagaacgtgtcgaggatagacgccgtcttgcgccgcgatatatcgtaggtctcggccatgtcggcggcgatggggttcgcgatgacgatggccacggtgttgttggccgttgcgatgtccatggcgcctaccagcaggcccatgcccagctgcccgcccttcttgctcttgaacaggctcttgatgccgttcagaagcgcggtgaagccgccgtactcgcggatgagcgcgcagatggcgctcacgagcaccgccaccatcgtggtctcgaacatgccggccgcgcccgagcccatgctggccagaaggtcggtggccgcggtggcgccggtggccaccatgatgagggagccggaaaggatgcccagcaaaagcacgacgaacacgttcacgcccacgatgccgcccacgagcacgataaggtacggcacgagctggatcaggtcgtagtcatggctcacggtgccgctgatgtccgagccgagcgacagcgccaggatgatggcgagcgtcgccaaggcggccggcacggctatcttgaagttctcgcggaacttgtccttcatctggcagccctggccctggcacgccgcgatggtggtgtcggagatgaacgacaggttgtcgccgaacatcgcgccgcccatgacgctggccacgcacagcggcaggtcgaagcccgaggccgtcgacaccgccacggctatgggcgtgatgagcgtgatggtgcccaccgacgtgcccatggccagcgacacgaagcagctcaccacgaacagcaccagcacggagaactccgcgggaatgacggagagcatgaggtaggccacgctctcggcgctgtcgcggcccaccgtgcccacgaagatgccggccgccatgaagatgagcaccatggtgacgatggtcttgtcgcctatgccgcgacccatgacgaccagcttgtcgtcgaagggcagcttgcggttctgaacgcacgccaccagaagcgccaccaggaagataaccacgatgggtatgttgtagaaacccatggggatgcccatcccgtattcgaacaacacgcccagccctagatacagcaccaagaacaccccgatgggcaggagcgccttgacgttgcccttctccatgaacttccccttcctccgaaccagcaacccgcctattgtagcgcaatgcggcgtgcgtgcgtccccgagcccgctcatcgacgtttcgcgccgcccgcgtgtttccgcttgccgcggaactggctccctttacctgcccggttggagccgctcgccctggcttgaccgccgttcgccctggtgggaataggctcatgcaccgttcgccgaaaggcctgcaaaggagctgcagtgcgcaggacgggcccggcgcgccccctatggtacgatcagttcgccgggtgacgagggcatttccccggtgtcaccaccgggatcacgcagcggggccgggcgccctcccatgccctcaggctccccgccctgccgcgcgacccactgcacgttcccataggacgagaaggaaggagagagaggacatgaacctgtcacgcaggggcttcttcaaagccgccggtgctgcgttcgccacgtccatggcgttcgagctgtcctcgaagtcggaggcgtttgccgttgagacgtcgcccgattggaagctcgtgaacaccgaggagtacacgaacatctgctgttactgctcgggcggatgcggcgtcatctgctcgacgcgcgacggcgagctggtcaacctcgaaggcgatcccgaccaccccatcaaccagggaggcctgtgcccgaagggcgcgacgatgttccagctgcgcaacgtggtcgatcccgagacgcgcgagatcatcaagaacaccaaccgcaagaccaagccgatggtccgccgccccggcgcctccgagtgggagaacatcacctgggacgacgccgtcgccgagatagcgcagtgggtcaagaagacccgcgacgagaccttcgagaccgtgcacgacggcatcacggtaaaccgctgccacggcattgccagcctgggcggcagccagcagaactccgaggaggagtacctcatcaacaagatgatgaggtcgttaggggtgatagccatcgacaaccaggctcgtgtttgacacagccccacggttgccggtctggcagcaacattcggtcgcggttccatgacgaaccactattgcgacatgcagaacgccgacgtcatcatgaccatcggctccaacaacgtcgagaaccatcccgtgtcgtcgaagtgggtgcagaaggccctcgaccgcggcgccacgtggatcgtggtcgacccccgctacacgcgctcggccgagatggcggacatctactgccccatccgctcgggcaccgacatcgccttctacggcggcctgttcaactacatcatcgagcacgacctgtggcagcacgagtacgtgctgaactacacgaacgcctcctacctgctggacgagcagtactccttcgacgtgaacgagggcatcttctccggcttcgacgaggacacggccgcctacgacgccaagacctggcactaccaggttgagacgacgaagacctgggacacctccgagggcggcgcctacgcgtgggccgcagcgcccggcgtgccggagttcacgcccccgacgctcgaggtgcccaagcgcgacatgacgcttcaggacccgatgtgcgtgttccagcagatgaaaaagcactactcccgctacgacctggacaccgtgtccagcgtgtgcggcatggacaaggacctgctggagaaggtgtacgccacctacgcctccacgggcgctcccgacaagtccggcacgatcctctacgccctcgggcagacgcagcacacctacggcgcgcagaactgccgttccatgggcatcctgcagctgctgctgggcaacgtgggcgtggccggcggcggcgtgaacgcgctgcgcggcgagcccaacgtccagggcgccaccgacatgggcatgctcgtggcgaaccagcccggctacctgaactggcccaccgaatacggcacgccgtctttgcgcaaatggtgcgagaaggagacctactccgatggctactacaccaacaagcccaagttcgtcgtctccgcgctcaaggagtggttcggcgacgcggccacggtggacaacgactacggctacgactggtggccgaaggtgccgaagagccccgactactccatcatcggctcgttcgagctcatgagccagggcgtcatcaagggctacttcaactggggcatgaacccctgccactccgcgccgaacgcgagcaacgtgcgccgcgccatggcgaacctcgactggctcgtggtggccgactgggtggagacggagtccgccaccttctggaaggcccccgacatgaacccggccgatatcgacaccacggtgtacttcctgccggccgcgctcatctacgagaagcccggcatcatcctgaactccggccgctggctgcagtggcgctaccaggccgtcgagccgtgggacgaggccaagcccgactacgagatctgcgacgtgctgtggacggccatcgtcgacctctacaagaaggagggcggcgtcgcggcggagcccatcgtgaacacgaagtgggactactacgtggacggcaagatcgacccgcgtcccgtggcctgggccctcaacggctacgtgtacgacggcaccgagtgcaacaccacctcggcggccccgaagaccgagctgctctccaccttcgcgaacctcaaggccgacggctccacggcctgcggcatgtggatctacaccggcttctgggccaacaacgaggcacccctcgatccggccgagcaggccatcggcagccgtgtggccgacgacccgaccggcctcggcctgcatccgaagtggtcgttcgcctggccgctcaaccgccgcatcatctacaaccgcgcctcggccgacctgaacggcaagccgtggaaccccgagcgcacgctcgtggagtggacgggcgagaagtgggtgcagaacgacgtgggcgacttcgtggccgtgtccaacggcaagcccgtgccccccaacgacaaggcgttcatgatgctctgggagcagaacgcgcgcctggagagctacagcatgggagacgggcccctgcccgagcactacgagcccttcgagagcccggcggacaaccagatgaacggccggcagaactcgccgtgcgtccgcttcgccgagttcgagtcggtcaagcgcggcgaccgctccgagttccccatcgcggtgaccacgtactccgtcaccgagcactggcagaccggcgggcagacccgcacgtgcccggccctcaacgaggccatgcccgagcagttcgtggagatgtcgctggagctggccgaggagaagggcatcaagaacggcgagaaggtccgcgtgcgcaacaaccgcggctccgtcgaggtgatggcccttgtcacgccgcgcttcaagccgttcacggttaacggcgagaccgtgcaccaggtgggcatgacgcaccacttcggctgggcgggcgagtacgccaccggcgacatcgtgaacgacctgccgccgaacgtgggcgacccgaactgctgggtgcccgagtacaaggcgttcctcgtcgacatcgagaagatctagggaggtgttgaatgatgagtgacaaagccatactgttcgacacctcgcgctgcagcgcatgccgcggctgccaggtggcctgcaaatgctggaacgacctgccgtcgacgctcgagaagaacggcaacccgtccaccggctcgtaccagagcccgatggacctgaacggcaccacccgcatcctgatctccttcaacgaggaggcaggtggcgacaagggcgtgaagtgggccttcgggcgccgctcgtgccagcactgcaccgacgccgcgtgcgccaccatctgcccggccggagccattgccaagcacgaggccacgggcctggtgacggtggacgagtccaagtgcatcggctgccagtactgctccacggcgtgcccgttcgacgtcccccgctaccaggagggcctgcgcacgaccgtcaacaagtgcacgggctgcgtcgaccgcatcgagcagggcagggagcccgcctgcgtcaccacgtgccagccggacgcactcgtgttcggcgatcgcgacgagatgatagcgctggcgcacgagcgcgccgacttcctcaaggcccgcggctacgaggacgcggtggtctacggcgaggacgagatgggcggcctgcatgtcatccaggtgctgaagtacggcgtggccgcacatggccaggtggagaacccgcaggctaacccggtggtgggcctcacgcagatcatgaagccgatcacgggcgccgtcacggggctcaccgtggcgggcctcgccgccatgttcgcgctcggcgtcggctacaagcgcgacaagctggcgtacaaccccgagacggaggacacgatctccgtcgacaccggccaggtcgtcaagcatggcgacggccaggacgaggagacggtgatggagcacattaccgagaacctcccgggcaagaagggaggcaactgatgagcaagggacccgttatggtttccgccgaggaaaccgccaagaacaaggcgttcttggagcagatggcggcaagcggcgcggaacgctacatccgccgccactccaagcaggcgcgctggacgcacggcatcaccatcatcgcgtgcatcctgctgtgcatctcgggcttgttcgtgttcgttccggccttggcggccgcggcgggggcggacacggtgttcgccatccgcatgtcgcaccgcgtgatcggcgtcatcttcgtgatcgtgcccctgatcagcgccatcatggcgcccaagggtgtgaagcacatcttcaagaacctgttcgaccggtgggattcggacgacaagaagtggatgatgctgttcttcccctacctgttcatggccaagtggatccacatgcccgaccagcgcgaggtcaagagcggccagcgcttcgccgacggcatgctgtggttcgcgggcgcgctcatgggcatcacgggcgtcatcctgcttttgggcacgaccctctttgacttcgggtcgggcgtgcacggcgtgacgctgttcctgcacgacatcggctttctgctgatcgcggtgttcgggctggcgcacattttcctgggtgcgggcatcttccagccgtaccggggaacgtacaagctcatgttcggcgacggcatggtctccgagtccgacgccctgtaccactggggccactgggctcgcaaggaaatcgcttccggcgagaacgtgatagagaagaaggcttaagggagccgcttttgcggggctgccggggcggatcgtgccccggctgctccgctggccgttcgcaggggcgctcgggggagagcccctgcgaacggccagcgccaagggcgcgccgaggaaaggccgggcacgggcggaggaagcgacgccgacggcccggacggtacggatcgacgcaactgactgacaaggatacggcatgaatttgaaagcgatcgacgcggctttggccgcttaccgcgagaagctcgacgagggcgagatggcgcgcctcgcgttcttccgcaagctgtggggcgccctggacgaggcggcggccgacgcgcccgccgcggagggctgggacgcgccgtgcgcggaggacctgcgcacctggttcgcggcgggcgagccggtgctcgcgcacgcgccggcaacggtgggggccgccccgttcgccgtagcgctcgggcgcgcggctgcctgcgcggccgagcacggcggcttcgccgcgggcacggccgaggcgctcggccgcacgaggtgggaccgcatcgttgccgcgagcccgctcgggctggccggcagcgacccggcagcctatctggatgccctggccgagctgctggcagacgacggcatgaccgaggaccaggcacgcacggccgcgctggtggcggcgcttgcgctgcgctcgcagctggaggagcctgcccgtgcggcggctcgcgcgctcgggcaggcgggctgcgacgcgccgcacccccttgcgtgcccggtgtgcggcggcgccccggccgcgggtcgcgtgggcggcgagaactcgacgcaagggcgcggcaagacgctctggtgcgcgcagtgcggcacgtcgtgggagatcgagcgcgtgcgctgcgcccgctgcggcacgcagaaccaggcgcacctgcactactacaacgtggagggcgacgacgcccaccgcatcgccacctgcgacgagtgcggcggctacctgcgcaccgtctacgcggacgacgcgctcgcgccgttctcgttcgaggtggaggacgtggtcatggcccggctcgacgccatcgcggccgagcggggctagagaagggaaggggggcgcatggccgtcatcgagtaccgcccgtccgcgccgcgcacgacggccgagcggcccatccgcatattcttgaacgacgcgcccgtggcggtgagccagggcagcccgtacgacctggccgagctggccgtgggctacctcctgtccgagggcctcatcgccgaccgcgagcgcttcgtggaggtgacggccgaccccgaggcggcggccgtgtacgtggccagcggcgagcgcgccgcggagggctacgtgccgctgcaccgcgtgacctcggccggctgcgcccgctcggcgctcctggccgacggcgggggcgtgccgagcccccggcgcctggagaccgccgcgcgcttcgacgccgatgccctgctcgcccagatggacgagctctgcgagcgcagcccgcgacgcaacaccggcgagtgtgttcacggctgcggcctgggcgacggccgcacggggggccttctgctcgtgcgcgaggacatcgggcggcacaacgccatggacaagctcatcggccaggcgtggctcgaccgcgtgccgttggacgacaaggccctgttcatcacgggacgcatcagctgcgagatggccctcaaggcccaccgcgccggctgccccgtgctcgtgagccgcaagtccgccaccgacgaggcggcccggcgtgccgaggagctgggcgtgacgctggtatcccactgccgcgacggccgcctgcgcgtcctgtcctgccccgaccgcatcgcgggctaggcttcggcggacggggcgcccggcaacgcttgcgtgccggatcgcctgcggccgcgcgcaaggctcgcagggcgcggcccggcgttgtacaatggcggaaaagcgcccgccagcctcccgagccggacgtgccgtgcggcgggccgagcctgcaaggttaggagccgcccatgagcatcgtcgccgcctacgtcgtaccgcatcccccgctcatcgtgccggcggtggggcacggccaggagcgcgccatccaggccaccgtcgacgcttacgaggaggtggcccgccgcatcgccgctcatgcgcccgacaccatcgtcgtggtctcgccgcatgcgccgctctactacgactgcttccatatctccaccggcgacgccgcccacggcgacatggggcggttcgacgcgtgggaggccgccatgaacgtgccgtacgacccctccttcgccgcagcggtatcggcctgcgcccgcgcccgcggcgtgcccatctgcggcagcggcatgcgcgacggcgagctcgaccacgccacgttcgtgccgcttcacttcgtgaacgagcgctatgccggctaccgcctggtgcgcgtgggactctcgggcctgacccccgccgatcaccgcgaggtcgggcgctgcgttgccgaggcggcttgcgacttggaccgcgcctgcgtgctcgtggcctcgggcgacctgtcccacaagctgaaggaggacggcccctacggctttgcgcccgaaggccccgtgttcgaccgcacggtcacgggcctcttcgacgagggcgacctcgaggggctcttctcgatcgatgcggcgttccgcgaggcggcggccgagtgcggccttggctcgttccagatcatggccggcgcgctggacggcgtgccggttacccacgagctgctgagctacgaggggccgttcggcgttggctacgccgtggccgccttcgaggtgcaggggccgaagggcgacggagcggttgccgcgggcgtggacgcggaagccgacgcgcgcggggccgaggacgcggcggccgctgagcaggacggggccgacccgttcgtcgcgctcgcgcgcgccgcggtggagggcttcgtgcgcacgggaaggcccctcgcgcgccccgacggactgccgcctgagttggccgacgcgcgcgccggcgtgttcgtgtcgctgcacgagggcggcgacctgcgcggctgcatcggcaccgtcgagcccgtcaccggctcgatcgccgacgagatcatccgcaacggcgcggcggccgcgagcgaggacccgcgcttcccgccggtgggcgccggcgagctcgacgcgctgtcgtactcggtggacgtgctgttcccgccggagcccgtggactcggaggccgcgctcgacccggcgcgctacggcgtcatcgtgacgctcgggcgccggcgcggccttttgctgccgaacctggagggcgtggacacggcggcccagcaggttgccatcgcccgcgcgaaggcgggcatcgcgcccgacgagggcggtgtgcggctcgagcgcttcgaggtcgtgcgccacgaccgcggcggggaggcccgccgtggctgagccgggagcagctaagtcggggaccgtgcccgaggggtgcgccggcgcgccccggtcctccgccgaggatgcgccgcacggcggccgggccgtctgcggcgtgtgcccgcacgcctgcgcgcccgccgagggccggcagggcctctgccgcgcccgcgtcgcccgcggcgagcaggtggtctgcgagagctacggccgcgtgacgtcgcttgcgctggaccccgtggagaagaagccgctcgcgcgctggcaccccggctcgctcgtgctgtcggcaggctcctacggctgcaacctgcgctgcccgttctgccagaacgcctccatcgcctgcgccgggccggacgacgtgccgtggcgcccgatggcgcccgccgagctggcggacctcgctctggaggcgcgggaccgcggctgcgtgggcgtggcctacacctacaacgagccgctcgtgggcatcgagttcgtcgccgacaccgcgcgcctcgtgcgcgggcgggggatggcgaacgtgctcgtgagcaacggcatggtgaacgcgggcccgctcgccgggctcgtgccgctcctggatgccgccaacatcgacctcaaggggttctcgcaggaattctacgacgtggcgggcggcgacttcgaggccgtgaggcgcaccatcgccgcgctggccacggcacccggctgccacctggaggtgacgacgctcgtcgtccccggcctgaacgacgacgaggcgaccatcgacgcggccgccgcctggctcgcctcgctcgaccccgccatcccgtaccatctcacgcgcttcttcccctgccaccgcctgaccgaccgcccgcccacgcccgcggccgacctgcgccgcctggccgacgttgcccggcgccacctggacgacgtgctgctgggcaactgctgagcgccctccctccgttcccgcggttccgctatactggctcctaacccgcgaaccgaggagagccatgctgcgctatttcaagaagtacgtctgggccgcctacgcgctgtcggtgctgatacccgcggcatcgctcgccgccttctccctggtgatgggcggcaacgtggtcaagacgctgccggggctgttctcgtcgctcatgctgttcttcgcgtgcctgtacgtcatgccgcgcctcatggggcagctggccgaccgcaaggccgagcagctcgtctcgctctacaacgacggatgcgacccggacgccttccgcgcccaggccgccgcgcccgcccgcgccatcggggagccgtacacggaggcgggctcgtggttcctgtcgttctacgcgctggcgcttgccgatggcggccaggtcgaggaggcggcgcgcatcggcgagggcctgcgcgcgagcgccgcgcaggcgcaggatgagcgcgagcgtgcggcgctgctcgtgaacatggagccggtcgtgcagaggctgttgggcgcccgaccggcgctcggggccgtggaggaggccgagcgcctgctggagggtgactcgtccgccgagaccgcccagcgccgtaacttccttgcctgggagcgcggcgtactggaagcccgcctgtccggcgacgacggcgtgctggccccgaagctcgcgcacgtgagggagaccgaaggctatccgctgcgcatgcgcgtgctggccgctgcggacgaggcggccgtccgccggcgccagggcgacggggcgcgcgagcgggagtgccttcgtttcgtcgtcgagaacggcaatcgcctgcccgccgtgcccgaagcccgcgcacgcctcgcggagctcggcaagtgaccaccgtgcggcgcacggtcggatagccacgtaaagccgtccggaattgcggcgagccctacggcgaggtgctgcccgggcgtttcgtgccgtggctcgagcaggacccatgcttctacgacctgggcaattggataatggagcaagcgctggcagacggcgtgctcatggtacgccggcatcccggcctgcgtctcaacgtgaacgggctgagctgccggcggcgcgtgccgccgaccctgccgcggccgcgcttcggccgggcgatcccgctgcactgctctgcgttcctgccagcgccgtgtcctgcgttccagctacgcgatccgtaggctctcccgttcgcttcctgcgcctccgcgccctgcactttcgcctgctgcgcctttgccgggcagatgcctccccgcccttttcgcggtgcagtgccccggtttcgcccggctcgttgacggcggtggccggcggcgtctaggataggtcggatcgtgtccgatacgcgcccgtccgcggcgtgtcgagtgggaggatgttcggtggagaagcgcccagcgcggccacgggccgccgttgtcctggccgtcttgctcgtcgtgctgctgggggccgcggcatccggtttcggcttcctggtgtggcagcagcggcagatagaccgcgccgtggcggaggtcgcccagacgccgctgcccgccgtggaacccacggtggaggcgcaggaggccggaccgcagaaccccatcgacttcgccgccctaaaggcggagaatcccgacctgtacgcgtggatctacgtgccgaacacgaacgtcaacctgccggtggcgcagcgcgccggggacgacttcttctacctggaccacgactaccgcggcaactgcgccgtagagggcgctgtgttctctcagatggcgaatgccaaggactttaccgacccggtcacggtgctctatggtcacaacatcgtgaacgatggcatgttcgccacgctgcatagcttcgaagatcccgccttctttgcggcgaacgaggcattctatgtttacattcccgggcatatcctcacgtatcgcgtggcggcggcctatgaatacgatgaccgccatatcctgaattcatttgacttcgccgattcggtggtgcgcgagaactatttcgcttccgtgctcgcccccgacgacctgcaagccaacgtgcgcgagggcatcgctcttaacgccgagagcaagctcgtccagctgagcacgtgccgatcggccttcacgagtgatcctgtgcgctacctcgttaccggtgtgctgactgacgaccaaacaactgcggctgcataggggttttctgccaaaacgtcgctcgccgtgctgctgctattgctgaaacttttcctatttcgcagaggagaagtctgctttcgtcttacgggtcgattggcgtgtggttgtgctttagcatgaggaagctgtggttcgcacgcgccttcttgtgggggcgcgccaatgagagaggtgtgagatgaggaagaaactggcggcgcttctgtgcgccggaatgctcgcgtgcgcgctccctgcgctcgcatgggccgaggaagcggctgagccgacggcggatcaggcgaccgcgcaggagacgggagcagcgacccgctcgatcgggccgtggcaggagagcgcgtcgaacgaggacggctcgttcgtcctctctggcgagacgagggcagcctcgtttgccatcatcgctacgagcgagacggccgacgacgctctggacggcatgccctcgttcagggtcgttgccgagagcgcgaccaagaagatcgatttcggcgcggcgcttatcgcaggcggtaaatacgctggttgcaacaaactcgaggtgcacgtgaagccgagcgcgggcagcgccggcaccgctaagacgttcgaggtgacgagggccgccagccagagcagcttcaacttcacgtccgagatgctcaacctcggcgaccagacggccgatgccttctacaacgccgacttcatcatgacgctcgttccctcgaaggtggatgcggacgaaccggccgtcgacgacccagccgcgctgccgtccggcaccgacacgggcgcgacctcgccgaagaccggcatggatgccggtgcggtggcgggcgcctctttcggcatgctggccgccgccggagtcgtggccttcgcgctgcgccgcaaactcgcgtagaaacgcttcgaacatccggtgtgccatctgaacggcggctcgcgcgagccgccgctcgcgctgcgaccggaaattcgattatgcacgttctcgtaaatttctgcataaaaggggttacatatcgcgggtaaaccgcatatactgcgagcagtcctttaaaagcggtacagagagaccgacaaggtaacagccaccaagcgctcgcccggaaaagagcgcgcggagtcgaagcctttgtctgtcgcggaggcttttttcttgcccggcgacaggcgcctgcgaggcgggggagcgcgaaggcgcgaaccgcacgacggggtgagggtcgcctgtaccatcccgaacggaaggggtgggtgcatgaccgacaccggcacagtcaagaccgtctgcatggacgcggacgagatcgagcggtcgttgacgcgcattgcgcatcagatcctcgaggcgaacaagggcgcggacaacatcgcgctcgtcggcatcgtgacgcgcggcgatttgctcgccaagcgcctggccgagaagatcgagcagatcgagggcacgaaggtgccgctcggcaagctcgacatcagcttctaccgcgacgacttcgcgacgcatctcgctcccgaggtgcactccaccgacatcttcttcgatctcgacggcaaggacatcgtcctcgtggacgacgtgctgtacacgggccgcaccatccgcgccgcgctcgacgcgctcatggacatcggccgcccggccacggtgcagctggccgtgctggtggaccgcgggcaccgtcagctgcccatccgcgccgacttcgtgggcaagaacgtgccgtcggcggcggacgagaacgtgcgcctcttcctggaggagacggacggcaagtccgaggtcgagattctggaaatcgcaccgggctcccgcgcgggttcggcaccgctgggaggtgaatagggcatggccttcaatcacaagcatctgatcgatatcacggagtactccgccgaggatatcatgaccgtcctcgagacggccacgcgcttcaaggaagtcaacgagcgccgcatcaagcaggtccccacgctcaagggcgtcacggtcgtgaacatgttcaacgagccgtccacccgtacgcgctcctcgttcgagatcgccgagaagcgcctctccgccaacagcctgaacttcggcggcagctccacctccacggtgaagggcgagagcctcgtcgacacggtggagacgctgtgcgcctacaagatcgacatgatcatcgtccgcgacaagcacgcgggcgtgccccgcaagatcgccgacgtctccggcgcgcacgtcatcgacgcgggcgacggcaagcaccagcacccgacgcaggcgctgttggacctgtactccatctgggaggtcaagggcgacctggccggcctcaaggtgggcgtcgtgggcgacatcggccactcccgcgtgtgcggctcgctcatccccgcgctcaagatcatgggctgcgaggtgacggtggttgccccgccgacgctgctgccggcgcgtcccgacatcctcggcgccgaccacgtcaccacgaagctcgacgaggtgctgcccgacctcgacgtggtgtacatgctgcgcatccagcgcgagcgcctcgaaggcgcgccgtacccgtcgctgcgcgagtacaacatgctgtacggcctcacgaaggagcgcgagcccctcatgaagcccgacgccctcatctgccatcccggccccatcaaccgcggcgtcgagctggacagctacatggccgaccatccgaagcgctcggtcattctcgatcaagtctacgccggcatcctcacgcgcatggcggaaatgtatcttcttctgggagggagcgaagatggccttactgcttaagaacgcccatgtgatcgacccgcaggtcggtctgaacgaaacggccgacatcctcgtgcgcgacgggaagatcgtcgagatcggccagaacctcgcgatggagaagggcgtcgagcgcgacctgggcggcaagatcgtcatccccggcctcgtcgacatccacgtgcacctgcgcgagcccggctacgagacgaaggaagacatcgcttccggcacgcgcgccgcggcccacggcggcttcacggcggtgtgctgcatgccgaacacgaagcccgtcatcgacaacgcggtgggcgtcgagtacgtcaaggtccgcgccgcggccgtcggcaagtgccgcgtgcacgtggccggctcctgcagccaaggcctcgcgggcgagacgctctccgagatgggcgacatggtggcccacggcgccgtcgccttcaccgacgacggccgcggcgtgcagggtgcgggcatgatgcgccgcgtgatggactacgccgcgcagttcgaccgcgtggtgatgagccactgccaggacgaggacctcgtcggcgccggccaagtgaacgaaggcgtcgtgtccacgcgcctcgggatgctgggctggccggcggagggcgaggagatccagattgcccgtgacatcgccatctgccgcctcacgggctgcccgctgcacgtgcagcacctcaccaccgcccgcgggctcgagctcgtgcgcgccgcgaaggccgagggcctgcccgtcacctgcgaggtcacgccgcaccacctgttcctcaccgaggacgccatcggcgacgactacaacaccttcctcaaggtgaacccgccgctgcgcacggccgacgacgccgccgcgctcgtcgagggcgtgaaggacggcacggtggacgccatcgtcaccgaccacgcgccgcacaacgacttcgagaagaacgccgagttcgagctggcgcctttcggcatgatcggcttggagacgtcgctcgcgctcgtcatcacgaacctggtcgcgcccggcatcatcagctgggagcgcgccgtcgagctcatggccgcgaagccccgtgagatcctgcgcgtcgagcgcgtggcgctcgagccgggcgcgacggccgacctcacggtcatcgacccggacgccgcctggacggtggatgcggccgacttcctctcgaaggccgtgaactcgggcttcatcggcgccgagctcacgggtcgcgccaccgacgtctacgtgggcggctacgccaccctcgaggacggcgcgatcgtcgagtaacccgtctgcaagcagccgaaggaccgcaccgggcacgtccggtgcggtccttcgctttttcggggctccgaagtcacggttttggccgctgtgaagcccggccgggaccctcgaactgatgcctgaatgcgctctcgaagaaaccgcaggtcgagcgagggctcgtttcctgtggcaggtgcgcagtgtcgcgagatagccgtggaaggcgtgcgaaagcttcacagcggccaaaacggtgactcgtgcgtccgtttttcaagcggtatgatgaacgcatgatttcgcgtggtatgatgagcgcatcaaagagccagtgcaggcgcgccccttatatggaggccgcccatgcggaagcggcgatgccctcgcttccctcacacgcctgcaagatcctcctcggaacagggcgtttggagggggtagtgcgcctatggcgggcacacgggtctatttcagccatcgaacatcgctccagctgctgcggacgtcgagtccgaccaagcgcgcgccgctgcaaggtccctcgcgtgcgctgccggaccgtgcgccgagcgcggccgagcttgccgagatcgtcgagcgcctgggggcggctcatcacggcgtccgcatcgaccagcccgtccatgttctcgtgggcacggccgcgcaccgacgcttggcgcccgattgccgcgagcatgtgtgcgcggcgcctctggcgggcagggagttttgccgtctggcggagggtgcgttctcggcgggcgccgccctcgccctcgttcagatcgctatggacgagaagagccctatcgccctgctcgagctggtgtacgaggcgtgcgggacgtaccagacgcggcgcacgggtgtcgagtcggcctacgacgtgcccccgctcgcctgcgtggacgacctgcgcgccttcgtcgcgcgcaacccctcgctcgccggcgcaggcaagctcggccgcgtcctgcgctacgcggcggaccgctctgcctcgccgcgcgagacgaagcaggcgctcgtgctgggccttccgttgcgccagggcggcgagggcctgggcatcccccgcatgaacttcgtggtgcgcgcgagcccggcggcgcgggccatcgcggggaggtcgagctttcggtgcgacctgtgctggccggaggccaagctcgacgttgagtaccagagccgcttcgcgcatgagggcgaggcgagtcgcctgcgggactctcgcaggacgaatgccctcatggccatgggatggacggtggtcggcgtcaccaacgacgagctcgacagcctcgcggcgaccgagacaatcgcccgcacgatacggcggcatctcggcaaacgctcgcagtttcgcatcgacgacctccatgcgcgcaagctcgagctcaggcgtcagctggggctgggcgtggggtgagggctctgagcaagctgcgcaagcggctacggcgctgctcgggtgctacgccttatcgccagctgtaccggcgcccttgcgggcgaggtcgatgagctcctgctgagagtgcacgccgcatttggagaagatgctgcgcacatgcgagctcaccgtgttgatggacacggtgagctcgccgcgaatatagggacggctgcggcccgccaacagcagcgccgccacgtccgtctcgcggctcgtcaggtcgaaggtcgcctggagcgtgcgggcctcctgctcgaacagggcatccaggtcgggcccgccgcctttcgcgcccggcctgcccgaggcgtcccgctcgctgcggtcgcgggtgcggttgaacacccactgcgggttgaagcccgtgaccatgatggcgaacgccacggccgtgagcagcaccgacgacaacaccatgagccccttcacgtcaagcgtcagcacggcgtagagccccacgaggcagcctgcgaagatgccgagcccctccccgagcgcgtacacgccgaacacggtgagcgcaggcgagccggtgcgccgcaggtacttgcacgcgccgagccagcagccgaactgcacgccgaacatgccgaggaagttgatggcgtaggcggcgaggcgcagggtggggttgccgtagtcgatgaagatgggcacgtagctcagcatgaacagcggcaggctccaccggtaggcgagcgatatgttcaggtagcgcgacatacgcaggcacagtgccagcatgacgagcgacagcacgcaggcgcacgtgaacggtatgaggaagtgggcgatgcggtcgcccatgatctccggcgtggccacgacgcggaagaacgccacctgcacccacgacacgcatgcgagcacgccgaacgacagcagcccgcggtgcgtgcgcggccccggccgcgacgcggcggcaggagggcgtccctcgccgccgtggcggcaggcgagccagaacgagagggctatcatggccagcaacagcacgaggaaggggatggacccccgcttcgtcagcagcaacacgaagtacagcgcgaaggccaccgtgaacgagaggggtatggcgaattcgacgtgcgcctcgtcataggatcccaggcggtcgctccacagcatggcgaacagcgccacggcgatgcccgtgagcgcgccgcccggcacgtggaatgcccacacggcgccgaagcggtcggtccaggcgagccaggtgagcacgttgccggccacggcgcatgcaagagccacggccccgaaggcgcgccgccgcacgaaccgcgcaggatcggccacgaacctcgccgccacgatgccgcccagcccgccgagtccctcgaacaggccgctcaccatccagatgcgctccaggttgtagttcgtcagcgtgccgtcgatggcggcatcgtgcgtggccagcccgcagccgaacagcgtgcagaacacccatcccagaaaaagcgcgaagccgatggtctcgcgccggtacagcggaaggttccgccgatagtactctctcaaacgccctcacctcccagcggctgattatagtataggtgcgcttgcgccctgcgtgcaacctaccgactgccactccacctaactagagtatgaacaggtaaaatgcaaacttcacctggatcaggtgaggggtttatgcgggattgtcccgccaaaacgcctcgatcaggtgatgaagcgcgccgccctcccgcctagactcgaaggctgttgtgttcgttctctggcataaggaggaggagagtatgggaaagagcatcgaccgacgcacgttcgtcggcgcgatgggcgccctgggcgcgctgtcggtagccggcgccgcgctcggcggccagccgaccgcggccgtcgcggccgagtcggcgttcccggcgccgggcaagggcaagcccgtcgaggcgagcgtcgacccgaagaccggggacgtgaccgtcaacgaggacgtggtcgtgcgctattcgggctgcgtggggtgctactgctcgtgcggcaaccgcgtgaagctcgaccgcgagacgggcagcgtgctgggcgtgggcggcaacccctacaaccccgccgacgcgtacccgttcctggacttcgaggcgcccctcaccgaggcgtaccagtccttgagctacgccaacggcaagggcaaccagctgcgcggcaccgtatgcggccgcggcaacggcacgttggacggctatacccagcccgaccgcatcaccgtgccgctcaagcgtgccggcaagcgcggcgagggcaagtggaaggccatcggctgggaccagctcatcaaggaggtcacggagggcggcaagctgttcgccgagatcggcgaggaccgcgagatcatgggcttcaaagagctgcatgacacgaaaacgccgatgaaccccgacgagccgggcctcggccccgtgtccaaccagctggttatgctgggcagccgctcggacggccgcggcaacttctccagccgcttcgcctcgacgttcggcacgatcaacgcctacgggcacgccagcagttgagcggtcgccaattcagcgagttcgctggcacaagcaggtaagaacggcctcacccccgagccggaggaggccgagtacgcaatctggctgggcgccttcccaggcggcagcatgatcaacttccagagctccggcaagcgcacgctcaagaacctcgcagccgggaagctcaagatcgacgtgctcgactgcacgctcgccaacggttccgtgacgcccaccatcccgggcatcaactggatacccatcaaacccgccacgaacgccgcgttctgcgccgcgctcgtgcagaagatcatcgccgacaagacctacaacgccgacgccatctccttcaccacccagaaggcggctgtcgagggcggatacggcgcctatacgaacgccacgtacctggtcatcgtcgacgagaaccatccgaactaccgcaagctcatgcgcgcggccgacgccggcatcgatgcgcccgaggagaaggacaaggacggcaaggccgtcgagcagtacgtggtcatcgacgccgccaccgggcagccggcgctgcactccgcgtgcagcaagggcacgctcgagtacgagggcgaggtgaacggcgtgaaggtgcgcacgggcttctcgctcctcacggagacggtgaacgagtacaccatggacgagtacgccgagatcaccggcgtgtccgtggaggacctggagcgcattgccaaggagtacacctctcacggcacccgcgtgggcatctgccacaagggcggctcggccgcctcggtcaacggcatcgacacggtcatgggcgccgcggtgctccatgccatcgtgggtgcgaaccagatgatcggcggcaacgcgcccaacagcccggctcccaccactgccggcaacggagcgcgctacaagctgggcgccatcgagggtaagcccgacgtctccacgaagaacgcgtgctacatctcgcgcacggtgaaggcctgggagaagaccgacgagtacaagaaccgggtcgcagccggcgagaaggaccccaagccgctcatgccctggttcgccaacggcgcggcctctgacagccaagcgctgctctccatcgtgaacaagtatccctaccaggctaagatactcacctccttcatgtgcaacacgatccaggccacgccgggcgccatgcgcgacgaggtcgtggagcgcctgtgcgaccccgaggtgctgccgctgcatatcgtgtgcgacgtgttcgtaggcgagcacgcccagtacgccgactacatcgtgcccgacgtcaccccctacgagagcttcggcctgcccactacgggcaccacgttcaccggctacggcaccaccgtgcgctggcaggtgaaggagccggagagcatgaagctggacgacggccgccatgccagctgggaaaccttcctggccgacgtggccgaggcgtgcggcctgcccggatggggcgagggcgccatcaaagacgtggacggcaaggcgtggccgctgcgcgacgccgccgacttctatctgaaggcggttgcgaacctggcctacgccgaggagccggtggccgacatcgacgcgcgggaagcgcagctccagggcctcgacgagctgcccgacagcttcaaggcagccgtatccgacgaggagtggcccaaggtgcagaacgtgctgtcgcgcggcgggcgctactggcccatgtcctacgtgcacgacgccgacggccgtcgcagccgcgggtacaaggacgagaaccaggcatatttctacagcgagaaacgcgcgacgaacaagaactgctactcgggcaagcagctgcccggcacgctgcgctacaaccccgagacgttcaccgacctctctcccatggaggaccacttctcgcgcgaggagtacccgttcggcgcctcggagcacaagccgcgcttccgctccatctccatgctgtcgaacagcccggtcatgcgcgacctgtgcagccacaactacatcgagctcaaccgtgaggacgcggccgagctgggcatcaaggacggcgacaaggtgcgcgccatcacgccgctcggcgacgtgagcgagggcatcgccatggtgcgcgcgggtcagacgaaaggcgcgttcgcgctggcgttcggctacgagcaccagaactacggcgcccaggatatcgaggtggacggccaaaccaccaagggcgacccggccatcgccgcgggcgtgcgcatccaccagatgctcgatcccacggtcacgggcgtcaccggcgacgacgtcatcagcatcatcgcggagaacgacgcggcctcgcccggccgttgcggcggcatgttcaaaatcgagaaggcatgaagggggtaagcgatcatgagtgagagaaagcttggcatgctgattgacctatccctgtgcatcggctgcaacgcgtgcaccgtggcctgcaagcgcgagaacgacgtgcccctgggcgcgttcaacacctggatcgagagcttcgacgtggagcggcccgacgggcgcatcgcccgggcgaacgttcccaagcagtgcaaccactgcgccgacgcgccctgcgtgcgggtgtgccccacgggcgcgagctaccgcgctgaggacggcacggtgcagatcgaccaggacaagtgcatagggtgcaagtactgcatggcggcgtgcccgtaccaggtgcgctaccaggtggagtccggcgaggtgcagaagtgcacgttctgccaccaccgcacgagcgtcggcctgctgccggcctgcgtgggcacgtgcgtgggctacgcccgcaccttcggcgacctgaacgacccggagagcgacatcgcgaagcgcctggccgaggcggacggcggcgacgtcctgtacgaggatctggggctcaacccctcgctgtactatatcggactcaaggaaaccgaggccatgccggtcgcgtccgccatccaccgcggcggcaacgtcatgaagccgtacgaggggtgatcgagatggtttgggatgcattcatagcaatttacctgttcctggccggtttgggcgcgggggcgttcgtcttaggcgcgctcacgaactgggcgaagaagccggcggcgcgcatgaagaggatcgcgttcatcatcgcgccggtggccgtggccgtgggcacgctcgtgctggtgatcgacgcgaaggccgggttcgccaacccgctgcgcttcttcatgctggtgtccaacctgaactccgtcatggcctggggcgtcatcatcttgagcgtgttcttggcggtgagcatcgtcgacttggtgctgctgctggtgaagaagcgcaccccgaaggcgctcgacatcgcaggcatggtgctggccgtgtgcgtggccgcctacaccggcgtgctgctgggcgacgcgggcctcgcgttcccgctgtggaacatggccgtgctgccggtgctgttcgtggtgtcggccgcctcgacgggcatcgccgcggtgctgctggccacgcgcatcgcggcccccgaggaggccggcgcgctgccgctgctctccaaggccgggcttgtcctgccggtgctcgagctggtgctggtggcggtgctgctgggcgtgacggccggcacgtcgggatcgggcgccgccgccggcgccgcctcggtggcgagcctcgtgtccggcgcctacgccgtgccgttctggctcgggttcgtgggagtgggcctggtgctgccgttcgcgctggagctcgcggcgcaccgcggcgcccgggcgccgaaggcagccgcggccgccggcgatgcggcgccgggcgccggccctgacggctccgccgccgcggcggcgggctcgggcagggcgctcgccctcgtgggcgaggccggcgttctcgtgggcggcttcatgctgcgctacctggtgattatggcggcgctggcagtcgtgttcgcctagcgtatgctatgctgggggacgggggtctgcgggccctcgtccccgcctggcttgcccggcgcggcagccggacgctcgggagggcgcccggctgccgcgccagacagacttgttttcctattggagcaatggaggtacttcccatggacgatgcagcgcccctttcgcccgaagagctgcaaggcttcgccgtcatcgccgaggcctgcgccgaggcgttcctgaacgagccctccgcgcagatcgtggacgacgtggcccgcgtggcgcgggcgcttggcgacggccgcctcgacggcgtcgttgccgacgaggcgctgcggcagcgctacagcgagcgcttcttcgtgccgacgggcccgctctacgtgccgctctccgagtgcagcgtgcgcggcgcggccgaggaggagggccgtgtgcggtacgcgcccgtctcgggcgcccgggccgaccacgtgctgaggtgctaccgggccgtcggcttcgactaccgggcgctcgcgggcttcggccctgccgtgggcagcctgcgccccgactcgctggccgccgagctcgcgttcatggcgtttttggctcgcgcggccgccgaagcggcgggggaggacccggcggcgtccgagcgcgcgtcggagctgctgcgccagttcgcccgcgagcatgcgaacgcgtggctgccgagggccgcccgcctgctggctgccggcgacgacgacctctacgcccgcacggccgctttggccgcggatgcggtggggtcgatcgccgagtaggccgtccctcgcgaaaggatccctgccggcggctcgccgcgtgatggcaggtagccaaggggaagggagctcagtcctcgttggcgctgcgggcattgcgcgcgagcaccatgagctcctgctgggaatgcacgccgcacttcgcgaagatgctgcgcacgtgcgtgctcaccgtgttgatggacaccacgagctcgtcgcggatgaacggcctgctgcggccttccagcagcagcacggctacgtccgtctcgcgattcgtgagtccgtaggccgcctgcagcgtccgagcttcttgcaggcagggcggcgcgtccggcctgcctgcgccggatgtgccctcaagggggtctgaaccctgcgtcgcatgcctctcgctcgggcggctgaacacccaagtgggattgaacccagtgaccatagcagcgaatatgacggcggccatgagcccgatggacacctgcatcatgccgtgctcgtccatcgatcccatcacgtacagcccgatgatgcagccggcaaagatgccgatcccctcggccagcgcataggtgccgaacagccgcagcgcgccgccgttcgagcggtgcaggtgcttgcagatgcctatccagcagccgaactgcacgccgaacatgcccaggaagttgatggcgtaggccagcatgcgcagctcgggattgccgtagtcggcgaacaggggcagatagctcagcatgaacaacggcagactccagcggtaagccagcgagatgttcaggtaacgcgacatcctcaggcacagcaggaacatgacgagcgagagcacgcaggcgaacgagaagggcagcaggtagtgtgtgaagcggtcgccggtgagctcgggcgtggagatgatgcggaagaaggccacctgcacccacgacaccaccacgagcactgcgaacgagagcagaccctgccgcccgtccgtccacggagcatcccgccgcgccgtgcaggccggcgcggccgagtccgcgcgctcgcgcaccgcgaagaatgccgaggcggctatcatgacggcaagcgctatgaagaagggctcgtgcccctgtttcgtcagcagcagcacgaagtacagcgcgaaggcgagcgtgaacgaaagcggcacggcgaactccgtgtacgcctcgtcgtaggaaccgagccgtgcgccccacagcgccacgaacagtgcgatggcgaggccggtgagcgcacctcccacagggtagagctgccagaataggccgggaaagtcggcccaggccaccatggtaacgtagttgcccgccacggcgcacaggagcgccagcaccccgaccgtgcggccgtgcagcagccggtcgggcgccgggtggaaccgagctgccacgatccccgccaggcctccgagcgcctcgaacagtccgctgaccatccacacgtgctccagattgtacacggttgtcacgccgacgggcgaattctcgtaactcgccaggccgcagccgaacaggctgcagaacacccaagcgagaaagagcgcgaaaccgagggtctcacgcaagtagagcgatttgtagcggacgcagtattctctcatgtttcctcccggcgaagattatagggcaccggccccggtgccctgacgggaaccattgtctgacaatgagggtaatgattgtctgaacaggtgcgatgtaaatatcactcgatcaggtgaggcagaaaacacggcttgtccgcatcaatatccctcgactaggtgatgtgcccgcttttctgctctcctagaatctgcgcttggaaaaccccgaatatcttaggaggaggaagaatgggggaaatgaacatagatcgacgcacgttcgtcggggcgatgggtgcgcttggcgcgctctcgctcgcaggcgtgggcctaggatcgcaggcttcggcagccatcgcggcagacaccgcgtttccggcaccggcaaccggtaagcccatcgaggcaaaggttgatcccaagaccggcgacgtggctgtcaatgaggacgttatcgtgcgctactcgggttgcgtgggctgctacagctcgtgtggcaaccgcgtgaagctcgatcgtgccaccgggcgcgtgctgggtgtgggtggcaacccttacaaccctgcgtgcgcgtatccgtacttgaatcacgaggagccgctcgaggaagcgtaccgctcgatgagctacgcacacggcaagggtaaccaactgcacggcactgtgtgcggccgcggcaacggcacgctcgacgccgtgagccagcccgaccgtatcaccgtgccgctcaagcgcgccggtgcccgcggtgagggcaaatggaaggccatcggctgggaccagcttattaaagaagttacggagggcggcaagctgttcgccgagattggtgaggatcgcgacatcgagggcttcaaggctctctgcgataccaagacgcccatgaaccccgaacagcccgacctcggccccgtgtcgaaccagcttgtcatgctcggcggtcgcgccgacggccgcggtgcgttcagcagccgctttgccgccacgttcggcacgctcaaccagtacggccacgtgtcgagctgcgctggtgccaacggggccggatcgcttctgcaagaagccgtgaacactatgatgcccgacccggaagaggccgagtacgcgctgtggttcggtggcttccctggtgcgagtggcatcaacttccagagctcggccaagcgcaccacgaaaaaccttgctgccggcaagctcaagatcgacgtcatcgatcccacgcttgcaaacggtgcggtcacgcccaccattcccggcatcaactgggtgcctatcaagccggccacgaacggcgcgttcgcctcggccctcacgcgcagcattatcgacaacaagcgccacaacgcgcagttcctcgcgttcccgaaccaggaggcggcggtggcgggtggctacgcgtcgcacacgaacgccagctacttggttatcgtggacgagtcccatccgaacttccgcaagctcatgcgcgcggcggacgccggcattgaggtgccggacgtcaaggataagaccggcaagcctgtcgagcagtacgtggtcatcgacgcagccacgaacgcgcccagcgcgcattcgcagagcgccgcgggcgtgctcgagtacgagggcgaggtcaacggcgtgaaggtgcgcacgggcttcctcatgctcaaagacacggtgagcgcctacaccatggacgagtacgccgagatcacgggcatcccggtagatgagcttgagcgcatcgcgtacgagtacaccgaccatggcgtgaagacgagcatctgggccaacggcggctcctgcatcgcggtcaacggtttggacgcctccatgggcacggtggcactgcgcgccctcatcggatcgaaccagatgaccggcggcaacgtgccgtacagcatgacgcccgtggccatgggcaacggcgcccgctacaagctgggcgacattgcgggcaagcccgacgtgtcggccaagaacgccgccgccatctcccgtaccggtaaggcgtgggagaccacggccgagtacaagaatcgcgtggcggccggcgagaaggatcccacccctgcgctgccttggtatcccaacgcgccgctttccgacgcacagacgctcatgtctatcgtcaaccgctatccctatcaggcgaagatcctcaccacgtggatgaacaacgtgctgcaggccacgccgggtgccatgcgcgacgaagtgatcgagcgcttcaaggacccggagtacgtgccgctgcacatcgcatgcgacctggtggtgggcgagggcactcagtacgccgactacatcgtgcccgatgtgagccagtacgagagcttcggcgtgccccaggtgggcaccgccttcaccggctacggctccacggtgcgctggcaggtgaaggtgcctgagagcatcgagttggccgacggacgccatgccagctgggaggcattcctcacagatgtggccaaggcatgcgagctgcccggttggggagagggcgctatcaaggatgtcgacggcaacgcctggccgctcaacgacgcgtgtgactattacttgaaagcggtggcgaaccttgcctacggcgagacgccggtggaggacctctccgccgaggaagcgcgcctgcagggcctcgacgagctgcccgaggcgttttcggccgcagtgtcggaggcggagtggccgaaggtgcagagcgtgctctcgcgcggcgggcgctactggcccatgtcctatatctacggcgacggtggccgtagcaagtggtacaaggacaactactgtgccttcgtgtacagcgagaagcgcgcgctgacgaagaactgctattccggcgagcgtctgcccggcacgctgcactaccgtccccagacgttcagcgacctgtcgcgcatgaccgaccggttctcgaccgaggaattccccttcacggcctctgagcacaagccccgtttccgctcggtgtcgatgctggcgaacagccccatcatgcgcgatttgtgcgatcacaactacgttgagatcaacgaggaggacgccgccgcccttggcattgccgacggcgacacggtgaagatcacgaaccccttgggagatgtgagcacgggcgaggccatggtgcgcgctggtcaggtgaagggcgcgttcagctcgtcgtttggctacgggcaccgagcctacggcgcccaggatgtcgaggtggatggcacgctggtgaagggcaatcccgccatcgccaccggcaccttcgtcaccacgatgcttgaccccaccgtcacggtggacggcgtgatgggcatcatcgccgacaacgacgcctcgtgccccgggcgctccggcggcatgttcaagatcgagaaagcgtaaggaggacctaccatgagcaaacagagattgggcacggtcgttgacctcgcgctctgcatcggctgcaatgcgtgcgcggtggcctgcaagcaggagaacgacgtacccctcaccaaattcaacacgtgggtggagagctgggatgttgacgacggcggacgcatcagccgcgccaatttgcccaagctgtgcaaccactgcgagaacccggcgtgcgtgagcgtgtgcccgaccggcgccagctacgttgccgacgacggcacggtgcagatcgacgtgagcaagtgcatcggctgcaaatactgcatggccgcctgtcccttcggcgtgcgctacaccaacgacgagacgggcgatgtgcacaagtgcacgttctgccaccaccgcacggcaaacggcctgctgcccgcttgcgcaggaacgtgcgtcacccacgcgcgcctgttcggcgacttgaacgatccggagagcgacgtatccaaacggcttgccgaggcggacgacgcccaggtgctcttcgccgatatgggcatgaacccgtcggtacactacctgggcttggacaagatgatgggcatggagcgcgtgagcgccgtgcataagggcggcaacgtgaagacgccctacgaggggaggcagtaaatggtttgggacggcatagtcgcctgcgacttgttcttcgccggcatgggcgcgtggacgttcgtgttcgcggtgctggctgcaggcagggatgatgcgtcgaggaaagcaaagctcgcgggcgtggcggtggcgttcgtcgccgtggcgctcggcgcgctcatcttggcggtcgacgcgcgcgggggtctgttgaacccgctgcgctacttcaacctgctgggcaacttcgggtctgtcatgacctggggcgtggtgctcatcagcctgtttttggtgggtgcgttcgtctgtggcgtgctgctggtgctgaagcgcaacgtgccgcgcgcgctggaggtggtgacggccgtgttgggcgtgggcgtgtcgctgtacacgggcgtgctcctgagcaccgcgccggcgttcccgctgtggaacctggccgtgctgccggtggcgttcgtggtgtcggcagcctacacgggctacgccgcctacgcgctggcagctcgctttacgctgccgagcggcacggcgctgcctgcttggacgggcaaggtggcgctcgtcctgcccgtgctcgaggtagtggcgcttgtggcgcttctggtggtggtgtccgctacgacgggcagtgcggctccgtacgcgatccagtcggtagcgaacctactcaccggcagcaatgccgtcgtgttctggggcggggtcgtggctgtgggcctcgcggcgccgtttgccctggccctcgtgcgtacccgcaagggcgaggcggctcccagctggtttggcgtcgccgaggccgtgtgcatcctgacgggcggtttcgcattccgctacgccgtcatcatggctgccgtgccgatgttcgcctagggaggcggctggaatatggctgacccgatgccgatcatgaaggatgctccgaaggcgcgctcgcccgaagagctgcaaggcttcgccgtcgtcgccgaggcctgcgccgaggcgttcctgaacgagccctccgcgcagatcgtggacgacgtggcccgcgtggcgcgggcgcttggcgacggccgcctcgacggcgtcgttgccgacgaggcgctgcggcagcgctacagcgagcgcttcttcgtgccgacgggcccgctctacgtgccgctctccgagtgcagcgtgcgcggcgcggccgaggaggagggccgtgtgcggtacgcgcccgtctcgggcgcccgggccgaccacgtgctgaggtgctaccgggccgtcggcttcgactaccgggcgctcgcgggcttcggccctgccgtgggcagcctgcgccccgactcgctggccgccgagctcgcgttcatggcgtttttggctcgcgcggccgccgaagcggcgggggaggacccggcggcgtccgagcgcgcgtcggagctgctgcgccagttcgcccgcgagcatgcgaacgcgtggctgccgagggccgcccgcctgctggctgccgagggccgcccgcctgctggctgccggcgccgacgacctctacgcccgcacggccgctttggccgcggatgcggtggggtcgatcggggcataatggtgctctgcgcagctgcgggtcgccgatgctagaaggtgccgatcaacaggcgcggggccggcggccccgcgcttgcttcctttttgcgaaactgcatatttcttgccgaaacaccgaaaataatgcaaatcgcgctcataatccctgcaaaagtcgtatactaatcctcgacctttaaggcggtacggagagaccgacaaggtgcgcagcatagctttcccaggataacgtgcgcctttgtccccgacgaaggcgttttttcgtatatgctgcccgagcggaaggatgattttgagcgagatagcgaacaagctcttggagggaacgtcgaagcccgcgccccggccggcggcgctcgtgctggaggacggcgcggtgttccgcggcacggcgtgcggcgcgcccggcgaggtgtacggcgagatctgcttcaacacgtcgctcgagggctacctcgaggtgataaccgacccgtcctacgccggccagataatcaccatgacgtatccgcagatcggcaactacggcgtgaaccccgatgacgcccaggcgggagagcccgcgctgcgcggcctcgtggtgcgcgacatgtgcgcggtgccgtcgaactggcgcagcgcgcagagcctgcccgactacctgcgcgagcacggcgtcgtggccgtggagggcgtggacacccgcgcgctcgtgcgccacgtgcgcgaccatggcgcccagcgcgcggtgctctcgaccgtcgacgtggacgaggcgagcctcttggcgaaggtgcgagcgagcgagcccctcgtggggcagaacctcgccgccacggtgtcgtgcgcggagccgtacgccgtgggcgcgggcgacctgcccgcgagccatgcgttcgccgtcgtgccggccgcgtccgcgcgccaccgcgtggtcgcctacgactgcggcgcgaagcgctccatcctccagaacctcgtgcgctcgggctacgagctcacggtcgtgccgtgggacacgccggcggaagaggtgctggccatggaacccgacggcgtgttcctgtcgaacggccccggtgaccccgaggccgtggagggcacgtactcccaggtggagaagttgctgggagaggtgcccgtgttcggcatctgccttgggcaccagatgatcgcgaaggccgccggcgccgggatcgagaagctcaagttcggccaccgcggcggcaaccatcccgtgatgaacctgctcacgggccgcgtggagatcacggcgcagaaccacggcttcggccttctgttccccagcctgggcgcgctcgtgccggagctctcgggcggcttcaagggccacgaggacgacctgcgcttctgggcgcgctccggcatcgcgccggtcgtggacaacgagcgcttcggccgcatccgcctcacgcacgtgaacctcaacgacggcacggccgagggcgtcgccttcctcgacatccccgcgttcagcgtgcagtaccatcccgaggcctcgcccgggcccacagacgcgcactacctgttcaccgccttcggccgcctgatggacggccgcgaggactacctggacatcgatatcgccgccgaccgcctggccggctggacgttcggcgagcaggctgccaccgtggcgggggcggaaggaggctcccatgcctaagcgcaccgacatcgacactatcctcgtcatcgggtccggccccatcgtcatcgggcaggcgtgcgagttcgactactcgggcgcgcaggcctgcaaggtgctgaaggccgacggctaccgcgtggtgctcgtgaacagcaaccccgccaccatcatgaccgacccgggcctggccgaccgcacctacgtggagcccatcacgcccgagttcgtggagcaggtcatcgccaaggagcgccccgacgcgcttttgcccacgctcggcggccagaccggcctcaacacggccgtcgacctcgcgcgtgccggcgtgctggagaagtacggcgttgagatgatcggctgcgacctggccgccatcgagcgcggcgaggaccgcaagctcttcaacgagtgcatggcggagctcggcatcgagacgtcgcgctcgggctacgcctactcccttgccgacgccgaggccatcgtggccgagctcggctaccccgtggtgctgcgcccctcgttcacgctcggcggcgcgggcggcggcatcgcgcacgatccggccgagctgcacgagatcgtgggccagggcctggagctgtcgccggccggcgaggtgctcgtggaggagagcatcgagggctggaaggaatacgagatggaggtcatgcgcgaccatgccggcaacggcatcatcgtgtgctccatcgagaacttcgacgctatgggcgtgcacacgggcgactccatcacggtggcccccgcgcagacgctctccgacgtggagtaccagcgcatgcgcgccgcgtcgctcgccatcctggagaagatcggcgtggagaccggcggctccaacgtgcagttcgccgtcaaccccgacaacgggcgcatgatcgtgatcgagatgaatccccgcgtgtcgcgctcctcggcgctcgcgtcgaaggccaccgggttccccatcgcgaaggcggcggcgaagctggccgtgggctacacgctcgacgagatcgtgaacgacatcacgaaggccaccccggcgtgcttcgagccgtcaatcgactactgcgtggtgaaggttccccgcttcgcgttcgagaagttccagggcaccgacgacacgctgtccacgcgcatgaaggccgtgggcgaggtcatggccatcggccgcacgttcgaggaggcgctcggcaaggccatgcgctcgctcgagaacggccgtgcgggcctgggcgcggacgggaaggacgcgggcctgccggacggcgaggcgttcgacgacctcgtggcgcgtcccacggccgaccgcgtgttctacctggccgaggcgctgcgccgcggctggacggtggagcgcgtgtgcgcggccaccggcatcgaccccttcttcattgcgcgcatggccgacatcgtgcgcgtgcaggagaacctgcgcggcatgcacctcgacgagctggatgccgacgcgttccgcctgctcaagcgcatgggcctctccgacgcgcagatcgcgcacctcacgggctccgacgagctcgccgtgcgcacgtgccggaagcttctgggcgtgaggccggcgttcaagaccgtcgacacctgcgcggccgagttccctagctccacggcctaccactacaaaacctacgacgccgacgagaccgaggtcgcgccgaagacgcgcaagcgcgcgatgatcctgggagccggcccgaaccgcatcggccagggcatcgagttcgactactgctgcgtgcatgcgagctacgcgcttgccgaggccggcttcgagaccatcatggtgaactgcaaccccgagaccgtgtccactgactacgacacgtccgacaagctctacttcgagccgctcacgttcgaggacgtcatggacatcgtggacgtcgagcgcccggacggcgtggtggtcacgctgggcggtcagacgccgctcaagctggcgaacgcgctcgcggaggcgggggtacccatcatggggacctcgccggaggcgatcgacctggccgaggaccgcgaccgcttcagcgccatcctcgacgagatggccatcacctacccggccgccggcatggcctccacctaccaggaggcctgcgtcgtggccgaccagatagggttccccctgctcgtgcgccccagctacgtgctgggcgggcgcggcatgggcatcgtctacgacggcgcgcagctggagaagtacatggccgaggccgcgaagatatcgcccgaccacccggtgtacctcgaccgcttcctcgagggggcggtggaggtggacctcgacgcgctctgcgacggcgaggcggtgtacgtgggcggcgtgctcgagcacatcgagatggccggcatccactcgggcgactcggcctgctgcacgccgccgttcgcgctgtcggaggcgctggtgtcgcagctgcgaagcgtcgcgcgcgacctggcgctgcgcctgggcgtggtgggcctcatcaatatccagttcgccatcaaggaccaggtcatctacatcatcgaggccaacccgcgcgccagccgcaccgtgccgttcgtgtccaaggccaccggcgtgccgctggcgaagatggccgcgcgcatcatggcgggcgagaggatcgccgacctgggcctgcctcccgacgaccggcgcctcgagcactacagcgtgaaggaggccgtcatgcccttcggccgcttccccggcgcggacacggtgctcggccccgagatgaagtccaccggcgaggtcatgggcatcgccggcaacttcccggccgcgttcgcgaagacgcagctggccatcagctacgcgctgcccgagggcggcaccgtgttcatcagcgtgtgcgaccgcgacaagcgcgccatcgtgtccatcgcgcgcgacatcgtgcgcctgggcttcaaggtggtggccacgggaggcacggcccgcgccctgcgcgcggcgggcgtggactgcgaggaagtgaagaaggtgcacgagggcgcccccaacgtgctcgaccgcatcgccgccggcgagatagcgctcatgatcaacacgccgttcggccatgccacgcgcgccgacggctacgagctgcgcctcgaggccgtgaagcacggcgtgacccacgtcacgaacctggccggcgcccaggccatggttgccggcatggagatggcccgcgcgaacggcctgtccgtcgtggccctgcaagacctgccccagtgggggtagggagacgcggatgacctagtgccggcagcttcgctcgtcagcagctgccggcaccacgcatggagcttgccatacagcacgatcggtgataagatatctataaagatatctttagaaaggtgcgtggatgtcaaggatcgccgacaaggtaacgcagctttgcgcctggggcacgtcgcgtgccgtccgcattcccaaggacatgtgcgagcgcatggggatcgatgtgggcgcgcgcttgacgatgagcctcggacatgacgagcgcggctcgttcatgctcgttcgtcccgaggaagccgagcatcgcgcctatcgagatatcccctatgtttccatggacgagctttttgcgggatacacgggggactaccaaccaggggaatgcgattggggcaaggacttgggcgccgaggtgattccgtgatcctcgagcaaggcgatgtcatcatggtcgatttcaacccgtcgatcggccatgagccggcaaagatccgtccagctgttgtggtgagcggttacggtttcaattcgcgtgcgaacctggttgccgtcgtgccgacaaccaccaaggacaacgggtacccgcttcatttgcctgcgaagtgctcagggcgctcaataggcttcgcctgcgtggagttgttgcggaccatagacgtaaggcaacgcgggtacgagtacttcggatgcgcagacgatgaaaccgtgcgctctatcctcgcttccattcggggaatgctggagctgcgttaatccttagctgttcaggaactccgcgagcaggcggtcggggtcttccaggaagcggtggagggcgtcccattccatggtctgctcgaggcttacgcggcgcacctcgtcctcgaactggtagatgaccgcccccggcgccgagagcaggatgggggagtgcgtggccacgaccagctgcgaccccgcgttggccagccgcacgatctcggccagaagcgccacctgccccagctgcgagagccccgtctcgggctcgtcgagcacgtagaagccttcgccgccgaagcggcgcgacacgagcgcgaggatgccctcgccgtgcgagcgggcgtgcagcgaccgtccgccgaagtagcgttggtcgtcctcgagcgcgtccatctccgatatgagattgaacagcgtgtcggagcgcacgaggaagctgtcgcgcggccggcagatgcccttgagcaggcgcacgtggtcgcagagctcagaatggccgtcgtgcacggagaacgtgtagttgcgcgagccgccctcggggttgaggccgtaggcgatgcccatcgcctccagcagcgtcgacttgcccgtgccgttctcgccgcagaagaacgtgatgggctgtcccaggtcgagcgcccgcaggctcgcgatggccggcacgttgaacggatagacgcccttgtcgggaacgtccgcccagtcgatggcgagcgaggtgacgaagacgttgtcgcgcatggcgtgctcctctcatccgcttatgtcttttcgcaaatgctactatagctccaaaagcgccatctcgcatgacgcgcggataggcgggaggatagggaatgagcggcatcgaagttgaacggctcgcagcggacgatgatctggcagcggtggcgcgcgtgtacgtgcgcagctggcggcacgcctactggggcatcgtgccgcaggactttctcgacacgctgtctgaagggttctggcagctgggccttgagcagagcgtcgatcgcacgttcgtcgcccgcgaaggcggcgagatagtcggcgtgtgcacctacgggcccgcccgcgtcgaggcgttcgcgggatggggcgaggtcgtgtcgctctacgtgcaaccggagcgcatggggcgcggcatcggctcgaagctgctcggtgcggcgctcgaggcgctcgcaaccgagggcttcgaggacgcctatctctgggtgctcgccgacaacgcgtccgcgcgcgccttctacgagaagcgcgggttccagctgatcgagcgcgagaacgccgtcgaaatcgcgggcgagcgcctgctcgaggcctgctatgcgaaggcgctcgactgagcagccgctcctgcgcgtcacgacgcgtgcggctcgtctacgcgcttcatcaggtaggcggccacctcggggaagtcgcgcacgacgcgcatgagcgtgtcggcggtgcggttctggaacaccgagcccctctcccagcgcacgactgtcttcggccccgctccgatgagcttctcgaacttggcctgcgagagtcccagggcctgccggagctccctcacctcgtcgcccgagagcagcccgttgtcgcgcttgtactggtcgaccgcgcgccggtggatgatgccatccatccctccttcgaggtagatttcgccgcagctggcgcacaggcagtagtcggcatcgtctacgacgatctgctcgcctttgacgtcccactcgatcggtccatggatatccatgatcttgccgccacacactgggcactttgtcatcattaccatgcgcaaccccattccttgcacgacatgagcatgacggtagctacgtcgccttcgacgatgaacttcacgtataagcagacggagacgccatcttcattgtagtcgcagcaatacacgtccgcccaagagccgtcgtcgcgtctcgacttgagcgatttcacgaactctttttcctgaagggaaaggattatgcgtcgcgcgaggattgggctgaaaccgtggtttcgcagccaggacgtgctcttcttcgaagcgctgtaccggccctcccggaccaaccgtttcacctctgcgaggtcgtagcgcggctccttccctttcatggtagcaccttgctaccatctgcagtatacggaacgggcacgcgaattgcaagagggctgggcatgtcgccacctccctgtcgaagcacggctgtccccgagagggttaggaggtcgctccagccaccaatagaacttatgtacgtattgtaatatgattcgaacgataagggaacatatgtttgtgcatactatttgaattcgaatgcggacatacgcagcggacgacggggcttgctacacttggttcgtctcattgtttcatatgattccctgacgagggcagccgtaccaggatcgcaaagacggcgcgttgcttcacggaagggagtcttctcatggcatggatcgttctggtggcttcgggcgtcttggaggcggtgtgggccaccgcgctcggacgggcggaggggttcaccaaactcgccccgtccctcgtgttcctcgtcgcgctcgtcatgagcatggcggggttgtcgtacgcggtcaaatcgctgcccacgggcacggcgtacgccgtctgggtgggcatcggcgcctcgctcacggtcgtctacggcatgctctcgggaaccgagcccgtatcggtggcgaaggtgctgctcatagcaggcctcatcgcgtgcgtcgtcggtctgaagctcgttcacgacgcgggatgacatcgggcgatcctccgcattcccgtccctgcgcgggcatcctcctttatactgaagcgaaaggcgtgccacaccacgacgagcgaggagattcgccttatggacgacgagctgacgttctcaacccgcgacgagttcagggcgtggttaggcgataacggcgaggcgagcggcggcgtgtggctcgtgttcggcaagtccggcggcccgaagacgctcaaggcgtccgaggcgctggaggaggcgctctgcttcggctggatcgacgggcgcatgcagcgcatcgacgacgcgtcctaccgcaagtacttcgccccgcgccgcgcgaagagcgtgtggtctgaaaagaacaaagcgcttgcgcgcgagctcgagcggcgcggcctcatggccgacgcgggcaagcgcgccatcgaggcggctaagcgcaacggcagctgggacgcgaagaaggccccggacgtcaccgaggaggacacggcggccctcgaggcgatcatagccggccacgagcctgcggcctcgaacttccgcgccatgtcgccgtcggtgcggcgcacctacacgcgcgcgtacttcgacgccaagaccgacgccggccgcgagaagcgcctcgcctggatgctcgaccgcctcgagcgcaacctgaagcccatgtagcagggccgcgccttcatcgcgcgccctccttcaggaactccacgatctcgcactcctgctcggcggtgaaggcgcccatgtgggcgcggcctctcatgaggcggcacgtgacgttcgggatgatggcctcggcctgcgggaggacgcgcgcggcggggaagaggcggtcggcgtcgctcgccatcacgagcgtcggcgccgtgcaggcggccatgcgctcggggtcgacgtcggtgggcatgccggccttcaccttcgcatggtcgatggtggccctcgccgtagccagcgtctcggcgtcgatgacgtcgggcgcgccggccatgggcaggagcgtcttcacgaaccactcctcccggcgcgtgaacaaatgcatgaccattggccccatcatgctcatcgagtgccacaccggcgcgttcttgatgccggagggaacgaacagcaccgcgcgctccaccttctcgggtgcggcgcacatgagcttcgccaggatgcccgcgccgaacgaaccgccgatgcagcgcatgcgcgcgaaccccaaggcgtcgatcacctgcgcggcccattcgccgtacgcgtagccggaaggcggcaggcacgtctcatcgcttttgccggggtggccgatggtgtccaccgcgagcacgcggaagtcgccgcgcagcaggaggggggacgtgatgaggttgtgcgctgtcgtggagttgccgccgtggaacgagagcagcgggaccgcctccgggtcgccggtgaccaccacgtgcgtgcgcccgaacgccgtgtccacgtagacgtcctcgaatggacagccgatgcgggagagctgctcgtcgtacaggtcgaggacggctcgcttgccctcggcgctcttgtagagggatttcacggcgctcacgcctccttcgacttagccctcggagggcgggcggccccgcgcttgacggtcacgtccagcgccgcgagcgcgtccagcacttcatgggcggcagcgtctgcctgggctgcgtccaagccgcgctcatccaccacctcgcgcacggccgccgcgtagtcgcgcttttgccgctcgttcagctcggtccagtccacgtgggcgaacccctcggccatatcgttgtcgaagggcagccgtccctgcgccatgagcacggcgatgacggggtagcccgcgtagccctgccagtaggtggcgttgtcgttcgaggagtaggttccgccgtcctcgctccacgtcaccgtgtacgccttcgcgccgttcgacgaggccaccgtcgcgcgccgatcctcgccgtcgagcgacacgcgcccgtctgccagcgcgctccacgcctcgaataccttcgccaaaggcggcatcttctccatcatcgctcccgttctcgcgtcgcctgtcgatggcagtatacccctcggcttagcgatccggccaagccgatggtagattggcaagccgattcgcccgacgagagggaagggcaccgcctcgaacggaacgtgaaggttgccgtcatcggatacgcaggttctggaaaatccacgttcgcccgcaggctgggcgatgcgctctgcattccggtgcagcatctcgaccaggtgttctacacttcaaattggcaggagcgtgacaaaggggaggcgcggaaccttgccgaggcgttcctcgacgccaacgacgcctgggtcgttgatgggacttatcatagactctctcttgcgcgtaggctagaggcggcggacgtcatcgtgatcttcgcttctccacgtcgcacctgcctgcttcaagcgtggcgtcgctcccgccgctatgcgcatcgcgttcgccccgatatggctgacggctgcattgagcggctcgacgcggagttcgttctttggctggtttggaaaggtcgcacgcgatcgcgtcgaaagcgttttgaggagatctgccgcgattatgcggaaaaagcggtcgtcgtgaagagccgcggcgagtcggaacagcttttccgttgcctcgccgaatcgacgtcttcgaaccgagcctgcgaaacgagccgggaacccatggtcttttccttggcatttcggcctgtcagatgcgtgcgggcccgcgcagatgctacaatcggccaccgagagacgaagacgcgtcgcaggcggcaggccggcggcgacggatcgaaaggcaataacgtggcactcgtcaacgagcgggcgcgcatcctcgccaacggggaagtcggccccaacctatacctcatggagctcgcctccccgcacatcgcggcggccatcgagccggggcagttcgtgcacatgaaggtgccgaacatggaggcgcacatcctgcgccgcccgttctcggtgtacgcgcgcgacgcggccgcgggaacgctcgagatcctctaccaggccgtgggcttcggcaccgaccacatgacccgcatcgagcccgagcgggccgagcacctctcgggcgcggagcttatcggcccggtggggcgcgcctggcagccgcccgcggacgcccgccgcgctctgctcgtgggcggcggcgtgggtgcggccccgctcttcatgctgtgcgagcagctggtcggcgcgggggtgcgcaccgacgtcgtgctgggcgcgcagaccgaggccgcgctcacctgccgcgcgcgctacgaggcgctgctcgacgagcccccgcgctgcgccaccgacgacggcagcttcgggcgcgagggcttctgcacctcgctcgtggaggaggctctggcggaagcggcggccgcaggggagccctacggctacctggccgtgtgcggccccgagcccctcatgaagatcgtggccggcatggccgcggaggccggcgtgccctgcgaggcgtcgatggagaagcgcatggcgtgcggcgtcggagcctgcctgtcgtgcgtggtggacacggtggacggcaagaagcgggcctgcgtcgacggcccggtgttcgatgcgcggaaggtggtgtggtagatggcgacgatgggcgcgggtccgcgcacgacggcccccgcaagcgtgcgcatggccgtgaacctgggcggcctggagatgaagaacccggtcacggtggcgtcgggcacgttcgccgccgggcgcgagtacggcgacttcgtggacgtggccagcctgggcgcggtcaccacgaagggcgtgtccctgaacggctgggagggcaacgcgacgccgcgcatcgccgagacgccctcgggcatgctcaactccatcggcctgcagaaccccggcgtcgcgcacctgaaagcgcacgacctgccgtggctcgccgagcgcggcgcgacgacgatcgtgaacgtgtcgggccacagcttcgacgagtacgtgcaggtgatagaggcgctcgaggacgcgccggtggacgcctacgaggtgaacatatcgtgtccgaacgtggacgcgggcggcatgaccatcggctgccagacggacagcgtcgaggccgtcgtgtcccgctgccgcgccgccacgaagcggccgctcatcgtgaagctcacgcccaacgtcaccgacgtgaccgagatcgcccgcgcggccgtgtccgccggggccgacgccctctcgctcatcaacacgctgctcggcatggccgtcgacgcggagcgccgccgtcccgtgctcgcgcgcggcgtgggcgggctctccggcccggccgtcaagcccgtggcgctgcgcatggtgtgggaggtgcacaaggccgtggacgtgccgctgctcggcatgggcggcatctcgtgcgcgaccgacgccgtggagttcatgctggccggggccacggcggtggccgtcggcaccgcgaatttcgtgaatccgcacgccacggttgaaatcatcgacggaatggcgcagtattgcgagaggcacggcgtggaagacgtgcaggagctgataggagcgttggaatggtgaattcgttcgaggaggtccccgcgcgcgaccgcgtgatcgtggcgctcgactgcggcatcgaggaggccttcgaccttgccgaccagctgcagggcaaggccacgtggatgaaggtgggcatgacgctgttctacgcgaacggcccggccatcgtctacgcgctcaaggagcgcggcttcaaggtgttcctcgacctcaagttccacgacatcccgcaccaggtggagggcgccgccttcgccgcagccggcagcggggccgacatgctcaccatgcacacggtaggcggcgtggacatgatggccgccgcccagaagggcgcggagcgcgcggcggccgagtacggccacgacgtgccggccaccctcggcatcacggtgctcaccagcatgaacgacgcggcgctggccgagacgggcgtttcccgcgccatggccgaccaggtggtcgtgctcgccgagcaggccaagcgcgccggcatctccggcgtggtggcctcgccgcaggaggcagcgcgcctgcgcgagatcctgggcccggacgcctacatcgtcacgcccggcgtgcgccctgcaggcagcgcgaagggcgaccagagccgcgtggccacgccggccgaggccttcgccaacggcgcgtcgcatatcgtggtgggccgccccatcacgcaggccgacgatccggcggccgccttcgaggccatcgcggccgagctgtagagccgttcgcgcacgatggcgggggagcggtttaccccgttcgacctcggcaggcgaccgttcgtaacggttgtgcgacgaaacgggtccggtgcacgggcctgctcctacaatgtgtggcatcgcgcgggaattttttgtaattacggcgattgacaaggcaagacggacaaaggcgtgatagtatcacggaatcgcttttgaacaagaaggagagatacacgatggctattcctcaactcagcccggaagaacgtcaggcggctctggagaaggcgaaggcggcccgcatcaagcgcgccgaggttcgtgacgagctgaagagcggcaagctcaccttggcgaaggttctcgagatgaagaacgatcccgtggtcggccgcatgaaggtttccacgcttatcgagaccatgccgggctacggcaaggccaaagccgagaagatcatgaaggaactgcagatcgccgagagccgccgcctgcgcggtttgggcgagcgccagcagaccgctttgctggagcgtttgggctaaacgctgcatgcgacacggtaatctgttcgttatctctgggccatcaggtgccggcaagggcacgctggtggcccgtctgttgcgcgaggtgcccgatgcctgggtgtcgcgttccgttacgacgcgcgctccgcgcgagggcgaggtggacggcgtccattaccaattcgcgtcggacgaggagttccaggatctcgtggacaccgacgggctcttggaatgggcgacctacgcgggcaaccgttacggcacgccccgcgcgaccgtcgaggagcacatggcctgcggagagcaggtcgtcctcgagatcgacgtgcagggcgccttccaggtgcgcgagaagatgcccgctgcccgtctcgtgttcatcgagccgccgtcgcttcgggtgctcgaggagcgcctgcgtggacgcggcaccgagggcgacgaggtgatcgaggcgcgcatgaaggcggccgaggtggagctttcgcacaaaatggagtatgatatgtggctggtaaacgacaaccttgacgaagcgaccgatgccctggtgcgctacgtcaacgagcaagccgagaaagcacgaggttaaacgctctatgagtatcatcgaacccaagatcgacgtactgctggacaggaccgacaacgaccgcttcctgctgtgcgccctcgcttcgaagcgtgcgcacgacatcaacgacatgatgcgcggccagcgcgatcgcgccatccagctgcagacggcggtcgagatcgcccgcgcggccgacaagaagccgctgtcgctcgcgttcaacgagatcgcccgcggcgaagtttcgtacgacccgaactccatcgacatcaagaaccattagggttccgccggcctaccggccggcggaacgcgtcgacgccgcaaagccctgaggcatccggccttgccgcttttgcgcttgccctcacgtgcggaagcacgctcggccgcgcaacgcggcaattccgaatacctcagggcttttcgctgacttactacgccaaccggcgcgcttgttttcgcgcttcgcgcgaatcgggcgacctgcacgcgcggcgtctgcgctcgcgcgaaccgttcgaacctgcgaacccgggggactcccatgactgacttccaacgcatcatcctcgtccactaccacgagatcggcctcaaggggcacaaccgcgcctcgttcgagacgcggcttctgaagaacctcgaggcgctgctcgcgccgttccccgtggtcacgatccatcgcatctcggggaggctgtgcgtgttcctgcgcgagggcaccgactgggacacggccgtcgcggcgtccgaggtcgcggggcgcgtgccgggcgtggcacgcgtgtcgagcggcttcaagtgcgagcgcgacctggacgagatggcccgcgcggccgtgctcgcgctctcggaggcgggcgagttctccacgttcaaggtggcggcgcggcgcaaccatacggacttcgccaccgggtcgatggagatgaacaagatcatcggcggcgcgctgtgcgaggcgtatcccgacaagggcgtgcgcatgaagaaccccgacgtcacggtgggggtcgaggtcgtgcagaacgcgtcgtacgtctacgcgcgctccgtgccgggcgtcggagggctgccggtgggcagctcgggcaaggtggtgtgcctgctgtcgagcggcatcgactcgccggtggccacgtggaagctggcgcgtcgcggcgcggtatgcatcggcgtgcacttctccgggcgcccgcagacctcggatgcgagcgagtatttggtggacgacatcgcgcgcgtgctggagcgcacgggctgcatcgcgcgcgtctacacggtgccgttcggcgactaccagcgcgagatagcgctcacggtgccgcccgagctgcgcgtcatcatgtaccgccgcctcatgttcaaggtggccgaggcgctggccgcgcgtgagcgcgccggggcgctcgtgacgggggagagcctggggcaggtggcatcgcagacgctcgacaacatccgcgccacggacgacgcggtggacctgcccgtgttccgcccgctcatcggcacggacaagctggagatcatcggcgaggcgcagcgcctgggctcctacgagatatcgtcgcaggacgcgcccgactgctgcacgctgttcatgccccgcagccccgagacccatgcgaagctcccggttgtgcgcgaggccgaggccgcgctgcccgtggagcgctgggtggccgagctggtggaagccgccgaggtgcgcgactacgcctgtcccgcctacaagccgagggcccgtcgagacgcggccggcgcgaggcaagggggcaccggggatcctgcgcgcgcctgacgcagagggcgggtatcgaggaggaggctgtggcttttcggtgacggctttccgtcggttccttccggaatcccctttccgcgcattctgaacggtcaggcgccgggcgccccgctttgccatgtccggacgacgccctaaggcgatcgatttcaccccttccgaatttatccctcctttttgctgcatctgcgttggaaacgtgcaagcttctgccggttgccgtgctggatcggcataagatccgcgtcaaccccgcatggtgcttccgacggttcccgtgcaaggtcgcggcgctatgatcgaaaggcgggcgaagggcgccgccgtctaactcgggcggccccttcctgctcgcatccggtcgaggaagggaggggtcatgtcgttccagcggagcgcgcagtcgtggcgggcgcggctgcacctgtcgggcgcgcgcctgcccgtgctggtgggcgtgacggccgtggccatcgtcgtcatggcctgcgctggcaagctgctgctcgacgccgcgtcgtcggagggcttcgcggtcgtgcagccgggcggtgcggagcaggcggccggcgacggggatgccgatgctgcggccgaagcgggcgctccgcaggccgctcccgcgcctctgcgcgtgcacgtgggcggcgcggtggccgcgcccggcgtgtacgacctggccgagggcgcgcgggtgctcgacgccgtggaggccgcgggcggcttcgccgagggggcggcgcgcgacgcgctcaatctggcgcgcaccgtgtccgacggcgagcaggtggtcgtgccgagcgaggcggacatcgccgcgcaggaggcagcgtcggcgggggtgggcggcgtgtcggcgggcgcgggcgcctccgctccgaccggcggcgcgagcgggaaggtcaacatcaacaccgcctcggccgcccagctggacacgctccccggcgtgggcgcctccacggcagagaagatcgtcgccgaccgcgaggccaacggccccttcaagacggtcgaggacctgaagcgcgtctccggcatcggcgacaagaagttcgcggcgctcgcggacgcgatctgtgtcggctgacccatgtcgccgcgccccgcgcctccgctgcccccgcgtccggccctgcctccggtgctcgcgtgcggcttgggcctttgggcgtcctgcgccgccgtgtactccgccgcgcagtcctggggggcgggcgcgtgcgtcgccgtgggcgcctcgacgctcgcagctgcggcgcttgccgccgtcgcgctgctgcgctgcaggcgcggcacgctcgcgcggtgcgccctgctgggcgtgctcatcggagccgcgtgcggctgcggggccggggcgtccttgcatgtcgcctggcaggaggctgccggcgaggcgccggcgcggttgcgcttcgaggcggtggaggatgcggatgcgggcctctacggagcccagtgcgtcgcgcgcacgcgtctggcgtcggggcgatcggtggacgtgcggctgcgcttcgccgacggtgcggacgtgccgcgctacggcgacgtgttcgaggcagatgcgtcgctggccgctcccggcgagcgctcggaagcctggtgctggcaacgcggcatcgctgccgtcgcgaccgtccgccaggctttcctggtcgagcgccacgatgcgttcggggcgctgctgggcgtcagggcgcgcgccctggaggctatcggccgtctggacggcgacggcggcgccgtgctgcaggcgctcgtctgcggcgcgcgcggcgccttggacgaaggggacgtctacgccgccttcaagacctccgggctcgcgcatctcgtggcggtgtcgggcgcccatctcgtcatggtgtgcgcgttcgccggcgccgcgctcaaagcgctgcgtgcgccgcgcggcgtggccgtgggcgtgcaggcggcgcttctcggatgctacctcgtgctgtcggccatgccgatatcggccgttcgcgcggcgctcatgacgctcgcgggcacgacgtcgttcttcgcgcggcggcgtccggccagcctgaactctgtgggcctgtgcatcgccggcgtcgtggccgcctgccctgcagccgcgctctcggcgtcgttcgcgctctcggtgctctccacgctgggcatcgtgctgttcgcggggctcgcctccgcctggatcggccgcctggcgccgcgcctgccgcgcttcgctgccgaggccctcgcgctcacggccgcctcgagcgtgctcgcgcagccgctgtcggccgccttgttctcgcaggcgccgctcgtctccccgctggcgaacgtgctggcggcgcccctctttccgctcgcctgcgccggcgggctcgttggcgcggtcgcgtccctggccgcgccgccggccggcgcctccctgctggcgctcgctgcgctcgcctccgaggcgctctgcgccgccgcccgcgcctgtgcgtcgctgccctgcgcgagcgtgcccgtcgacctgcccatcgtgccggcccttgccggcgcggccgtcctggctgccgtgctctgggtgctctggcccgcgccgagcccgcgcgccgccgcgctcgccgccgcgggcgcgctggcggccgccctcgcgttcgtggtcgtcgtcccgcggctcgccggcgacgagatcgtcatgctcgatgtggggcagggcgatgcgttcgtcgtccgcagcggcggggccgccgtgctcgttgacacgggcaaccaggagcgccttctgcgcgaggcgctcgcgcgacatgccgtgttccgcctggatgccgtggtggtcactcacggcgacgacgaccatatgggcgcgctcgcctccctcaagggcgtggtgcaggtcgatcgcgtgctcgtggccgccgatgcgctcgcctgctcctgcgatgcctgcgctcgcctgcgcggcgatgcggcgacgcttgtgggagaaggggccgtccaggggctcgcgcagggcgacggcctgcgcgtgggtgccttcgacctcgaggtggtgtggcccgcccgcttcgccgacgagggcggcaacgccgacagcctgtgcctgctggcgcgcgccggcgccgacggcgacggggcgcccgactggacggcgctcttcgccggcgacgcggagcacgagcagctggccgctttggaggggcagggcctcgtcggccgcgtggacgtgctcaaggtaggccaccacggctcgaagaacgcgctcacgccggagctggcagccgcgctctccccgcgcatcgcgctggtgagcgtgggggcggggaaccgctacggccatcccgccgacaagacgctgagggagttggccgacgccggggcgcaggtgtggcgtaccgacgaggcgggggatgtttcatgcaaatccaccgcgcagggcatcgcggtcgcggcgctgcggtagaatgcggggcatgccgacgaacaagaaacaagaagcgccgcttttgcccgtctacctaatcgtgggggaggacgcgctcaagcgcgacaccgtgatgaagcgcctgcgcgcccgcctggccgcgctgggcgatctgtcgttcaatgccgacgagttcaatggagagactgccctcggcggcgacatcgtggcggcctgcaacaccgtgccgttcgccagctccgtgcgcctcgtggaggtgcgcggggccgacaagctgaagaaggcggacgccgaggccctcgtgtcgtacctgtcatcgccgagcgagtccaccgtgctcgctctcgttgccgagaagctggcgaagaacacgcgcctgcacaaggccgtggccgcccacggcaagacggccgtcatcgactgcgccccgctcaagcgcaacgagctgccgaagacggtgcgggccatggccgtgggccacggcgtcacgctcacggagggggctgcgcgcgcactggtggatctggtaggcgagaacaccgtccatctggacagcgagctcaagaagatcgcgctggcgcaccgcgggaccgatgcggtgaacgagcatgagatcatggggctggtggcgcggacggccgaagtaaagccctgggagttcgtggacgcattcgccgcccgcgacgtccgcaagtgcttgcttttgctgggacgcatggagtccgtgtcgccccacgccctgctggccatgtgcacgacgcgcctgcgcgagctcgtgtgcgcccgcgccctggccgaccgcggcaacccgcgcggcgtggccgccgccctcaagatgcccgactggcgctgcaagagccacgccgcctgggcccgcggcttcaccgccgccgagctgcgccatgccatcgtctcggcacgcgacaccgagcgcgccatgaagagcggcgcggatgcgcaggccgccttcctcgactgggtgctggaggtaacggcggggaggtagggaaggcgcgcggcatccctcaagagcgcggagggcgtgcgtgactcgcgatgcgcgcccgtgccggttcgcgacgcatgcggcgcgcgaatcgcgccatccgacgtccagccctctgcttcgccgcgccatggaaaaggccgccgtccgttccgccccgcatccgcgaacgcaccggggatttcgatccccaaataccgaggaagcccccgtttcaccgggagcttcctcttccttgatatgcggacggatcgcgggcgatcctggtgcatcgagcctattcggcggcctcttcggcagcggcggcctcggcctcggccttggcggcctcctcggcttccttggccttgcgcttctgggcggcggcctcttccttcagcgtcttctcgcggcgcttcgccttctcgtcggaggcggccttcatggctgccaggcgctcggccttggccgcggccttcttggagccggtcttctgctgctccttcttggccggcttcacgtaggcggcgcggtcggcgtcggtcacgacatccttgatgagcagcatgatgccgctcttgcggttcgcggcctggttcttgtggatgacgcccttcgaggcggcacggtccatgagacggcaggcggcgagcgcggcggcgtaggcctcggcgccgttgccggcggccacggcgtccttcacgcggcgggtcgcggtcttgagctcgctcttcaccgcgcggttgcgcatgcgggacttctcgttggtgatgatgcgcttcttctggcttttgatgttcgccatgtggttcgttcctccaaaaaaatcgtttgccttgtcttgcgatacgaatcgcgctgcgcctccagcgatacgggcgggcgatgccctccgcgtggccgcaaggtggccgattgcctcgcaacaaggccccggaggagcctcccgcgccaggcgcgggcgttggcgatgcgatggaaacaggcgggatttctctgtttcgcagaccaatcggtcaccagcgaggacgaatccgtaatgcagccacgtctgcagatttggcgataagatcatcgcacgcacgtatcgctggatacacaatgcgatagaataccaaacgttgaccctgttttcatggggaaattcccgaaaacacgtttttcgcccgtgcaccgcccgaagaagaaagctactatgaccaccgatccgaacctcatccgcaacttctccatcatcgcgcacatcgaccacggcaagtccacgctctcggaccgcatcctggagctcacgggcaccgtggcgcagcgcgacatgcaggagcagctgctcgacaccatggacatcgagcgcgagcgcggcatcaccatcaagagccaggccgtgcgcgtggactacacggccgacgacggccagacctaccagttcaacctcatcgacacgccgggccacgtggacttcacctacgaggtgagccgcagcctggccgcatgcgagggcgccgtgctcgtggtggacgccacgcagggcgtcgaggcgcagacggtggccaacgccatgatggccatgaacgcgaacctggagatcatcccgctcatcaacaagatcgacctgcccgccgccgagcccgaccgcgtacgcgaggagatagaggagggcctcgccatccccgccgacgacgcggtgctcgcctccggcaagaccggcgcgggcgtgcacgatctgctcgaggccgtggtgtacaacatccccgcgcccgagggcgatccgggcgcgccgctgcgcgcgctcatcttcgactcgtacttcgacccctaccgcggcgtggtggcgctcatccgcgtggtggacggctcgctcaagaagggcgataaggtgcttatgatggccaccggcaccgaggtgctcgtggaggaggtaggcgcgcgccgcccggcggagacggccatgcccgagctctcggtgggcgaggtgggctacctggtcacgggcctcaaggacgtgcgccaggtgaaggtgggcgacacgatcaccgccgtgcgcggcggcgtggaggagccgctgcccggctaccgcgacgccaagcccatggtgttcaccggcctgttccccatcgacggcgaccagtacgagccgctcaaggaggcgctggagaagctctcgctcaacgacccggcgctcgcctgggagccggagaagtcccatgcgctcggcttcggcttccgcgtgggcttcctcggccttctgcacatggaggtcatcaaggagcgcctcgagcgcgagttcggcctggacctgctggccacggcgccctccgtggagtaccacgtgtaccgcgccggcggcgagatgatcagcctgcactcgccccaggagatgcccgaccccggcgagatcgagcgcatcgaggagccctacctcaaggcgaagatactcatcccgcccgactacgtgggcgccgtcatggagctcaccacggcgcggcgcggcacgttcgtcaccatgaactacctctcgcccaccacggtggagatgatctgggagataccgctgtcggagctcatcatggactacttcgacaagctcaagtccaacacgaagggctacgcgagcctcgactacgacttcgacggctacaagccctccaagctggtgaagctggacatcctgctgtccggcaagccggtggacgcgctgtcgttcatcatccacaaggacaaggcctacgaccgcggccgcgtgctcaccgagaagctgcgcggcatcatcccgcgccagatgttcgaggtgcccatccaggccgccatcggcgggcgcgtgctggcgcgcgagacggtgaaggcgaagcgcaaggacgtgctggcgaagtgctacggcggcgacatcagccgcaagcgcaagctcctggagaagcagaaggccggcaagaagcgcatgaagaacatcggcaacgtggaagtgccgcaggaggcgttcatggccattttgaaggtggacgattagcctatggatcgagctgttctcgcaatctgcatcatcgccatcgcagtcctttctgcgctcgcggtgcatctgttttacaggcagcggggcaaggcgctccccaacgacctgggcagtttggacgatgagggctggggcttgctgaagcgccgtgtagtcggctcggtggctttggcggccgttgctgtgttggtaggcttcgtgttggcaagggttctctgagcaacggcattggtggttcggggcggcgtccccgctttgcgactgataggtgcgagaacatgggcaagaacgaagagttcgactggttggacgatccgttcgacgagaagaaggccgcgcgcgagcaggtgcgggcctccacgtcgggcggcacgaaaatggcgctcggctgcggctgcctgctggccgtggcgggcgtcgtggtgctgctggtattcgcaggcgtcagcatgatcgacctgctggctgcctagcgccgggacgtgcatgcgcccggccgtcctcgaaccgacatgagaaggaggaacccggtgagaacgaacccggtcatagagaacatcctgtcccgccgttccgtgcgcgcgtttcgggacgagcccgtcgcgcgcgaggacctggaggccatcgttgcatgcgggcagtgggcgccctcggcgatgaaccgccaggagtggacgttcgtggtggttggcgaccgcgaacgcgtcgcgcgcctggccgaggtaatccgcgtcgcgctcgctcgcgacgcctacgacatgtacggccccgcggccatcgtgatcgtggcgcacgagaagggcgccccgttcggccgcgaggacgacggctgcgcgatgcagggcatgatgctggccgcccacagcctgggcctgggcagcgtgtggatcaaccagctgcagggcatctgcgacgagcccgccgtgcgcgcggagctcgacgcgctcggcgtgccggccacggccgaggtgcatggcgtgtgcgccctcggccacgccgccgccgagggaacggcgcacgaccgcaagagccgcgtggtgtgggcgtagcgcgccggctgccatcccggcccggggcgggcgcgacggcgaagccggaaggctgcacgcagcgctttctcgcgacgcctgcgcgcgtccaacgtgggcgctcgggccgcggcgacgaagccgggagcatgccgcgcccgaacgcccttcctgccaaaaaacgcgcggtttggcaatcggaaagcgcgtttcggagcgtgctcgccacgggttgccgctataatcccaggtcggcgtttttcaccgctcgaccgtaattgccaaaccgcgcgttttttgacctgtcgtgacgaaaacgcgtgcaaaggaagcaggatatgcacgagttcttccaaaaccaccgcctccttctcgcgcccatggcgggcgtgagcgacgaggcgttccgggcgctctgtcgcgaacagggggccgaccttacctacaccgagatggtgtcggcgaaggggctctcgtatgcgaatgagaagacccggcgcctgcttgccctcgcgcccggcgaggaccaggtggccgtgcagctgttcggccacgagccggacaccatggccgcgcaggccgcctggatcgaggacgagatgggggagtcgctggcgtacctggacgtcaacatgggctgccctgcgcgcaagatcgtgtcgaagggcgacggctcggcgctcatgcgcgagcccgccctggccgccgccatcgtgcgcgccgtgcgcgcggccgtgtcgcatcccgtgacggcgaagttccgccgcggctgggccctgggcgaggagacggcgccggacttcgcgcgtcgcatggaggatgcgggcgcgtgcgccgtcgcggtgcacggccgcttcgccgagcagctctaccgcggcagcgccgactggggcgtcgtcgcgcgcgtgaaggaggctgtggacgtgcccgtcatcggcaacggcgacgtgcgcacgggcgccgatgccgtggcgctcacggtgcgcaccggctgcgacgcggtgatgatcgcccgcggcgccgagggcaacccctgggtgttcgcccaggccaaggccgctcttgagggcgtgcccgagccgctggcccccgatgcccgcgagcgcatcgccatggcgcgccgccacgcgcgcctgctcgcgcggcgcgaggggaagaacatcgtgcgcatgcgcaagcacgccatgtggtacctggcgggcctgccgggcgccgccgcggcgcgcgcgaagatcaacgcctgcgtgtccgtggaggacttcgaccgcgtgttcgacgagctgctcgcctttttgggcgagcatgaacaggagggctagaccatgccgcacgacccttaccgcgccctgtacctccacctgccgttctgcgtgaggcggtgcgggtactgcgacttcgccacgtctgcggtgccgggcgacgcgccggagatcgacgcgtacgtggaggacctctgcctgcagctacgccgcaaggcgaaggagggcgagctcggcgcgctcgagacggtgtacgtgggcggcgggacgccgagccatatcggcctggcgcgtctgtccatgctgctgtacacgctgtcgctgtcgatgcacctcacgcccgaggtggagtgcacgatggaggcgaaccccgagagcctgatggagcgcatggtgcgcgacgtgtgggcgctcggcgtgaaccgcctgtccatcggcgtgcagagcttcgacgacgaggtgctggccgtgctcgggcgcgcccattcggccgacgacgcgcgccgcgccatcgaggcggcgcatacgcgcttcgagaacgtgagcgtggacctcatgtgcggcatccccggccagagcgccgggagcttcgaggcgagcgtgcacgaggcggcggcgctcggtgcggcgcatgtgagcgtgtacccgctgaccatcgaggcacacacccccttcgatgccgccgtgctcgccggcgagctggaagagcccgacgacgacgtggaggccgcgcacatggagatcgccgcgcgcgtgctggccgaggccggctacgagcgctacgaggtggcgagctacgcccgccccggcttcgcgtgccgccacaacatcgcgtactggacgggcgtgccgtacctggggctcggccgctcggcggccacgatgacccagaacgcggagcgccgcatgcgcgtgcaggacgggcgggtgaccgacgacctggacgcgcgcggcatggccgccgaggacctcatgctgggcatgcgcatgacctgcggcgtgtccgacgagcaggtggaggccgccgccgtcctgctgcccgacgcccccgccgcgctcgcggaactggaaggggagggcctcgtggagcatgcgggcgggcgctggcgccccaccgaccgcggctggctctgcggcaacgagctctacgggaggctgttcgacttggcatagggaatccgtgcacgcgctcctcctatgcagtaaccgtcaagtttctccataatttcccgctgttgttagcactctcggctttcggctgctaatatgatgcgttactatggttcgggttcggggaatgccgacgggcgagagagaggaaggtggagaggcgtgctatccgatcgcaggcagcgggtgctggccgcgctcatcgaggaatacgtcgcgcgtgccctgccggtgggctcgcgcacgctcacggagcgctaccagctgggcgtgagcccggccaccgtgcgcaacgagctttcggtgctcgaggacggcggctacatcacgcagccccacacctcggccgggcgcatccccaccgaccatggctaccgcgcgttcgtggacaacctgctggccgccgacttcacgggcgaggacgagcgctaccgccccgtcgtggacgagctgcgtcgcagcgcgagcgagctcgacgcgctcttggagcagacgtcgtcggccctcacgcgcctcaccgactgcctctccatcgtgctggcgccgtcggtgctgaacctgcacatcaagcagctctcgctcatctcgctcaacgcgtaccgcgcgctcgtggtgctcgtcaccgaggacggccaggtgttcaaccgccagatggagttcgccgaggaggtgtcctcggacgacctggcgcgcgtgcaggcgtttctgggcgacgtgttcacgggcaagtcgctccagcagatcgaggacggcctgggccagggcatggccgaggcgttccgcgacccgctcgtgcgcatggcgctcgacgaggtgctgtcgtgtttgcaggagagcgagctgtcgcgcgcccaccggcttggcgtgagctcgcttctgacgaagcccgagttcagccagtcgcaggcgctgctgcccgtcatgcaggtgctcgaggacgacacggtcatgctgcatatcctggacgacgccgtgcggcagggcgacggcacgcccagcgtgcgcatcgggcgcgagaacgacgcggcggagctggcgggcgtgtccgtggtggccagccgctacgggcgcggggagtcggccggcgtcgtggccgtcatcgggcccacgcgcatggactattctaaggtattgcgggcggtgcgcatcgcgagcgcggcgcttcaggacgtatagggcttgcacggcgcccgcacgagggggcgccgtcaaacgaggaaggtactgcaagagcaatggccaaggatctgtacgaggttctgggcgtttccaagaacgccacggaggacgagatcaagaaggcgttccgacgccgcgcgcgcgagcttcaccccgacgtgaacaaggcgcccgacgccgaggaccagttcaaggagctgaacgaggcgtacgacgtgctgagcgaccccggcaagcgcgcccagtacgaccgcttcggcaccataccgggcgcggccggcggcggcagcccctacgggggcggcggctacgtggacttcgaggacctgttcggcggcggcttcggcatgggcgacatcttcagctcgttcttcggcggggccgcgggcgggcgccagcagcagcgacgcgagggccgcgacatgggcgtgggcctgcgcgtcacgctggaggaggtggccgcaggcgccaagaaggagatcgtctacgaccgcctggcgccgtgccccgactgcgacggcacgggcctcggacccgacgggcgcgaggtcacctgcccggactgcggcggccagggccgcgtggtctcggttcagcacacgttcctcggcgacatgcagacggccaccacgtgcaagacctgcaacggcacgggccgctcggtggagaacccgtgtccggaatgcgagggccagggccgcgtgcccgaccgccagcgcgtgaccgtggaggtgccggtgggcatccgcgactcgcagcagctgcgcctgtccgggttcggcgaggcgggcatgcagggcgcggcgcccggcgacctcatcgtcacggtgcgcatccagccgcacgagttcttcgagcgcgacggcgatcacctgcacgcgcgggcgaacgtgtccatcgtgcaggcctccctcggagccgagatcgagatcgacggcatcttcgagggcgagaaggtgcaggtgcgcatacccgagggctgccagaacgagcaggtggtgcgcgtgaagggcttcggcatgccgaagttccgcagcgacgcgcgcggcgacatgttcgtgcacgtgaacgtggtggtgcccaagaagctcacgaagaggcagcgcgagctcttggagcagctggccgaggagttgggcgaggacgtctccgacgagcgcacgcccctgcagaagctgcgcgacgccttcaactagcgggcgagcgatgtcccttcagcatttctacctcgacgagcaggtgctcgccgacgaggttggcgagtcgttcccgctgcgcctcgcggcggacgacgcgaggcatgcgcgcgtgcttcggctggcgccgggcgagcgcatcgcggtggtggatgccgcgcaggactacttcgcctgcgagatcgtgtccttcgacggcgaggtgcccctcgtgcgcatcgcgcagcgcttcgagcgcgcggacgcaggcccgtcggtgacgctcgtgcaaggcctggccaagggcgacaagatggagacggtgatccgccacgccaccgagctgggcgtggcggcgtttgtgtcgctggcatgcgagcgctccgtcgtgcggctcgacgcgaagaaggcggcggcgaaggccgggcgctggcgcgccatcgcgaagagcgcggccatgcagtcggggcagccggccgtgcccgaggtgcgggagccggcgggcctgggggagacgtgcgcgctgctggagacggccgcggcggtgctcgtgtgctgggaggaggctcccagcgcgtcgcggctcgacgtcgcgctcgaccgtgcgctcggcggcggcccggcggcgcagggcgctcgcgtggccgtggtggtggggcccgagggcggcctgaccgagcgtgaggtggaggcgctttcggcctgcaacccccgctcctcgctcgtgtcgctcggcccgtccatcctgcgtacggagaccgccggcatcgtggcgcccgcgctcgtgctgtacgagctggagcgtcgcgcgagggcgggcgcgcgatgaacttcgccgtcgtcaacctggggtgcaaggtgaaccgcgtcgagtcggacgacgcggcggcgcgtctcgccgcgtgcggcgtggagacgcccgaagcggaagccgacctcatcgtggtcaacacgtgcacggtcaccggcgaggccgagaagaagacccgcaaggccgtgcgccgcgccctgcgcgcgaacgatcgcgcccgcgtcctggtcaccggctgtgccgccgccatcgatgcggtgttctacgaggctctcgacgcccgcgtcaccgtggtggggaaggcccagctcgccgatgcgatacgggactggtgcgaggcctgctcctcccgcagtgcggccggcgagcctgccgatcccgccaacgtctccgccgtgcaagccgaggggcccgcaggcccttcccgcggcgcggcgcgcggggcttccgaaactgcgtgcgctcccatcgagcagggtgacgttgcccccctgctccatatcgggtccgggttccgcacccgggtgggggtcaaggtgcaggacgggtgcgacaacgcgtgcacgtactgcatcgtgcacgtggcgcgcggccgggcgacgagccgccccgccgacgaggtcgtgcgcgagtgcgcggcgtacgcgcgggcgggcgcgggcgagatcgtgctcacgggcatcaacctgggctcgtactgcgacggtgggcgccgcgacccgtccgcgacgcgcctggccggcctgctgcgccgcctgctcgacgagacggcggacctgcacgagcccggcgcgctccccgtgcgctttcgcatctcgagcgtcgagccgcgcgacgtggacgacgcgctcatcgacctcctcgccgccgccgacggccgcgtctgccgccatctgcacctgccgctgcaggcgggaagctcgaaggtgctgcgcgagatggcgcgcccctacgacgcggagcggttccgcgcgctcgtggagcggctctacgccgccgtgcccgagctggcgctgtccaccgacatcatcgcgggcttcccgggcgagaccgacgccgagttccaggagacgctcgacctcgcgcgcgcctgccgcttcgcgaagatacacgccttcccgtactcgcgccgcgccggcacgcccgccgccgcgcgagccgaccaggtgcctaccgaggtcaaggcggcccgagccgccgcgctgcgcgccctcggcgacgagctgcgcgcgtccgagcgcgcccgccgcgtgggaaccgtcgagctcgcgctggtcgaggaaggtggcgtggccatgtcggaaagctacttcgagctgcccgctcccgtcggggccccgttgggcacgctcgtgaaggcgacgatgtagcacggcgtctcccggcgcaggctcgttcgggcatcggctcgctgcctgtgcgcccggtgcctggatcgaccgggcctttcgcctcggatgcgcgctcgaacggcataaaatcaccgaattcggaaaactatgccccgtctcggtggcttcgggaagcgctttccggcatagtgcctggtcgcgattcctcctttccggctcaacctccgcttcggcgacttcgggtcgccctcaacttccgaattcggtgatttcctaccattcgcggtgcttgcccttcccgaaacgaacgcggacgggcctctgcgaaccggcgtgggccgatgccccgatccgctccattgcccgcgcattctgccatatggcgtgcgtgtgggaagcttcccccataggatcaggtgtgatatggtttcccggatgaccgggagaggacgggaggcgccgatggccgatgacgaggcgcgcgagcgggcgcggaggaggctcgaggagcgccaggcccgcatgcgcggaggggcgcccgcttcacgcggcgagagcgttgcgcccgatgcgcccgacgcgcatgggccgataagctcgggccgcctccgttcgagccgtcccggaacgggcaatcgacgctcgtcggaggcgcacggcccggagcccctcttcgccctctccgaggctgcgacgaacctcgtgcgcgccgtcgggcccaagcgcctcgcgatcgcggtcgtcgcggtcgtgctcgtcatcgcgctcgtcgcgggcgtccgcggctgcatggccgccggcgaggcggcgccggtgccggacgaggccgaccaggcccccgtccagcagcaggcgccgcgcgatcccatcgacgagggcgagctcaaggccgtgctcggcgacgagctggccgcccggctcgtccaggcggctgagacgagcgacgacgccgtatggatcgccgcccatccggacgcctacgctgtcgacggggcggccgtgcagtacaagctgctcaagctggcggccacggagcccgaggccctgcccttcgtgcgcacgttccccgatgcctaccccgccgagagcgcactcggcacggacgaccctgcctccggccaggtgccgcgcctctaccagtgggatgcccgctggggatccaccgtctacagctccacggcgttcgcgctgacaggctgctgccccacgtcgctcgccatggtctaccagggcctcaccggcaaaggcgacctctcgccctacgacatgggcaggcgcgcgagcgagggcggctacgagacgcagttcgacggcaccgacgcgacgttcctcgtcagcgaggcggcttcgctcggcctctcctgcaaggaggtcgctgccgacgcggccagcgtgcgcgccgcgcttgagggcggggccgtgctcatctgcaacgtcgggcccggcgacttcaccgacaacgggcacttcttcgtcgtcacgggcatcgacgacgcgggaaaccttaccgtcaacgacccgtactcggccgagcgttcgaaccggagctggaacgtggacgcggtgctcggccagacgaaggcgctgtgggcctaccggctcgcgtgacgcgctcgccggcgaacggcctgcaagcgtttctccgcctctcctgcccgccttgcgctccgggccctctcggcgacgtttccatgcccgccgctgctcatttgggcacctgcactatattcccttgtcggttcgatgacatcgaggccggtcgcagccgtacgtggtacaatgcccccatgacagaccagacgcaaatcaccctcacggccccgcagagcgtgaacatggcgctcatcgtcgggccggccgacgagatactccatgtcgtgcaggatgcgttcgcctcgcgcatcaccgtgcgcggcgacaccatcgtgctcgagggcgacccgctcgaggtgcagtcgctcacggcgttgttctccgacctcatcaagctcgtggaaggcggcggcgagcccacgctggagtacgtgcgccacgccatcgacctgttgcgcacggccgagttcagccccgctgcgctgcgggaggacatcctgctcacgtaccgcggacgggccatccgcccgaagacggcaggccagaagcactacgtggacgccatccgcgagcacaccatcaccttcggcatcgggccggcgggcaccggcaagacctacctcgccatggccatggccgtggcagcgctcaagcgcaaggaggtcggccgcatcatcctcacgcgccccgtggtggaggcgggggagagcctgggctttctgcccggcaccctcacggagaaggtggacccctacatccgcccgctctacgacgcgctgttcgacatgaccgacatggagcgcgccacccagctcatcgagagcggcgtcatcgagatcgccccgctcgcgttcatgcgcgggcgcaccttgaacgacagcttcatcatcctcgacgaggcgcagaacaccacgcccgagcagatgaagatgttcctcacgcgcctgggcttcggctcgaagatggtggtgacgggcgacgtgacccagctcgacctgccgcgcggcatctcgggcctcaagggcgtgcggggcatcctctcgggcatcgacgacatcgcattctgcgactttacgggcaaggacgtggtgcgccactcgctcgtggcggctatcgtgtccgcctacgacgaggccaccaggaaggcatagcaacatggacatccagatcaactacgactaccgcaaagacgagctggagaagctgccgctgcacgagctggcgcagttcgtgctcgctcgcgaggacaagcccttcaacacggaggtgtccgtgagcttcgtcaccgacgaggccatcgccgcgctcaacgagaagtaccgccacaaggaaggccccaccgacgtgctgtccttcgaatgcgacggcgtggacgacgacctgtcggccatgaccctggccgaggaccccgtctacgagctgggcgacgtgatcatcgcgcccgacgtggccgcccgccagacacgcgagttcggcacgtcgttcgaggaggagatcagcctcttgctcgtgcacggcctgctgcacctctgcggctacgaccacatcgccgacgacgaggccgaggtcatggagaagcgcgaggccgagatcctcgaggcgtggtcgaagcgcacggtgtagcggagaggcggggaggcggcgtggctgcggaaacggcggtggaggacgatctcgtggacgttcccgacaggggcgggagcgacgcgcgcgacgagcccccctgctgcggcgagggcttcgtgcgcaacgacgcggacaagggcgcccgctcgcgcttctcgctcgtctgcgcgttcaagtgcgcgtgggacggcatcgcctatgccgtgcgcacgcagcgcaacatgaagatacacttgggcatagccgtgctggccgtggcgctgggcttcgcactgcgcatcgacggggcctcgtgggccgcggtgatcctctgcatcgccgccgtgttcgcggccgagtgcgtgaacacggccatcgagagcgtggtcgacctcgtgtcgcccgagtaccacgagctggcccgcagggcgaaggactgcggggcgggagccgtgctcgtgttcgccgtcgtggccttggtcgtggccgcggtggtgttcggcccgcgcgcgtgggctctcttcttcggctagcaaacggccgcttccccttgctggaacgggcgaccgggggcgccccaaacatcgatcataaggatgcacgctatggatttccaaccgcacgccgagggcttcaagtcaggtttcgtcacactcgtgggcaggccgaacgccggcaagtccacgctcatcaacgccatcatgggcaagaagatcgccatcacgtccgacacggcgcagacgacgcggcaccgcttccgcgccgtgctcacgcgcgaggacttccagctcatcttggtggacacgccgggcctgcacaagccccacgacgccctcggcgaggagctgaacacctcggcgctcaaggcgctcgaggacgtggacgtggtggccatgctcatcgacgcctcgcagcccatcggccgcggcgacgagtgggtggctgcgcagctctcccgcgctcgctcgaagaagatctgcgtgctgtcgaaggtcgacctggcgacggagaagcagatcgccgcccagcgcgaggccgccgaggccctgggtgcgtgggacgccatggtgggcctgtcgtcggccacgggcaaaaacgtggaggccttcgtggaggaggtcgtgtacctgctgccggagggccccgcgtggttccccgccgacatggagaccgaccagcccatcgaggtggtggtggccgagttcgtccgcgagaagatcctgcgctcgttccacgacgaggtgccccacgccatcggcgtgcgcgtggacgagatggagtacgacaagaagaaggacctccaccgcatcttcgccacggtctacgtggagcgcgacagccagaagggcatcatcatcggcaagaagggcgccgccatcaagcagatcggcaccgaggcgcgcgccgacctggagcagctgctgggcacccgcgtgtacctggacctctccgttaaagtgaagaagaactggcgccgcgacgcgagccagatccgccgcttcggctacggcgagggcgcgtagggaggcgaagcccgtgcggggggctgcctgcagcttcggcgcggcgccctcttgcaggtattgtcgcgaaaccggccatcgtccggatgccctgccgcgctcgctgattttccgttacaatacgcaacggagttgacttcgcgagggagacgcatgagcatgatctgtccgaactgccgatcagagaacaaagagggcgcgaaattctgcaacgagtgcgggtttccgctgaccgggcgcatggcggccgtggccgccgcatcgacgagcgacgacacgctgcgctcgatagcggccgagggcggcgccgcacccgttgacgatgctgccgctgtcgacaaggcggcggaggggttgcccgcgtgcgaggcgggcgcgcccgaggacgacgggccgggggccgcggaaggcccggacgccggtgccggagaagcggcccctgcgcggccggccggcgacccggagcccctcgcgtccccggccgttcgcacggcgcagggctcgggcccgctcgatcccgcgaagctgccggtcatcggccttgcgggtgtcgacgtggacgaggacggcaacgagttcgacttcggcgacatcgacgacgctcccgccgcggacggcggtcagcaggcagctgtgccgagcgccgcggtcacggcggacctctcgggcttggacgagtgcctggtggattccagctatacgccccccgcggccgcgtggcgctcgggcgacacgatggagatgccccgcgtcgagggcaaggccgcgccgaagcagaaggagttccgcgcacccgacccgcgcgagaagaagcacggccgcggccgcgtggtcgccatcgtgatcgtgctgctgctggccgctgcggccgctgcggcgggcatcacgtaccagatggagctctggggcggcaaggtggtccccgacgtggcgggcatgacgcaggccgacgccacctaccagctggagggcaagggcttcaccgtgcgcgccacccaggtgaagtccgacgagaccgagggcctcgtgctgctcaccgatcccgggtccggcgggcgcgccgaggagggctccgaggtggtcatccacgtggcggtgccgcgcatcgtccccgacgtggtgggcaagacgcgcgacgaggcggcgaagctgctcgaggccgaggacttcgcgcgcgtgacgttcgccgaggagaagtccgacacggccgagggcacggtgctgtccgtgaccccggaggccggcgagaaggcgaaggcctccacggacatcaccgtgacggtggccgtgcccttcacggtgcccgacgtggccaaccagccgctcgatgccgcgaaggccgccctggaggaggcctcctacgtgcccgaggtggcgtactactacaccgaggacgtgcccgagggcacggtggtgggcacgagccccgccgcgggcgagaagctggcatcgggctcctccgtgacggtgaacgtggccatgtcgcgcgcgagcgtgctcgtgccggccgcgaaggactacctttccagcatcggcacgatctccctgggcggcacgacctacgagatcgtctcggtcgacgacgtgaagtacaccggctacaaccagacgtcgttcaccgtgacggcagcggccgtgaccacgctcgacggcgagacggtgcgcggttcgtccaagcagaagagcggcaccatcgtctgggacgacagcgacaacgtcgtgagcgtctcctaggcacgatggccagcgcgacgtacacggcgcgcgccatcgtgctgcgcaagacgaagctaggggagagcgaccttatcgtcaccctgctcgcccaggacggctcgcaggcgcgcgccgtggcgaagggggcccgcaagccctcgagcccgttcgccgcgcggctggagctgtactcctcggtcgacctgctgtgctcggagggccgcaacctggacatcgtgaaggaggcgcgcatcgcctcctcccatgagcgcctgcgccgcgacttggagcatgcggcctgcgccgcgcccatggccgagcttttggaccgcgtgacccaggaggggctcgcgaacccccgcctgttcgcgctcaccgaggcggcgctcggcgcgctcgacgcctccaaggcgccgcaggccccggccgtgtgcgcggcgcacctgctgaaggcgctcgcgctctcggggctgcggccgagcctgtcgtcgtgcgccgtgtgcggggccgaagtccggggcggtgcgggagcggggacggtgcccctgtccttctgcgagggcggcatcgtgtgtcccgcctgccgtccgtccgtggaagcccgggacgtgccgggcgcgaccgtggcctggtgcagggcgctcatgggctcgacgttcgccgagatcgccgagatcgacgtccccccgtccgcgtcgttcgccgtgctgcgcttctgccagcagtgggcgcacgagcacgtgggcgcgaacctgaagtcgctgaacttcctgttcacctgcggcctgttctgaaccgcgaacgcgtcgtccggcaagggccgccgccgggcgcgcagctgcaaggcggcggcccgcgaagaaggagaaggaaccatgcatacctacaccccgcgcggcgtctgctcgcgcgccatcagcgtcgagctggacggcgaccgcgtgtcccacgtggagttcgccggcggctgcgacggcaacctcaaggccgtgtcgaagctcgtccgcggcatggcggtggacgaggtggcggcgctgctggagggcaatacctgcggccgccgcaccacgtcgtgcgccgaccagctcgtgcgcgcgctgcgctccgctcaggcggccgaataggcccagaggttgcggcactgccgtagcaccgtatcgaaatcccaggtctgcgccgtgcgctcggggctgttcgggtcgcggatctcgaggcgcccgtgctcgtcgatccccgcgagcacgatgaagtggcccgtgctggtgaagtcgccgggccccatgctgcatatcacgggccggcccgccacgagcgcgcggcgcaccgatggctcgtcggcgggcagctcttctgcggtaagccccagctgggcggcgccctcggtcatgaagtcccaggccgtgccgtccgaggaggcgcaccctatccgctcggacagcgcgccggcgtcggcgggggagaggtcgcttttgcccgtgagcgccacgtatgccatggccaggcacgtggggccgcagccggtcaccccgaacgcgtcgccgccgtagagggcctgcgaccaggcggggtcgcgctggtagagcgcggggacctcgccggcgcgccaggcgctgcggggcgtgctctgcggggcgtccggcgtgcccgtgccagcggccgccccgccgtgagcgagggccgagagcgtgccgacggcgtaccagcccaccccggcgagcgcggccacgagcgcgacggccagcgccgcgcgcgccgcgagagatcggcgcctgcgcgccgcggagggggccggtgcgcggtaggaggtgcgcgagtacgcgggcgctccgttgcgtcctatgggcggcatcggcgcggtggcggaggcgcgcgccgcgcggcccgccggccgccgatgcgccgcgcggtacgagttcgtgtacgtcatgggtgcttcctttcctcggttcctccctcccagtatccccaagcagcgcccccgcgtcccttgagaaccgtctacggatcccttatgttttccttaataatgcccctccttacaccgtgggcgggggcggggccgatacaatggccgcaaggagaagcgagggccgcgcagcggcccggcgcccggagggcgcggaacggcgaggagcggggcgtggcggagacgaagctcatagcggtatgcgacgacgaggcggccatcgccgacctggtggcccagctgcttgcccagggcggcttcgaggtgcgcacgttctacgcgggcgccgaccttttggccgcggccgcgcacgaggcgttcgacctcgtcgtcctggacatcatgatgccgggcatggacgggttcgcctgctgccgcgagcttcggcgcacgagctcggtgcccatcatcttcctcaccgccaaggacgaggagatcgacaaggtggtgggcttcgagctgggggcggacgattacgtggtcaagcccttcaagccgcgcgagctcctggcccgcgtgagagcccgcctgcgccgcagcgcgccgccggcagagggcggccgcccgcccggctcccagctgctcgaggcgcgcggcgtggcggtggacgaggaggcgtacgcggccacgctccacggcgaaccgctcgcgctcacgcccaaggagttcgccatcctcgcgtgcctcctgcgcgccgccggacggccggtggcgtcgcgcgatctgttcgaggccgtctggggcgaggaggcgaacgcccagtccaacaacacggtcatggtgcacatacgccacctgcgcaagaagctggccgccatcgactcctcccaggagttcgtcgagacggtgtggggcgtgggctacaagctgggatagcggtatcggcgtcgcacggacggccggcggcgggtgcggcggatgtgagggaagggacgcgcgatggatgcgagcggattcagccaggcgaagcaggaccagacgagacggctctcgaacagcgtcctgcggcgcacgctggtgaacgtggtcgtgttcgccgtcgtgtacctggcgctgttcctcggcttcatgaacacgctgggatcgagcctgtcgaacctcgcgtacaacctcgtgggccagaattactgggtgcatacggccatcgcgaacctgttcctcgtgtgcgtggccgtaggcttcatcgcaggaatcgtgctggtggtgcgctcgggcatcaaccgggccctgcgctacttcgacctgctgctcgactccgtgaccgacgtgctggccaagcgcgagggccccgtcgtgctgccgagcgagctcgcgcccacggccttgttcctgaacggcatcaaggccgagggcgagcgcagcgagcgcgcggcgaaagcggccgaggagcgcaagaacgagctcgtggtgtacctggcccacgacatcaagacgccgctcacgtccatcatcggctacctgacgctcctggaggagtcgcccgacctgccggtggacgtgcgggcgcgctacacgggcataacgctggcgaaggcgtaccgcctggaggagctgctcgacgagttcttcgagatcacgcgctacaacctgcagaccatccccatcgagcgctcgcgcttcgacggcgcgcttttcgtgagccaggtgatagaggagttctacccgctggccgaggggcgctccctctcgctcgtgttcgacgggccggacgagctgcccgtgttcgccgacgcggggcgggtggcgcgcgtgctgaacaacgtgctgaagaacgccgtggcctacgccgatgcgggcaccgaggtgcgcgtgcgcacggggctcgtggtcgcgccggacggcttcgtgtggtgggagctcaccgtgaccgaccgcggccgcgagctgtcgcccgagcacctcgagcgcatcttcgagaagttcttccgcgccgacgccgcacgcggctcggacgggggcggcgcggggctcgggctcgccatcgcgcgcgagatcgcgcgcgcccacggcggggacatctacgccacgagcgacgcgggccttacgtcgttcaccgtatggatcccgcagggcccgagcgtggggaagtgaggagggcggccgccgtatccgccgcacgcggcatccgggcgcggcccgcagcgcgcgttcccgaaattccagcttgaaatcgatcggcaacaaagggccgctatcatgaaggcgttatgcacgtgcccgcgccgcccgcacgggacgcaaccgaccgagaggagccccatgcccatcatcgagccctaccgccccgacctcgccgcccccctgcgcgccttcctcgcgcgctgcctgcccgagtcggggcgcacgttcgacccggaggggcgccatgctcacctgctcgacgtcgaggcggcctacgaggccttctggtgccttgtcgaggacggcggcgacgtggccggctgcgtgggcgtgcgggcgctttccaaggacgtgtgcgagctcaagacgctgttcgtttacgagcgcctgcaagggcacggctggggtcggcgcctggccgagcaggccatcggcctcgcgcgctcccggggctttcgggccatgcgcctcgacaccatctccacgtccgcgaacgccatcggcctctaccgccgcttaggcttccgcgacatcgaccgctacgacgacaaccccctggccgacgtgttcatggagctggacctggtgcggtagcggccgaggccctgccggcggccgcaatgtgggcaacctgtgggtgagggccacgggcgcttgcccgcccttccggcatcgcctacaataggcaggctgcgaaaacgcaggcactctccgcttggtccgcatgtctcaccgcatgcccacccagaggggagcgcaacgaacgcaaccgccctggccgggcgggggcgatgacgaggcggcgcgcgagcgcgcccaaggaaaggtggaaccatggccgacaagctcagcatcacgaaggagcgcaccgcggagctcatcaaggagttcggcaagggcgagggcgattccggcagccccgaagtgcagatcgccatcctcacggagcgcatccgcaacctcaccgagcacctgaaggtgcacaagaaggacaagcacacgcagcgtggcctcatgatgctcatcggcaagcgccgcggcctcttgaagtacgtcaagaaccgcgacatcgaggaataccgtgcccttatcaagaagctcggcatccgcgacaacatctagcacgaaccgggagcccgcacatgcgggctcccgcgcataggcggcggcggggacctgccggacaagccgcccgccgccctccgcgcgtcggaggggcgccgtccttcggggacggcggggaaaggacagccggaagcgcgcagcttccttctgtatagagcggtcggaagcgcaagggcgcttctgctcgcggcccgcccgcagggagcggacggcgccgaagaagcttggccgcactagggcgtccaaggcgaagagaaagaaatgtgcatatggagaaaatcgtcgaatccttcgagctgtacgggaagcagtaccgcttggagacgggcgagctggccaagcaggcgaccggttccgtggtcgtcacgcagggcgacaccaccgtgctggtcacggcggtcatcgggcaggagaaggactacgacttcttcccgctcacggtcgacttcatcgagaagatgtacgccgtcggccgcatcccgggcggctacctgaagcgcgaggcgcgtccctcggacaagggcacgctcacggcgcgcatggtggaccgtcccatccgccccggcttcgtggacggcttcaagcgcgaggtgcacgtggtgtgcacgacgctcgtggtggacagcgtgaacccgcccgacaccatctgcgtcatgggcgcgagcgccgccctcatgctgggcgcggcccccttcgacggccctgccgcctgcgtgcgcatcggccgcgacatcgagacgggcgacttcatcgtgaacccgacgttcgaggagtccgagcactccgacctggagctcaccatcgccggcacggccgactacatctccatggtggaggcgggcgccgacgagatctccgagcaggacatgctggccgccatggccttcggccaggaggccatcgccgcgttctgcgaggtgcagcagcgcttcctcgaccgtgcgaacatccagccggtcgagtggccggtgcacgtggccgacccggccatcgcaagccgcgtggcgccgttcatggacgagatgtccgccgcgctgcacgacgccgacaagctgtcgcgcatgggcaaggtcgaggagctcaaggagcgcatcaaggccgagcagttctccgacgaggagcgcgccgcctggaagggcgacatcgccgccgagctgaagaagctcgagaagaaggccatgcgcgccatggtcatcgccaccggcgagcgcgccgacggccgcacgcccgaggagatccgcccgctctacatcgtgccgggctacctgccccgcgtgcacggctcgggcctgttccagcgcggccagacccaggtgctgtccgtggtgacgctcggcatgctgaacgagtggcagcgcctcgacaccatcgaccccgccgagggcaagcgctacatgcaccagtacaacttcccgccgtactgcacgggcgaggcgggccgcatgggcgcgccgaagcgccgcgagatcggccacggggcgctggcggagcgcgcgcttctgccggtgctgccggacgaggacgagttcccctacgccatccgcgtggtgtccgaggtgctggagtccaacggctcctcgtccatggcctccacctgcgggtccacgctggccctcatggacgccggcgtgcccatcaaggcgccggtctccggcatcgccatgggcctcatcaaggagggcgatgacgtggtcatcctctccgacatccagggcatcgaggacttcctcggcgacatggacttcaaggtgtgcggcacggagaagggcatcacggccctgcagatggacaacaaggcccgcggcctgtccgtcgagatcctggcccgcgcgctcgcgcaggcgagcgagggccgcgcccacatcctggacgccatgctggagaccatcgaggcgccgcgcgaggagctctcgcagttcgcgccccgcatcgagacgatccacatcccggtggacaagatccgcgacgtcatcggcagcggcggcaaggtggtccgcggcatccaggaggagacgggcgcccagatcaacatcgaggaggacggcaccatccacatcgccgccatcgagggcccggccggcgaggccgcgaaggccatgatcctgggcatcgtgaaggagcccgaggtgggcgagcagttcgacggcgaggtcgtgggcatcaaggacttcggcgcgttcgtcaagctgacgccgggcaaggacggcctgctgcacatctcccgcgtggccaacggccgcgtggcctccgtggaggacgtgctcacgctgggcgacgtggtgaaggtggaagtgctcgaggtggatccgaagacgggcaagatctcgctcgaccgcctggacaagccggacgcccccgagggcgcgaacaacggcggggagcgccgcgagcgcagcgaccgcccgcgccgcgaggaccgcggcgagcgcagcgagcgggacaaccgtccaggtcgcagcaaccgcagcggcaacggcaacggcaacggccgcacgccgcgccgccgccacgagggctagcaaacaacggggaggccgcggggacgcggcctccttctttcttcagggccgtatcaaaagccccagaacgcagggacagggacagggagaggagggacagagggacggttctcttgtcctgcagatgctgcgggacaagagaaccgtccccctgtcctgcgcccctgtcctgcggtcccggatactgtgggacaagagaaccgtccccctgtcccgccctgctgtcccgcctccccctgtcccgccgcgagccccacgcatcccgcaggcgatggcgatggcttgcggacccgcctcgacatctccctccctcaaaccggccggccgggaccgtgcgtgcagaggcggccgccccggcgcaccctgccaacctgcgaggttgaatggatgcgccggtccggccgctcccgaacacccgacaacggccggctgacaagagaagccgacaagaaaaagcatcccctcctgccgtccgccaaacggtgccgccggggtaacgatgcgcctttcggtcggcttcgcgtggtaggatgttccagaccgtgaacgaaaggcaggaatcgcatgatcagagtagcagtgtcggggtgtgcgggccgcatgggcgccaccgtcgtggaggcggtgggcgcggcgccggacatggaggtggcctgcggcatcgacccgcatgggcaaagcgcggcgttccccgtattcgccagcgtggccgaggcgctcgagggcgcggagttcgacgtgctcgtggacttcacgcagccctccgtcgtggcgggcaacctgcgcgcggcgctgccggcgggcgtcgactgcgtggtgggcaccaccgggctctcgaacgccgtgctcgaggagctggccgcgctcgcccctgcgggcacgtgcctgttctacgcgccgaacttcaccacgggcgccgtgctcatgatggagttcgcgaaggccgcggcgccctacttcccggaggccgaggtcatggagttccaccactgcaacaagaaggacgccccctcgggcaccgcggtgcgcaccgccgagatcatctccgcggcgcgcggcgggcgcgcgagcgaggcccccgggcgcgaaacggagatcgagggcgccgagggcgcgcgcggcgcgctcgtggagggcgtgccggtgcactccatacgctccatgggctacgtagccagccaggaggtcgtgttcggctcgctcggccagacgctctccatccgccacgactcgtgggaccgcgagtcctacatgccgggcgtgctgctgggcatccgcagcgtgggcgagcggtcgggcctgattgtaggtttggagaacttcatggcatgagcgcggcgcgagcttccgcacatggcataataaacgtttgtacgataggcaaggttcggcgcggcggatgccatccgcccgccgccgtgcagtgagatgaggagtcagcatgtcgcaagagccccgtttcggccgcatgatcccggccatggtcaccccgttcgacgagaaccgcgagctcgacgtggacaaggtccaggctctcgccgcgcgtcttgtggacggcggcagcgactcgctcatcatcaacggcacgacgggggagagtccgaccgtgttctatccgcagaagatcgagctcttccgcgccgtggtggaggccgtgggcgaccgcgtgcccgtcatcgcgaacgtgggcgacaactgcacggccgacacggtggacttcgcgcgcgaggtggcggagcttggcgtagacggcttcatgtgcgtggtgccgtactacaacaagcccccgcaagagggtatctaccagcacttccgcaccatcgcgaacgcggtggagctgcccatcatcctgtacaacatcccgggccgctgcgtggtgaacatggaggccgaaaccacgctgcgcttggcgcgcgagtgcgccaacgtcgtggccgtcaaggaggcgtcgggcaagctggaccaggtgaaggccatcgtggagggcgcgccggaaggcttcgccgtgtactcgggcgacgacgccgccacgttcgacatcatgcgcctgggcggcgccggcgtcatctccaccatcggcaacgtggctcctgcgcgcatgaaggagatcgtggatttgtgcgcggcgggcgactgggaagcggccgcggccgcgaacgaggcgctcatgccgcttatgaagggcctgttcgaaacgtcgaaccccattctcgtgaaagaggcgctcaagctcttgggcttcccggtgggaggcgtgcgccttccgctcgtggacgcgacccccgcgcagtccgagcgcttggccgccatcatgagggaagtcggcgtgctggacgcgtaaggcgcgtccgagactgacaacgcaaggttgcgtcgccccgagggcggcgctgcaagacaaaccgcgacgagcgggcgcgcccctatcggagcgccctgcccgcaggaccgtccgttcgggcggctgcggcagaagcggagccgaggcgaagccgggacccccggctcttcgtctatgcgcacccgatcgcgcaagaccggaaagacaaggtatttatggaacagcagaacaaccagcgctccgagcgccgttcgcaggagcagtcccgcaacggccgcggcgggggcaacggcaacggcgccaagggcgccgcgcgcggcgacgagaagaagacgcgctcctacaagcacgtgcagctcgagcatcgccgtccccagctctcgaaggcggggcagggccagcagcggcagggcggccagcagaacgcgcgccgcgccaacttcagctcgccgaagaaggacccgaacgccacgctcaagatcatcccgctcggcgggctcgatgccatcggcaagaacatgaccgtgttcgagtgcaagggcgacatgatcctggacgacgcgggcctcatgttccccgatgacgaccatccgggcatcgacctcatcctgcccgactacacctacgtgctggagaacgccgacaagctgcgcggcatcatcatcacgcacggccacgaggaccacaccggcacgctgccgtacctcatgaaggaccttgaccgccagatccccatctacggcacgaagatgaccctcggcctcatcgagggcaagttcgccgagcataagatcaagaacgccaagctcatcgagatcaagccgggcgaccaggtgaagctcggctgcttcacggccgagttcttcgccgtgaaccactccatcccgggcgccgtgggcgtgttcttccagagcccggccggcaacgtgctgcatacgggcgacttcaagctggaccagacgcccatcgacggcgtgactaccgacttcggcgcgcttgcgaagttctccaaggcgggcgtcgaccttatgatgagcgactccacgaacgcccagaaccccagcttcacgccctcggaggccgaggtgggcaaggagctgcgcaagatcatctcccaagcgcgcggccgcgtcatcatcgcctcgttcgccagccacatccaccgcatgcagcagatctgcgacgccgcgcgcgacaacggccgcaaggtcgtggtcacgggccgctccatgatccagaacaccgatatcgcgcgccgcctgggctacctgaacatccccgacgaggacatcgtggacgcctacgacctcaagggcatcccgcccgagcaggtggtcatcatgtgcacgggcagccagggcgagccgctctcggcgctggcccgcatcgcgaacggcgagcacaagaccatcgacctggagcagggcgacaccgtcatcatctcggccacgccggtgcccggcaacgagaaggccgtcacccgcgtcatcaactcgctggcgaagataggcgccgacgtctacgacaagaagcgcgccatggtgcacgtgtccggccacgccggcgccgaggagctgaagctggtgctgtccatcgtgcagccgaacgcgttcatgcccgtgcacggcgaggccacgcacctgcgcgcccatgccaagctggccgaggcgacgggagtgcccgccgagaacgtgttcatctgcgagaacggcgagggcctggagctttcgagcaggggcgtgaagcgcggcgagaccgtgcagagcggcatcgtgttcgtggacggcctgtcggtgggcgacacgtcgcaggacgtgctcgacgagcgcaacgcgctcggctcgcagggcttcgcctcggtggcggccgccatctcgtccaagcgcaaggacgtggtgggcgaggtgcaggtggagatgcacggcatcacgggaggcgacgacgactacctcgtgcgcgaggcgcgcaccacggtgaaaaacgccctcaagcgccagctgggcaagggaggcggccagaaggagctcaagaaggccgcccgcgacgcgctgctctcgcttctgtgggagcgcacgaagcagcgccccatggccatcgtgaacttgctggaagtttaggctataatggccgcatgcgcctgcgcgcatgcggctctccggccgcgcaaccgaaccagaaacgcactctaaacgcagcaaaaggagctgggccgtggcccgtcagtcagcacccgcatcgaacaagtcgaaaccgtcccccggcgccaagccgaagggcaaggcggcctcgcccgccgagaagagcgcccgcaagggcggcggcaaggccgcgaaggccgcccctgccccagacgggcatctcatcgacgatcgcacgcgccgcgacatcacgggcgtcgcgttcgccgtggcggccgtcgtgctgttcgtggcagccgtcatgcccacgaacgccgtggtcacgtcgttcgtctcgacggcactgcacctgacgctcggcctgggcgcctacctgctgccgttcttcctgctcgtcatcggcgcgagcttcctcattcgcttcgaccgcgagcgcgtgccggcgcgcgtgtcggtgggcctcgtcatgatactggccgccgtgctcgtgctgctggcgctgttcacgccgctggttcccggcgaggagggggcgccggcggcgctcttcgaccccgtgcagctctccgcacgcggcggttacgtgggcgccggcgtcgcctgggtgggcttcacgctgttcgggcaggtcatttcgtgcatcatcatgttcggcgtcatggcggccggattcgtggtcatcggtttctcgctctcgaagctcatcgagcgcgtgcaggacaggcgcgccgaggccgagggggatggggacgtgctgggagcaccggcctacgcccgcgtgaagaaggccggggaggcgggcggcttcgtgccgctcacggcaggagagggcgccgcgcccacgagcgtgctgccacgtgccaggaaggggcgccggggcgaaggcgccgcggccggcgaggaggcgaagggcaagccgaagcatccctcgtcctcgctcgacacgcaggtcatcggcgggcgacgcgcgcccttcgacgcgcccgacgccgtggagcagcccctgacgcgcaagctcggccgcgcgcgggccgcagccgacgccgaaaagaaggcctcctctcccaaggcgccgtcctcctcggccacgccgcttgccaccccccgcccggcggacggcttcgagctgccccccttcgacatcctggccaccagcacgtctgccaagaaggacaaggccaccgacgccgagctcaccgagacggcggcctgcctccaggagacgctcgagagcttcgccatcatggccgaggtcgtgggctgggtggccggccccacggtgacgctcttcaaggttgacctgcccgccggcgtgcgcgtgagccgcatcacggcgctcgagcaggacatcgcgctcgcgctcgccgcgcccggcgtgcgcatcttcgcgcccatccccggcacgaactacgtcgggatagaggtgcccaaccgcacgcgccagaccgtgctcttgggcgacgtgctgaaagacgccccggccggccccttgcaggtggccatcggcaaggacgtggaggggcgctccatcgtgtcggacctggccaagatgccccacctgctcatcggcggcaccacgggctccggcaagtcggtgtccgtgaacgccatgatcatgtccatcctcatgcgcgccacgcccgccgaggtgcgcttcatcatgatcgacccgaagcgcgtggagttcacgccctacaacggcatcccgcacctctacgtgccggtggtcaccgaggcccgcgaggcggcgagcgccctgtcgtggggcgtggcggagatggagcggcgcctgaaggtgttctcgaaggtgggcgcccgcaacatcggccagtacaacgccaaggtgcaggccgagcaggccgccatcgagaaggccgtggaggagggcaaggagccgccggccgcggagctgggcgacgagctgccctacatcgtcatcatcatcgacgagctggccgacctcatgatgaacgtgggcaaggaggttgagttctccatcagccgcatcgcgcagctcgcccgcgcggccggcatccacctcatcgtggccacgcagcgcccgtccacgaacgtggtcacgggccttatcaaggcgaacatcacgaaccgcatcgcgttcaacgtggccagcggcatcgacagccgcgtcgtgctcgacacgccgggcgccgagcgcctcatcggcctgggcgatctcctgctgtcgaagcccgagtacgccaagccccagcgcatccagggctgctacgtgtccgaagacgagatcaacgccgtggtggagctgctcaaggcgcagggcgagcccgagtaccactcggagatcctccagacgaacctcatcacgctgggcgcgtcgcagccggacggcagcggcggctcgtgcacctcggacgacccccttgtgtgggaggcggccgagatcgtggtgtcgagcggcctcggctcgacgtcgaacatacagcggcgcctgaaagttggctattcgcgcgccgggcgtataatggacatgctcgaggaaaagggcgtcgtggggccgccgaatggcagcaagccccgtgaggtcctggtggacgccatggagttggaaacgttgaaggcgttcgaggcgcaggactcatgcgaggagtagcgacgtggcacaggtgacattcggaacggttttgcaggaagcccgcgaacggaagggcatggatctgtccacggcggcccggcgcctgcgcatcaggcccgatatcctgcgatccatcgaggaagacgacttcgcgcgcatgcccccacgcggctacacgcgcaacatggtgaacgcctacgcgcgccttctggggcttaaccccaccgagatcacccgcatgtacctggacgaggcctacgcctaccaggtgggccgcgcgcgatcggatgtacggccgagcggcttcgacatgggcggcacgtcgcgcacgaagcgctccggcgccgcgcgtccggtcccgcccgaggagcccgaggagcgggtgccgcgccagaacgcgttcgggcgcacgctctacgacgaccgcatcgcctacacgcgctccgactacggccgcagtgcggctccggcagccggggggcgcgtctactccgagggccgcacgcacacgagccgccattcggcgctgccgaacggccagtacacgaacttctacgcggggcccaaggccccgagcggggtgcagtcgaagctcccgttcctcattgcgggagcggtcatccttgtggtgctggtcatcgtgctcgtgttcgcgttcgggggcaagggcggcggcgaggaggacctgccgaccgtgcccgtgacgggcatcgacgacaccacccagggcgaaggggacgagggctcccaggaacccgtcgcgccgcctgcgccggtggcgcccacgagcgccaaggtcgtgtacgaggtggcgtcgggggagtcggtgtacatggacatctacgaggacggaaacatcacctcgggcggcaccgtcgacggacctgccaagaaggagttcgacgtcaccggcacgttcaagatcgtcacttcgaaccctggcggcgtgaccgtcaccgtagacgggacgaagctcgagtcgacgggcgacgagagcaccggcatctattccttcagcgtggacttcccggccatcctcgagcagtggaaggccgaccatccgaccgccggcacggcgggaacagccggcacagcgggaacgggctcgtccggctctggcacgacggacggcgcgagcacgccggccgcctagcccttcgtcggctgatcgcctacgtgcatgttcgggctgcctccctgactcggctggccgaggacgcgcgttcgatgccggccgccccggcgcatccggccagcctccgaggttgccgcgcgcccgggacggccatttttgcgcgcatgctctcggccgctgttggagaagaacgcctcggcccctcccttcgcaccttgcgaaactcgccggctggtaaagaaaaagccgctcgccgtcccttttccttcgcacccttagggtccctgacgaagaagagccgtctcgtcccgttcccttcgagctctgtgtaactcgcctgcaatcacggcgcgggcgggacgaaatgcggtatgctggtcggaaacgaaaaaacgagacggcccgcgcgcttggcgggccgatgaggaagggagcacccatggcgaaagagtgcagcttcgacgtcgtgtccacggtggacatgcaggaggtcgacaacgcgttccagcaggcgaagaaggagctcgcgcagcgctacgacctgaaggattccggcgcggagatcacgctcgacaaggcgaacaaggccatcacggtggccgccccggcggagttcgtggccaagcaggtcatcgacgtcatcgcctcgaagctcgtgaagcgcggcattgatttgggcgccgtgaagtggggcgaggtgcagccggcggccgggcagagcgtgcgccagacggccaacgtcgtcgagggcatcgacaaggacacggccggcaagatcaacaaggacatcaaggccacgaagctcaaggtgaaggtgcagatcgagggcgacaagctgcgcgtgtcgagcacctcccgcgacacgctccaagaggtcatcgccttcctgaagggccaggactacggccagccgctccagtacgtcaactaccgctaggccgcgcggtgggcaacgagagggcgcgcgggggcgagggccggaagtccgtggcgttcgtcacgctgggatgcgccaagaacgaggtggacaccgagcacatgcgcgcccgggcgaccggggcaggctacgcgctgacggacgaccccgagacggccgacgccatcgtggtgaacacgtgctcgttcatacaggcggccaccgaggagagcctcgaggcgatcttcgaggcggccgacctgccgaacgtgcgcgacggcggggctgcgctcgtcgtggccggctgcatgccggcgcgctacggcgaggatctcgaggccgagctgatcgaggcgggcgccttcgtgccctgctcgcgcgaggacgacatcgcgctcgtgctggccggcgtcatcggcgaggcgtcgcccggggcggagagcctggaggacgcgggcgccggggcggaggagcgcggccccgtgtcggcctacgtgaagatatcggacggctgcgaccgcttctgctcgtactgcaccatcccgtacatccgcggacgctatcgcagcttcccgctcgacgacgtgcgttccgaggtggcggccaaggtggcggccggcgtgcgcgagatcgtgctcatcgcccaggatacgggccgctggggcgcggacttcgaagagccctcgacgctggccgcgcttgtgagcacgctggccgaggagcattccggcacgtggttccgcgtcatgtacctgcaacccgaggggctgaccgacgagtacctcgaggccgtggcggcgcatgccaacgtgtgcgactacttcgacatcccgttgcagcacgttgacgcggggatcctgcgcgccatgaaccgcacagggtcgcgcgacgagttcgaggcgctgctcgcgcgcgtgcgtcgccgcatcccggacgccacgctgcgcacgacgctcatcgcggggttccccggcgagacggacgaccagttcgaggatctctgcgctttcgtggaggatgccggcttcgactacgtgggcgtgttcccctactcgcgcgaggagggcacgcgcgcgttcgacctgccgggccaggtggacgatgacgagaaagccgaccgggcccagcgcctgcgcgacgtggcggacgccgtgtgcgcgccgcgcgttgccgagcgtatcggccgcgagctcgacgtgctcgtggagggccgcgaggaggacgggcagctgttcggccgcgccatgtgccaggctcccgaggtcgacggcgtcacctacctcgaggccggcgaggtggggcagatcgtgcgcgtgacgataggggacacgctgctctacgagatggaaggggcgtgatccaggcccatggccccaaccgaccaggcgaggccggcttcgaccgacaagctgtggacgcccgccaacatcgtcacgctcgcgcgcatctgcctcgtgccggtgttcgtggtcgtgctcatcagcccgtggccgcagtggctggggctgccgcaggtggccgacgatgcgaagagcctcatcgcggccggcatcttcatcctcatatcgtgcaccgactggctcgacggctacctggcccgcagccgcggcgaggtcacggacttcggcaagttcatggacccgctggccgacaagatactcgtggccgcggcgctgctcgcgctcatcgagctggggtcgctgcccagctgggtcgcgctcgtcatcctggcgcgcgagttcatcgtgtcgggcgtgcgcatggtggccgccagcgagggcgtggtcatcgcggccagctggtacggcaagttcaagaccgtgttccagatggtcgccatcgtgctgttctgcgtgaaggactcctacatggtgggcagcctgaacgcggctttcaacgactggctgtgggtgctgagctggggcgtgatgatcgtcgcgctcgtgctgaccgtggtgtccatgctcgactacatcgcgaaggcgcgccatctcatagggttcgggcgcaagcccaaggatgcgcctgcgggcgactccgggaacggcgcgccggccgacgggccagttcccttggagggcgcggccgttgcgggcgcggcagggaagtcccggccgatcacggatgccgaggcggcctccatcgagcccgaggcgctcgacgccctggcgcgcagggtgctcgggtccgcacggcgggccggggtgcggctcggcacggccgagagcctcaccgggggcctgatagccgccgtgctcaccggcgtgccgggcagctcggagacggtgcgcggcggcgtggtgagctacgtggacgacgtgaagcacgaggttctgggcgtgccgcgcgagacgctcgagcggcacggcgcggtgagcgcggaaacggcgcgcgccatggcccagggcgcgcggcgcgatctggatgccgacgtggcggtatccgtcacgggcatagccgggccgggcggggccgagccggggaagccggtgggcacggtgtggatcgggctggccgattcggagggcgccgaggcgcgcctgcacgagttcccgggtgatcgcggccaggtgcgcctgctgaccgtgcgcgccgcgctggagcggctggaagaggccttggagggcgctggcaaatgatgctccgcgccgctgcgggcctcgttgcatttccgctggactcgcactggaaacgggcaaggtccgcacggtgagcgggcaaggttcctgcaaggtctgcacggtcgccgcgcgtggtccgcgcaaggtttcggcggctccccgacggcttttctccggttgccgtgcaaggttgcggcagtatgcttttccagcagcgaatcaggctgcacgtcttgacagacaaacagatgtacgcataatagaggaatgacgaaaagccgctacgccgggggaagaaggaccatgaacgacgaaaaagcgaagatgctcaagctcacgaccgaccagatcgagtcgaagttcgggcaaggatccatcatgaagctcggcgaggacggcaaggagctcaacatcggcgtgatccccacgggcgcgctgccgctcgatgccgcgctcggtatcggtggcgtgccgcggggccgcatcatcgaggtgtacggccccgagtcgagcggcaagaccacgctcgcgctgcagatcctcgcggaggcgcaggccatgggcggcatcgtggcgttcatcgatgccgagcacgcgctcgacccggtgtacgcggcgcgcctgggcgtggatatcgacgaggtgctcatctctcagcccgacaccggcgagcaggccctcgagatctgcgacatgctcgtgcgctccggcgccatcgacgcggtggtcgtggactccgtggccgcgctcgtgccccgtgccgagatcgagggggagatcggcgacaccacggtaggcctgcaggcgcgcctcatgtcgcaggccctgcgcaagctggcgggctcgctctccaagtcgaacaccacctgcatcttcatcaaccagctgcgcgagaagatcggcgtcatgttcggcaaccccgagaccaccacgggcggccgcgccctcaagttcttctccagcgtgcgcatcgacatccgccgtatcgactccatcaagaaggacggcgagatcacgggcaaccgcgtgcgcgccaaggttgtgaagaacaaggtggcgccgccgttcaagcaggccgagttcgacctcatgtacggagagggcatctcgcgagaaggctgcatcgtcgacatggcggtggaggccggcgtggccaagaagagcggcgcgtggtacacctacggcgaggagcgcctgggccagggccgcgaggcggcgaagcagacgctcaaggagaatcccgacctgcgcgaggagattgagctcaaggtacgcgaggccttcgagatccccgttatcacccgcaccgccgacgaggccgacgcgctgtctcccgtggcgaagcctgccaaaaagaagtagcatgtccgacgccgaggtgaaggcgcgcctgcgtgcccagatagccgccatcgagggatcgtcgcccgcctgcaaggacagcgcctcccgcggagccgtcggcccctgtcgagaggcggaggtctccgaggggtcctgcgcccccgatgagggcgccggggctttccgcagggcttcccgctcttcctgcacgggcgctcgagcccttcgcgatgcagccgactgccttggccgcgtggtgcccgggttctcgcaggaggatgacggcctgggcgccgcagccggcagccctgcagactcgagcgggggccgtgtcccgctggcggcgcgaaccggagcctccgctgccgacgaagccgagcgcgccttccgcaagatcgagcgcctcgccctcgcgcgcgagcaagcctcggccgcgctgcgggcgcgcctcgcgcgcgagggcttcgcgcccgaggcggcgtccgccgcggtggaccgtgcgctctcctgcgggctcgttgacgacgcccgctatgccgaggtgctggtgcgcagccgcctgtcccagggccgcggggcccaggggatcgcggccgagctcgacgccctgggcatcgacgcgtccgtcgtgcccggttggcccgaagagttcgccgtcgaccacgagagcgaggtggagcgcgcgctcgccctgctcgaccgcaagcctccccgcgcgaagaacgggcgcgacgccgcgttccgccgccttgtccagaagggcttcggagcgtcggtggcttccaccgccgcccgtgtttggagcgagggggaggagtgccagtgctgattgcctgcattgtgcgcatgcagcgcggcccgcagagctcaaaaccgcccaccgacctcgttttccgctatttttctgacaggacttcaccaaatggggaacaagccttatcatgtggtatagcttgagtgagacgtacccgatagggtatttcatatagatacaattccatatgatcgcccccgtattgcgtgctcttcgctcatgcccggttcgtggaaccggcctttttatgtaaaccgagcaatgtgaacaacgcatatcagaaaccaaaacgaaagggggaggcatgcccgagatcatctggctgctcatcggtgccgtgataggcatcgccctcggcttcgtcggtgcccgcttcctggccagctcgtccgcgaaacgtgcggcgcaagaggccgagaccgtggtggccgacgcgaaacgtcaagccgaaacactgcgtcgcgaggccatcgtcgaagccaaggacgaagtcctgaagctgaagcaggaggcccaggccgagaacaaggagcgcatgcgcgaggtgcgcgccgcggagaaccgcgtgtcgcagcgcgaggagtcgctcgatcgccgcgtggagtcgctcgacgcccgcgagcatcagatatcgtcccagcagggccagctcgaccgtcgcgagcgcgacctcgaggaagctgcccgggagatcgaccgccgcctggagcgcgtggccggcatgacgccggaggaggcgaaagccgagctgctcgacaccctcaaggacgaggtcgtgcacgagtccgccgccatcatccgcgactccgaggcccgcacgaaggccgaggccgacaagaaggcccgctccatcctgagcctggccatccagcgcgtggcggccgaccactccgccgagaacacggtgagcgccatccatatcccgtcggatgacctcaagggccgcatcatcgggcgcgagggccgcaacatccgctcgttcgagcagctcaccggcacgaacctcatcatcgacgacaccccggagtgcgtgaccatctcgtgcttcgacccggtgcgccgcgagataggccgcgtgaccatggagaacctcgtggccgacgggcgcatccacccggcgcgcatcgaggagatgttcggcaaggccgaggcgttcgtgaaccagcgcgtgcaggaggcgggcgagcaggccgccttcgacaccggcatccacgacctgcatcccgagctcgtgcgcacgctcggccgcctgcgctaccgcacctcctacggccagaacgtgctgaaccactcgctcgaggtggcctacctctcgggcgtcatggctgcggagctggggctcgaccccatcccggccaagcgcgcagggctcttgcacgacctgggcaaggccgtcgaccacgaggtcgagggcagccatgccgtcatcggcgccgacctggcgcgccgcttcggcgagaagcaggacatcgtccatgccatcgaggcgcaccacaacgacgtggagccctcgagcgtgctcgccgtgctcgtgcaggccgccgacgccgtgtcggctgcccgccccggcgcccgcaaggagacgctcgacgcctacatcaagcgcctcgagaagctcgaggagatcgcgaactcctacaagggcgtggagcgcacctacgctatccaggccggtcgcgaagtgcgcgtgatggtggagcccgaggtggtggacgaggccgccacgaccgtgctcgcccacgacatcgcgcaccgcatagagaacgagatgcagtaccccggccaggtgaaggtcgtggtcatccgcgagagccgcgcggtcggcgtcgcgaagtaaggcgaccccggcatggccgacggctcgctggaagccttcatagagaacgtcagcggcgacagccatctccgggtcgaggcagacctcggggatggtttcgtccgtttgaggagcgcggaggccgagcggcggcaagccgcccacgacatccgctccacggaggacatcgtcatcgagatgctgcgcaacgcgcgcgacgcccatgccaagagcgtgttcgcggccgtgtcccgcgagggcggccgccggcgcatcgtcatggtggacgacggcgacggcgttccgcccgctctgcacgagcgggtgttcgagccgcgcgtcacctccaagctcgataccatgcacttggacaagtggggcgtgcacggccgcggcatggccctgtactccatcgccgtgaacgccgagacggcgcgcatagccgcctcggatgcaggtctgggttcctcgttcgtcgtggagacagacctggcacgcgtgggggagaaggccgaccagtccagctttcccgtcttcgagcgcaccgacgcggggaccgtggccgtgcgggggccgaagaacattctgcgcaccgtgtgcgagttcgctctcgagtgccgccgcgactgcaccgtctacctgggctccgtgaccgacgtcgtggccacgctctacgcgttcggcctctcgtcgctcacggcggcatcgcgcgcgttcgggcatgccgacgagctgcccgtgtgcaagcgcctggccctcgccgcagacccggcggagctcgcgggcatagccgggtcgctggggctcgccctgtccgagcgttcggcgcgccgcgtgctggacggcgagataacgccgctgtcccctctgctcgaccgcgtgcgcatcggcaacgacgctcccgagcctgcagccccgcgcaccgcagccccgtccgcctccgaagacgcgcggggtctcaagctggcccgcgaggatctggacgacttcgcgggccaggtggccgccgcctaccgcgacgtcgcgcaacgctactacttggagcccgacgtgcagcccgaggtgcgcgtgggcaaggacggcatccgcatccatatccccgtgagcaagctccgctaagttccgcataagctgcgccgcctggtcggcgaacggccatatccgcaggttgcacgccataccattaatagctagaataacggtaccgtgaaaaagcggcgcgcgggcgccgcacgcatattgaacgcacgccaaacgcacgagcaacgtactcaaacgacgaaggatatgcatgaccgcacccgagcacaagccggacatcggctgcctgaaggtttcatcgaaatcgtcgcccgcttccgtggccggagccatcgccggcatggtgaaggacggcgtcggcgtggagatacaggccgtcggggccggagcggtgaaccaagccgtgaaggccatcgccatctcgcgcggtttcctgtcgcccgtgggcatcgagatcgcctgcgtgccctcctttgcggacatcgttatcgacggcgagtaccgcacggccattcgcttcgcagtcgaaccgcgctacacgcgcggcgtctccatgcccgctgccggcggggaagcggaagccgccccgtccgcccctgcgcactgaggatcgccatgcacacgcataccccgttcacgaacctcgcgttctgcatccgcacgttcggctgccagatgaacaagcacgattccgagcgcgtcgccggcatgctcgaaggcctgggcgcgctgcccgtcgatgccatcgaggatgccgacctcgtcgtgttcatgacgtgctgcgtgcgcgaagccgccgacacgcgcctctacggtcaggtggcctcgctcaagaacactccgctgcgcgccggcacccccctgtccaagcgcgtcgtggccgtgggcggctgcatcgggcagcgcgacgggcagaagctcgtcgatgagctgccgcacctggacgtggtgttcggcacgcacaacctgggctcgcttccgcgactgctggaagaggcgctcgacgaggggggccatcacgtggaggtgctcgacgccggctcgtcgtttgcctcggagctgccgacggcgcgcgagcacgcgtgggccgcttggcttcccatcgcgcagggttgcaacaacttctgctcgtactgcatcgtgccctacgtgcgcggccgagagaagtcgcgcccgctcgaggatatcgtagccgaggcggagggctacgtggccgccggcgtgaaggagatcacccttctgggccagaacgtgaactcctacggccgcgacctgtacggctcgccccgcttcgcggccgtgctcgatgcgctcgacgccacgggcatcgagcgcctgcgcttcgcgacgagccatccgaaggacctcaccgacgaggtcatcggcaggttcggcacgctgcgctcgctcatgccggcgctgcacctgcccgtgcagtccggctccgatgccgtgctcgccgccatgaaccgccgctacacgcgcgcccattacctggagctcgtgcgcaagctgcgcgaggcgctgccggagatcgcgctctccaccgacatcatcgtggggttccccggcgagacggcgaaggacttcgaagacacgtaccgccttgtggacgaggtgggctaccaccaggtgttcacgttcatctactccaagcgcgagggcacgcctgccgcctcggtcgacgatcccacgccacgcgacgtgatccaggggcggttcgaccgtctggtcgatctcgtgcagaagcgggccttcgaggcgaaccaggtcgacctggggagcacggtcgacgtgctggtggagggcgcttccaagcgcgatgcgggcctgctcgcgggcaagagcccgaagaaccagaccgtgcatgcgccgctgcccgaaggcgcctcgatcgaggagctggccggtaccacggtgcgcgtgcgcatcgacgaggcgaagacgtggtacctggcaggcgaggtggcgggcggtgccgtgccgcccgcggaggcggcggatgggcgctgaccccgtcgtctgcatcgtcggccccacagcctcgggcaagtccgcccttgcgcaggccgtcgccctcgcgctcgatggcgaggtggtgagcgccgattccatgcaggtgtaccgcggcatggacatcggcacgggcaagctcgcccccgacgagcggcttgtgccccaccacggcctcgacctcgccgaccccggcgagccgtactcggcggccctcttccaggaatacgcccgcgcctgcttcgaggacatcgccgcgcgcgggaggcgtgccgtgctgtgcggcggcaccggcctgtacgtgcgcgcggccatcgacgcctacgagttcccgaagggggagcaaacgggcaatcctgtgcgcgagcattacaaccgccttgccggcgagcaaggcgccggcgccctgtgggagctgctgcgcgagcgcgatcccgcgagtgccgccatcgtgcccgccgccgacgtcaagcgcgtcgtgcgcgccttcgagctgttggaggacggcacaagcctggccgagcagcgcgcgaagctggcgagcatcccacagctggtaccggcatgcttcatagggctgtccgtggatccgacggcgctcaacgcgcgcatcgacgcgcgcgtcgacgccatgttcgacgccgggctcgtggacgaggtggcgcgtttgctgcaaagcggattccgggacggcatcacggctccccaggctatcgggtacaaggaggtcgtcgccgccctcgagggggagacgacgatggaggaagctgcgtcgtgcatcaagacggccacgcaccgctacgcgaagcggcagcgcacttggttccgcaaggaccggcgcatccgctggatagatgcaaccgaccctgaccccgcggcccaggcagccgaggcgctttccttggtgggaggcgtcgttgcctgagcgtttccgcagcagggcgagcttgtagtatgatacggttctgcaggccgaccctgccgagccttcaagatcggagcacctatcatgcagacagcacacgcgtttctctagcggttgcgaccgcgcccgactgtctccgcacgccgccatccgcgccggcgtgtcccttcttgcttcgaaaggttggctccatgtctgaatttgaatccgtaatcacgcggggcgcgatccccgtttccgaagagcgccgcgagaaggccgtgctggtgggcgtcgaccgccccggcgcctcctggccgctggcctcgtcgcttgccgagctcgagcgtctcgtggacacggcgggcgccgacgttgcggccgtcaccacgcaaaagctcgacgcgccgaacccgcgcacgttcgtcggctcgggcaaggccgaggaggttgccgagctggcacgcgcccacgcggccgatctcgtggtgttcgacgacgagctcacgccctcgcagcagtcgaacctcgagaaggtagtcggcaaggaagtgaaggtcatcgaccgcacggcgctcatcctcgacatcttcgcgctgcatgccaccagcaaggagggccgcctgcaggtgcggctcgcccagaacgagtacctgctgccgcgtttgcgcggcatgtgggcccacttggcctcgaaccgcatgggcggcggcgtgggctcgcgcttcggcgagggcgagagccagctcgaggtcgaccgtcgcatggtgcgcaagcgcatcacgtccatcaagcgcgagctcaagcacctggccgaggtacgcgccatccagcgcgagagccgctacgagagcggcatgttcaaagtggcgctggccggttacacgaacgccggaaagtcgagcctgctcaaccgcttgacgaacgcggacgtgctggcctacgacaagctgttcgccacgctggactccactacgcgcaagttcgagctgcccgaagggcgcgagatcaccgtcaccgacacggtcgggttcatccagaagctgccgaccacgctcatcgaggcgttcaagtccacgctcgacgagatcacgggagccgatctcgtgctgcatgtggtggatgcgtcgtcggacgagtacgaggcgcagatcgctgcggtggaggacgtgctcgggcagatcgaagctcaagacttgcttcgcgtgctcgtattcaacaaatgcgacctgctcgacaaggaacatttcgatgctctcaaggcgcgtcatccacaggcccaattcgtatcggcggcaacaggggagggcataagcgagcttgtcgggcatatcgcccgtgtcgcctcggcgcaggacgagcatctcgccatagtgattccctacaaccggggagatctcgtctccctcgcgcacgagcgttgccatatcctgtcggaaaagcacgaggaggacggtacgcacctcgtcatgttggctgctccgtcctttgccggcctgtttcgcccctacgtggcggagaaggaccgttaggcacgtccctttcagaaagctgcaaactacttggttagagtaactctaaccaagtagtttgcgaccggatgacgcgatctcggatcaccggtcggtctcgggacgaacgagcgcccctcatcccaaggccggcgtttctcctgcaggggccgtaatccaacagggcgtctcgctccttcggcagggccccgcaaggcgtcgcctacaggcgacggaacaccgccactaccttgcccgcgatggagcagtcggtggtgatgatgggctccatcgtggagttctccggctgcaggcggatatggtcggattccttgtagaagcgcttgaccgtcgcgccgtcgtcgatgatggccacgacgatgtcgccgttgttggcgacgggctgttctttcaccaccacgtagtcgccgtcgttgatgcccgcctcgatcatcgattcgccccgtaccgacagcaggaacgacggtgcatcgcccacgatgtcggtgggaagcgagatggtgtcggtgatgttctcctcggcgaggatgggggagccggccgccacattgcccacgagcggcacgttcaccaccttgttgaagctgggcttgatgacgttggaagtgctctctgcatcgccaagcggataggtgagcgcgatggaacgcgacttgaggggatcgcgcttgatgagccccttgtcctcgagtgctttgaggtgcacgtggactgtcgaaggggaggaaaggcccaagctttggcagacctcgcgcaccgtgggaccgtagcccttctcgcggatgcactcctcgatgcagtcgagcaccgccttctggcgtttcgtcactttgtcggacatgccccgttcctttcccttgaacgaacaaatgttttaaatacgtattgacatgaacttttgttcgttctattatatatgcgaacaaaggttctacgcaaggcctaggaggcagaaagatgaagaatttcgagatgcggtgccccttcgatggcacgtcggccctgcagccggagttcaaccgtgtatccgcagccggggctatcatcgagtttccagggagcggttcccaaggtgcttgcgcgccgctgcagcattcgcacgcgcgtcaggtaccgtctgctgcgtgccgtgctcgcagacttggcgctacggagatggcgcgggttcttcgtcatggcagtgcggcaggtcgcgcttacggccgtgtgaggccgtggcaaggcgctcttgccggatgcgtcttctccgttttcgccttcctcagcattttcatcagcttctagcgacttcggaacgcccatggatactgcatttctgtgactgcgcggcatcctcgccaccatggcgctgccgttccatcgcctttccaccccgcaggacccttcctccttgcaggtccatgtggtagactgccttttgaaccgaaatcccagacaggctgctgtgaatgcggccttcgagaaggagacaaggaacatgaagttctaacgaaagccttcgggcacccgccaggtcatgcaagctccgcaccgggtgcgctttcgttgctgttccttgatgttcctatccctagcctcgccgtctcatcggcgccaggttgccagcgcgaaaagcattgaatccggtgcctctcgaagggaggcccttccgtgttcgtttcagcccgccatcttacctatacctacgacggcgccgatgccttggcgctcgatgacgcatccgccgtgttcgcgcccggctggaccggcgtggtcggcccgaacggagccggcaagagcacgttgctcaagatcgtatgcgggatgctcgagccccagaaaggaagcgtttctccgcaggtcgcaggatcgttctgcgcccagtcgaccgatgtcgcgccaacggggctcgaggagttctcctacgactaccgccccgaggccgtgcgcctgcgctacctgctcggcatcgacgacgcatggctatggcgctacgacaccctgtcacatggcgagtgcaagcgtatccagatagcatgtgccctcgcagccgatcctgtgctgcttgcactcgacgagcccacaaaccacctcgacgccgaaacccgcgaactggtggcgcgtgcgcttgccgagtatcgcgggacgggccttctcgtctcgcacgaccgcgcgttgctcgacgggctggtgagctcgtgcgtgttcgtggatcgagggcgtgctgtgaccgtgcccggcacgtactctcaggcgaaggagcagctagacctacgccgccagactgccgtagaggagcggtcccatgcccgtcgcgaactggcgcgcctcaagacggagagcaatcgtcgagacggggtggcggcgcgttcggctgcacggcgctcggctcggcatctcgaccggcacgaccatgacgggcgcgcgaagatcaagctggccatctattccggccaggatggcaagaccgggcggctctcgtcgcagatggggaagaaagtcgagcgtgcagagaagcgcatggccgaggttcgcgtcgccaaggtgtacgagggtgcgctcgacctggaagccgagcccgccgcgcgcacggtgctcgtccgatgcgaggccgggtccctgacgctgggcgaggggcgcatgctgcaccatccgcagctgtacgtgggcaacaccgaccgcatcggcctggtgggcaggaacggtgcaggcaaatcgacgctgcttgccgaagtgctgcggcaaatgccggaagagggcatggtgtacgtcccgcaagagataggaagtgaccgggcgcgcgcccttctcgcctcggtgaaggctctcgcgccggcagagcgcgggcgcctgctctccattgtcgcccggctcgattcgccgccggcacgcatcttggagggagacgacttgagccccggcgaggtgcgcaagctcctgttggcgcagggcctgacaggacgaccgcatctcatcgtcatggacgagccgacgaaccacctggatatacgctctgtcgaagccttgcaggacgtgctggccgattgtccctgcgccctgatgctcgtgtcccacgacgagcgcttcctcgacgcgctcaccgcaacacgatgggtgttcgacgttggccgtgccgaagggagagggctcggcgacacccatgtaagggtggagctttgaccttttccccgtggtcgaacaccggtgaagccgagatccacacccgcttcggaccgcctcctttccgcagggggcggtttttttgcagggatcgacaatgcggattgaagcacaatatcttgtatgctaggctgatccaaaatcgagcaaaggagcctttcatgcgctgtccttcctgcggaaaccccgaatcaaaagtggtggactcgcgcccttccgaggatggcacggctatccggcgccgacgcgaatgccttgattgcggccgtcgattcaccacctacgagcgtttgggcgagaacccgctcatcgttatcaaggcggatgggtcctccgaagcctatgaccgccagaagctcatgcgcggcctgctcattgcctgcgggaagcggcctatctcacccgagcagatagcgtcgctcgtcgatagtattgaaaccgagcttcgcaacgcctcctgcaacgagatcaggtcaaaggaacttggcgatatggttctcgtgcgtctggcgaagctcgacgatgttgcctacgtgcggttcgcgagcgtctacaaggacttccaaaacgtagaggagttcgcagccgccctcgaggggctgcgctgatggagcgcctcgcgattcccctcaaggcgctcgatgccgaacttccggtgcctgcctgcgcctacgcgggcgatgctgccgtcgacctgcgctcgacgatcgacgagacgctgcagccgttcgagcgcaagctcgtgccctgcggcattgccgtcgccattccggtcggctacgctggtttcgtcctgccgcgcagcgggttggcggcgaggcacggcgtatcgctcgtgaatgcaccggggctcatcgacagcaactaccgtggcgagatcaaggccatcctcgtcaacctagacccgcgcgagcctttcgaggtcaagcggggggaccgtatcgcgcagcttgtcatcatgcgcgtggccgaggccgtgtttgattcgtgtggggatcttcctgctaccgatcggggcgccggcgggttcggcagcagcggcatcggcgcatagcggttccggataggtcgaggctttcatattgcacttatagttactctaagttaaaatcgttattggttagagtaactctaagcccgtactcaagtcgacttccgaggaggcctatgggcgacgagggacataatagccggatcgttgacgtcccggctacgcaagccgatccgatctacggcatcggcgacgttgtcgccttgacgggaatctcggctttcaccatccgctattacgacaagtgcgggttcttcccgaaccttcatcgcgacaagcgcggcgtgcggacgttctccgaggccgacgttgcccaactgcacctggtcgaggcgcttcgcaaaagcggcctgtccatcgagggcatccagtacttcgtgcgcctctgcaagcgtggcggcaccacccgggccgaacgcctgtcgatcttgcgggcgcaagagaccgtgctcgagtaccagcgcgaggagctggacgagagcctgaaacgcctccatgccgctacggtggatttggaagctgcggaacgctcccaaggacacggcatgctatagtgcgtgggcgaagcgctagaaaacgccctgtttccatgacctaggactcgtcgaagggcaagatagggccttagaacggctctcaaagcctcgtttataaaaccgcaggtcagagacgcgatattttgacagattggacgaaatcgactatggatgaccaaaatcagccacccaagccacccggataccccgaacctccgaaccaaggcccgaggctgcggcccaacgaacgcgacgttcgcgacctgaaggtggcccagaacctcgtcatggtggcaagcatcgccgggccggtatctttgttcattggaggcgtgttccttgcaaccgccggactggtgtgcgccatcatcgcgctcaagaagctgaacgcgctgtctaccaggttgaccgatgtcgccgcgccagcgaagcgacttaaacggtcttgcataatcggtatcgccgtatgcagtatcgcgctggtcctgaacgcggtttccgcgtacctcatgtacccggccgtgctcgaggccatcgaatccggcgattacggaaacctcgcacccggcaccgacctgggcacaacccccaaaggcaactcaacttggggctagcactccggcacttcccccaagattgacatttcgaacgtatatttgtctaacttaagtctgtcaaaactgactagccatgccatgtttccgcttgctatgctggcattcctccttgggcgccggaaggaggtgctccagcatgcccaagaaacaaggcggacacctgaccatgaaggacaggcgggacatcgaggaccgtctccacgacggggagagcctcaactccatcgcatcgcacctgaaagtcagctggccgaccgtcgccgacgaggtcaagcgccaccggacgcaggacagcccgcattacaggagcttcggggagaagaacctgtgcaggttcaagtcgacctgcgacgtgatcggcatctgcgggatcgactgccattcgaagtgcgcgaggtgctcgcacgccgtctgcaacaggctctgcgacaagttcgagatgatcgaggactgcccgaagctcgagagggctccctacgtctgcaacggccgcaggacccgcctcgcgataggctgccagtatccgaactggttctacgacgcgaggctcgccgaggaggaggcgcgctggtccagcgtggactcccggcaaggggtgaactgcaccccggagcagctcgaggagatggtgggcgtgatcaagccgctcctcaagaaggggcagagcctcgagcacatctggcagacgcatcgcggcgagttccccgtcagctaccgcaccttctaccgctacatcaacctgggcgtcctcgacatctgcaacctcaacctgcccaagaagatgcgctacaagccccgcaagaagcgcgggaagaccctgcctttcaagaccgacctgcagggacacacctacgaggacttccagaagctgcccagcgacgtccagatgtcggccgtggagatggactgcgtcgagggaaagaagagcgacgagaaggcgatcctcacgctgctgttccgccggtactgcttccagctgatgatcctcatgcccgcgcaaacgcaggaatgcgtcggccgcgtcctcgaccacatcgagatactctgcggcaaagaggagttcaggaagcacttcggcatcatcctcaccgaccgcggccacgagttcctggaccccgagaagatcgagacgagcatagacggcgggaagcgctgcagcgtctactactgcgacccgctgcagtccgggcagaaaggccgctgcgagaagaaccacgtcgagctgcgcaagatcctgcccaagggaacgtccctggaaggcctcaccaattacgagctttccatcgtgtgcagccatgtgaactcgtacgcgcgccccgtgctcggcggcttggctccgatcgcgctggccagccaggtgctgccggaagaccttctcgacggcctggcgatccagcgcgtcgagccggacgacgtgattttgcgcccgagcctcctcaaggagctggggctgcgctagagaacggcgaaaaggacgacctggaagccgtccgaaaccaaaacggggccttagaaaggctctcaggagttttaccagttcagagcgatagatttgcctgacgtgacgataagaagcgaaataacgacgatgcgcccgaggggaacacaaccgaataggaagatgcaggcccttgaagtcaaacttaagtctgacacatcgtttgacaggggcttagatccgcgtatgcttaaaccgaccaaaaagggcccgaaaatggccgtctccgcagcttgacagagcaaagtaacaacctcgaatatcccctcacgtgggattgccagagtgaagtaacaacttcaccgaaacttgacaccattcaaactttgccctgtcaattaaccccggcacttccccataggtacaacagaattattgataacatatgttatgtaaagttaatgatggagagcccgttggtcggtgatgggtggtcggtcggtggttgatagggatcggggtacggggttgttatgctcggttattatttcaaaatatggcagaatatcgagggatgagcggggatcgatctggcggcgctttgcaaccaatgccccgttttttgcgaaggctttcctggcagtgctgattctgtgcctgcttggctttgttgcttcaacgctgctgccgagcgattttgccgttactgtccaaattgccatcttggcattcacgcttgttctctcctttttctattcgatattgctcaacaagttcaagcgcaaaagcgcgttgggcgacctcgggtgtgtattcaagcaggttgagtgtataaggcgaaagtttgttgcccaaaccggtctgactcccgacgccctcggtttcatgcgagaagaggcccagcggttcctgtcggcccggcgcgaggcgcgcaagatgttcaccgattgcgcgtatgcagcgctggtggtgggagtatttgtatctttcttggtgaggcttgcagattcgtctggagactccacctgcatgagcttcgcaacgactcttttcgtaatagtcgggttcgcgatgatcgtcctcatgtctctagctggccccttgtgggatttggcggaccagaaaaatgaaatgcccgtcgaaagcgtcgagttgttctcaagggatattggatttatgattttgatcgagcgaggatgcaagccgcagaatgaaaagcgctcccattgcgtggctgaagctgtgcatactggttccagaaacatgccttaaagttactctaaggcatgtttctggaaagtttggtccttgttcagtgcgcgtaggagccgctttgctcatataagcgccgtgtgtattcgccgtcaggttccaacgagcaaacgtttccgtcggcgcgctgaacggaaacgttcttagggaacgtccctccccttcctataatgggcctacagggtggcaggcgacgatctttcggggaggtaccttatgaatcgcgaggagttcatggctctggaatcaccgaagaaggcggaggaactcaacgtcttcatcgaggcggggatgagccagaaggaggctatggcgcagatcggggtcagtctgaaggacctcgtggcggcgcaggtgttcttctccaagggcgagggcaggttcgtggcaaacgccgtcggcggcttctccaacttccacagcgacaccaccgcggaagccgcgaagtaggcctcagtcatagaaagaaggcgcgcaggagagccgcagcatcgcgactgtcctgcgcgcggcaagacatgccgccccagcccagctcggcggcaatgcatgtgcaaagccgcacacctagcagcgcaccccgctcgattccgcctcgtcgcccttcttgaccaggctttccacaaaatccgtgatcatggcggcagactgcccgcacacgaagatgcgctccctgccgtcgaccgccacttcccggacgatccccgcccgagccagctgcctgatggcctcgttggtggcgccgtagctcttcccgatcagctcggcagcgcgtatcgtggagagcccggggtttcccaaaagcaggtccaacagcttgtccagtgccgaatgggccggtatgcgcaggttctgcgacctccacttcgcgctcagcttctccgcttcggccaagaacgagtccgccacgaccaccgacaggtacgtgttctgcgcattgtataccgcccagtgctcccttaggtcctcccccttccccggcgggcggtcgatgcgcgaggagtccttcagcttccgacggtattccctaccgatcgaggcgccccagcatatgggcgccatgtagccgctcgcgaaaaggccgcgtctgaacatgggcatgaaggccagtatcaaccccgtccggtcgatcatcgtgtcgaacgggacgatcctctcgaaagcccagtggatgatggacgcctgcccgagcggcgagtacgcctcgctgctcgcaaaggcgcagaggtcgctgatttccaaagggatggcggttgggtcggaccctttcttgtgcggcaggaagttgctcctgaagccgtggtagcggttgtcgcccgtcttgccgcttaggagtatctcgtgaaggtgcaggacggtctccatggtgatggcggcatcctgcctgctcacagcagaagcccactctatggcctgcataaagtgaatcgcctgcagggcggcgttcaggcggtcgtcggggagccggaactccggcctttgcatgcgtatgccctgctcggcatcgccacggtactttccgttcgacagatcgaacgcagtgatcaggggaacgaccggaagcgtcatgtcgtgcgacatgcgtatggcgaagatggcgtcgatggccagcagcgtgtcctgcaggtacttggcgctggggctgtgcgcgagccgttcgccgaaccggatcagctcggcctccgccttgtagaactccgcctgggtcaaggccgaataagagtagccggagtatcccatctcacccctgtccttcccctgaaagctcccggccggcaaaggcgcccgccctgccccgcgccggcgaacgacttccgcacccggcaaccttttggccggcgtgccgtatccgggaattctccgttcattttagcatctggattttccgggtcgcctcatccttcgcaatggcgggaatccgcaaaattcgggtcatgcgatattcccgaataagggaaaagcagaaactaccttgcgaaccccctcccgcgctcagtagcctgcaggcaagcgggttgcgccaacgggcgcgagcgcgttctttcgagcgagccgctcaaacgaaagggggcacgatgtcaagggaatcggtagtcgagaaactaggcgagcgtcacgagggggtcgacttcttctacaccacctgccataacaacggctgttgggacgccacctgcctgatcaagtgcagcgtgaaggatggaaagatcgtcgccatcgagcccgacgactcggtcaatccgggtatcgcacgcgaggatgacaacgaggatgccgtccagaccggcatgctccaggcccgcgcctgtcccatgggccatgcgtggcgccaggagctctactcggagaaccgcctgctctaccccatgaagcgcgtgggcgggaaaggctccggcaagggccgtttcgagcgcatatcctgggacgaggcgctcgacaccatcgcaggcaagatgaagcagatggccgaggagaatcccgacaacccctggctgtactactgctactacgtggcgttcgagagctcggacttcccgttcgcctcctacatgccgggcaccatcaccggctggggcgaccactcgacctccggcagcgccgccgccgaggacttccacctgggcgtgcgcctcaccgactgcctcatcaagggaacgtccgacgcatttcccggcttcgaggcccccgatctgctgaactccaagctcgtggtgctctggggattcgatcccatggtgtcgtggttcggccacgtgccctactacatgaagctggcccaggagcgcggctgcaagttcatcctcatcgacccggtgtacaacgtgagcgccgaggccctgggcgcccagtggatacccatccgccccggcaccgacacggccttcggcttggccgtggcctacgtgctctacaccgaggacctcttcgaccacgagtacgtggcgcagtgggtggagtccgagggcttcgaggagtggcgaaagtacgtcgtcggcgaggtggacggcgtcgcgcacgaccccgcatgggccgagccgatcacgggcatcccggccgagaccatcgaggccttcgcccgctactacgcctccatgaagcccgtccacctgcagcagatgtacggcgtgtctaagcgcaacctgggcgactacgccgctgccgtggccatgctcctgcaggccatgaccggcaacctgtccattcccggcggctgcgagggcggcggcgccaacctggtgacccagccccgcctcttcgcccccgtgcctgataccggccagatcaagggcgacgtggtgaaccccatcaccaataacaacaacaaggtgaccgaggtcatgcactgccagaagctctacgctgccggcgagatcaccgaggacgagttccgccgccgcatcggctgcccggccgacagcccgctgccgaacctgaagatggccatcatcccgaacaactacatcaacaaccagcatcatgtgtccaagcgcatgcagggcttcgcggacatggagttctcctggggctggcagtacttccacgaccagccctccatcgagttcctcgacatcgtgctgccctcccccgtcatccagttcgagtctacggacatgcacttcttcggcatcaaccggttctggaactcgccgtccggcatgatgaactacttcctgttcgccggcaagggcgtgaaccccccgggcgaggtccgttcgaaggactgggtctggatggagctggcacgccgcctcggcttcgccgacaagtactgcccgaagatgctcgacgtgaccgactggcgcgactgggacgagcaggtcatcgagcgcatctacaagccggcctacgagaagtgggccgaggacgagaacggccttctgggctactacgaggtggagccgccctcatgggaggagttccagaagctgcccatcgtccgcgttcccggcgagcccggcgagtggttctaccccttcaagaacacggtcgaatggggccgctcccccttcaagacgccgtccggcaagatagagttcgagagctccttcgtgaagggcaacgacctgacgaagacccgctacggcgggcagatggacgcctacccgcgctggcagcccacctaccaggacctgcccgcgaacgacagctactaccacccgtggacgaagaacttcccgctgtccatggtcacgccggtgtccacgtaccgccagcactcgtccaacgaccagaacccctggctcaagggcgactgctacgagcatatggtgcgcatgtcccccgccgacgccgccgaccgcggcatcaagacgggcgaccgcgtgctggtgtacaaccagttcggcgaagtggagatcaccgcgtacgtctcgtcgaagctgctgcccggcaccgtgtccatcgggcatggcgaatggtccaagttcgacaacgtcaggaagtccaagctcatgccctacggcatcgacgaagccggcaactgcaacctcctcataggcgacacgcacctgccgcatgtggtgggcgcgctgctgacggccggcctcgtggagatcaggaaggtgggagaataacatggcccagtacggattcttcttcgaccagggacgctgctacggctgcaaggcctgctcggtggcctgcaaggactggtacgacatcgcacccggccccgagaagtggatgagcgtctacatgtgggagaaaaacgcgttcccgctcacgtccatcggcatcctggccttcagctgcgggcattgcgacaaccccgtgtgcgcctccgcctgcgagcacggcgcgatcttcaaggaggaaaagtacggcgccgtgctggttgaccaggacaagtgccagggcgaccgcaactgcttccaggcctgcccctacggtgccccgaagttcgcgagcgacgagcccggcaccaagatgagcaaatgcaccctgtgcatcgaccgcttggagaagggccagctgcccctgtgcgtggcctcctgcccgatgcgcgccctggacttcggccccatcgacgagctggtggagaagtacggcgacgtgcgccagatagagaccatgcccgatcccgagctgaccatgcccaactgggtcgccaaggcgaacccgcccaaggagcagctcattccctacgatgcggagaaggccgtccagctcaccaagcgccgcaccgccaccgacgacgtgtacgcgggcggctgcggcagcgtcacggagctcggcgacgacgtcatgtgcctccgcgagctgcgcatgaagaacgccactgcggccgaggtcatggccgccacgtcgagcgaccagggctagcgtcggcaaggcatcgccttgggatgcgcgacaaccaggctcgcacgtcgcgcatcccgatttcttaccgaatgcatgcgaaggggggaaccatggaatcggtctttcatcatgtggggatctactgccgcgatatcgaggagtccatcgcgttctacgaggatgtgctcggctgcaggctcctgttcgagtcggacgcccaggagggcgacaagccgctcaagatggcatggctcaaaagaggagacctcgtcttcgagctgctggaatgcgaggacaaggccacgtgcgaggccgccgggagctgcctcaaccacgtggcgctgcacgtggacgacatggacggcttcgtcgcgcatctggccgagcggggcgttgccgtcgaggcgggcccgttcgacccgcccctggagttcgaccgtcttctggcaggcggcgactccgacgttttcgccgtctgcggcgatgccggggcgcagctgcggatcatgttcttccgcggccccggaggggagcgcttcgaagccgtccaggacaacataagggcgctctaggccgaaggggttgcaaggttccggcctgggctcgtgcatgcgaaacaccaaaggaggaggtgccttatgagcaccagcaagaaatacgggaactgggcgctgatcgccgttgccatgctcctgttcggaacggctatcgcgacgatccagttcaaagtccccgtcgtcatgggcgacatcatggcgaacatggacatggatgcaagctccgcgtcgtggctcatgtccatgttcacgttcgtgggcattgtcctggcgcttcccacgggcgcgctcgcgaagaagttcggcccgaagaccatgctgctcgccgctgccgccatcatcgccgccggctcgctgctgggggccttcgcaggcaacggcatggtcctcatcgtttcccgcgccatcgagggcgtggcgttcatattcgtgaccatctgcggccccctggccgtgcagaagtacgtcgcccccgacaagatcggctccgcaacgggcatctgggcgctctgggtctgcctcggctcggtggtcggcggcgtgctgacccccacgctgtacgcttcgaccggtttcgtgggcgtgtgggtgatctatgccgccgcggccgtggtgttcgccatcgtggtcgccgtgatcgtcaagaatcccagcgaggcgctcgagggggccgcggacgctcccgcagaggggaaggtgggttacggcgagctcgtgaagcctaacatcctgctgttcttcgccgccttcctcgtcttcaacatgacgctgatggccgtgctgagcttcggccccaccttcatgcagcagcagggcgtcgacccgacgctgtccggcttcatcagcacgcttcccatgctgctcgccgtcatatcgtccccgctgttcggcgccttgtccgacaagctgggccgctgcaagccgctgtacctggccgcaatgctcgtcatgggaccctgcacgctgctcctgctcacccagaccggccctttgatgtgggtcggcgccatcgtcatgggcctcgtgggcttgggcggaccggtcatgtgcctgacgtcgtacatcaacgtcctgggccgcccggagctcatgtccatcggcatgggcgtgctcatgctggtgcagagcctcggccagttcctgggcacctggctggtccccctgctgctcgggcccgacgtatcctcgtggatgctcaccggcatcgtgatgtgcgtgatcggcttcgccggcaccgcagcgcttgccctgtgcaagttcaggtagggacggcaacggaaagccagcgttcaaggccgggcgccgtccgcaaagcgcggcggtgcccgggtagggctcgaaaaggagtggtagccatgtgcttcagaccagccgatgcgtcggcagacgcaagctcgagcaaatgccccgagtgcggccaggatatccaggtgctaagcggcatcgccttgaagaggtgcccgcactgccgatgcgatctcgtcccctatttgaagggagagaagccggttcccgcatccccggctgccccgaagccgcttgcctccccctcggccccgaaggcccccaacgtcccgaaggcctaagcggcgcaatcgctccggaaccgcccctttccctcttgccctcgggccgccagcaacgcgacttagagttactctaacgtagtgggaaggcggtgcatgtcggttctgcaacggaaaaggcgggtccctgccgcgagcgcctatgctggccgcatggactgcgaggcgcggaaaggcaggcgatgccatgaacatcgggtacgcatcgaagacgctcgggcttcccgaggggcgcatgcgttccctggtcatgcggaacgcgagcgacgagcggctggcggaggccatcggcgccaacctgtcggcgctggaggcggtcgtccgctactgcggagccaacggcatccggctcttccgcgtcggctcggacgtcatcccgttcgggtcgagcccggcgaaccgcctggactgggcgcatgcgttcggggagcggctcgcggccatcggggagctggccgccgagaaccgggtgcgcctcagcatgcacccggggcagtacacggtgctgaactcccccgacgacgatgtcgtgcgccgggccgtggcggatctggcctaccacgcggccttcctcgatgcgctgggcaccggcgccgaggccaaggtcgtcctgcacgtgggcggcgcctacggcgacaaggaggcggccttgaaacgcttcgtcgcgcgctgccgcgaattggacgcgggcgtgcgccggcggctggtcgtggagaacgacgaccgcctgttcacggccgaggatgcgctggcggcgagcgaggcctgcggcatcccgatggtgctcgacgtgctccaccactggctgaaccgcggtccgggcggccgggacgggctcgagctcctcgatgcggcggcgcgcacgtgggggccgcaggacggtccgcagaaggtgcactacgcccagcaggcaccgggcaggaggctcggcagccacgccgacacgatcggcctcgacgggttcctcgccttcgccgcatcgctcgaagggcgggcgcccgacatgatgctggaggtgaaggacaagaacgtctcggcgctgaagtgcctgaacgcgttggacgcgcacggcacgacggcggtgctcgagcgggcatgggcggcgtacaagtacagcgtgctggagcacgaccaggcggcctaccagcaggtgaggaacctgctcaaggacaaggccgcctatccggtgcgggagttctaccgcttggtggacggcgccctcgcccgcccagcgccgcccggcagcgcgcgcaacgcggcccagcacgtttggggctacgtgtcgggggccgcctccgcgcgcgagcgcgcctcgttcgcgcgcctcatggaacgctacgagggcggacaggcggacctcgtagcggtgaagcggcacctggcgaggctagccggccgctacgggcaggagtacctgctgcactcgtattacttcgacctctgagcggcatccttcgcaggcgcctccagccgcacgagggcgaggagcgccgtgcccacgagacccagcacgagcgcgaaggcgccggcggcggcccatcccccggcgccgagcaccgcgggcatgatggacgagccgaggaactggcccaggctctgcgtgagcacgaggaagcccatggcgatgggcatggcgtccttgttcgccaccaccgacgggtacacgatcagaaacatcgtgggagcgccgaggcccaccacgcccatgacgagcgcggccgcccagagggcaggcccggccgtggtgagcagcacagccgcgcaaggccccatgaccagcatcgacgccaccatgagcgccttgagcctgccggtcttgtcggccagcaccccgaagagcggcgacgacgccacggcgacgagcataggcagcgtgctcgcgaacccggcgagcgtcgcgtccatcccctcgccctgcagaaacgtcgggctgaacgacaggaacgagatgagcaccatgttgaacatgaggaacccgccgagcaccagcagcacgttgcggccgaacaggcccgccatgcccatcttctcgcgaggcgcgccgtcctgcgcccgcgggacgcgctcgaggaagcgccccccgccaaccggccgcacgaacagcagcatgagcccgcccgccgcgagcgcgatgcccgccatgacgcaccacgttccctggaagcccaccgcaccgaacacggtcggcgtaagcaccccgccgaagaacgagccgagcgagaaccacagcgcccagatgccgctcgcgaaacccaccttgtccggggcgacgtaggccctgatggcaagcggcgcgctcacgccgcagaacacgagggccacgccctcgacggcccgcgacagcacgaggacctcagccgaggtggccagcgcgcctgcggccgtgccggccaccatgacgacgacggcggccaccatcatgttcttggcgccgaagcgccgcgccaagaagcccgtgggaagcgacaggaagatgcccgccagcgtgaacaccgacatgagcatcgaggcggagcccacgtccatatcgaactgctccatgatggccggcatgatagagggcaccttgaactgcccgagcgccacggcgatgccggcgagcacgagcagcaccgacacgagcacatggttctggtacgcggaacggggacgagcgctggtctccacggaaaggctcccttcgccgcaggggaagcgcccccgcggatcgtcgcagttgaaaaaggctccccggacctcgccggggagcccgcatgaaggcgccggccatccggcgccgagcgtggcggaaagtcctacagccccaggacgccgcagatgaacggcacccagagcaccatgcacacgcagaagatgacggcgggtatcacgccggccttgaacatgtcgccgaacgtgtagtacccctcgccgtaggtgacgatgagcgtggggttcaccggcaggaggaagttgccggccacgatgaaggcgagcagcatcgtggggatggcgggcgacacgccgagcgtcgtgcagatgccgatgaggatgggcagaaacaggctgatgatggccgcgcccaccggggcgatggtgtgcagcaggtagatgaacgcaacggtgatcagcaggaacaccgtgaagttaaggtcggccacgccgctgcccatgaacaggttcgtgacgaacttgtcggcgcccgaggcgctgaagatgttgccgagggagagcaccgagcccatcatgaggatgatggtccagggcacctgcttgctgaactcgtcccacgtgagcaggttcaggccggggagcatcatgatggccaggccgatgatggccacggtcgtgacgttcagcagcgggacccacgtgccggcgatccacagcacgggcagcgcgaggatcatgacgagcgcgcgcacctcgaagcccgtgggcttgccggcgtcggcggccgcctggcgcaggctgtcgtaggcgctcgactcgagctgctcgggcttgaggatcttcacgatggagatccagcacagcgggatgcacaggacggcgatgggcaggcccacgatgatccagtccaagaagctgatggtctggccggtggcgccggtgagcacgcccatggccaccatgttgaacgaactgccggccggcgtgaccacgccgccgatgacggccgcgatgggtatggcgatcatcatgcacttgccgaggcgtgacttgccgggctcggcgccggccgccttgagcacgacgtaggagatgcccatgaagagcaccgccgccggcacgtcggacatgatggtggagatgaggcacgtgccgatcatgaacgcgaggatgagcttctcggagctctcccccgtcagcttgaacagcttggccacgaggcgcacgccccactgcgtcttgagcagcagcgcgggcagcgcgaagatggcgatgacgtagaacaccaccgacacgccgaacccgctgaacacggccttgtagtcggtcgcgcccatgaccacggctatgacgagggccagaatgcccgtcacgcccacggagaacgagccgcacacccacagcgacaccgcgaacaagagcgatgcgatggccatgatcccctggtgcgacaggtcggccgactcgggcacgaacgacgcgaccacgaggatggccacggctatgacgatgcccagccccctcttgttcacgaacccctctttgctgaagaacttcgttaacgcttcttgtgccatttgcctctcctccttaaagaaagaacgtggcagatcccctgtaagctaccgcgcctggcgcctccttcccctgggcgcggccgcgtcgtggtatacgggctcgcatctgccgacgtcgcgcaggcgagccccctttgacgacggcccctcgtggaggagccgtcggtctccaggctcttcccctcatgccgccaagcggcggcacgagggcgtgcgtctatccggcccggtacagctcgatcgggcccatgttgcggtcctcgtccacggtcgaggcctccagcacgcgcgtgaggtagccctcggcctccgcgtacacgcgccagccggctgcgcccacctggtggaaccagaagtcgccgaactcgtcggcctcggccgccagcacctcgcccgtggccaggttctcggccgtcaccctggcgccggggaccacctcgtcggcctccgggtccaccacgacgccggccaggaagcgcctcggcaggttgaggtagaacacccggggcctgtccgcccccgcgcgcccgggaacgagcgcctcggaagccgcgatctcggcggcgaggtcctcctcgtcgccgaagcgcagggctccgtgcgggcacacgtccacgcagtgcggcgcctcgccggcgtccacgaggtgggcgcagccggtgcacttctggggtatggccagctcttcgttccagaagatcgcgccgtaggggcacgcctccacgagctcgcgcctcccggccgccttctccgggtccacgatcaccagcccgtcctcgcggcggtagaccgcctcgggcgccgcggccatgcagggcgcgttctcgcagtgctggcagcggtgcatgacgtaggacaccctcaccttcggcacctggccgcgcacgcgctcctcgatgcggcaccagaagtggcccgtgtcgggctggggcctcgaccaggggctccagtcgttgtccacgtgctcgtccttgcaggctatctggcagttgcggcagccgttgcacttggccgcgtcgaacacgaacaccttgcccatggctactccccctccccttcgtcgacgacgcgcgccgtggccaccagcccgcagtccgggtcgtagtcgcgcccgaacgcctccgggtactgctcggccagcgcgaacacgtcgaccttctcgatgttcaccaggaaaccgctcgtcacctcgccgaacgcgtgcgtcgaggtcgtggcgtagggcgcgatgaggttgttcgccccgccgcggtccaagccgccgcggccgagcaccaccgagtccacgcggctgccgtggtcctggtacaccacgctcggcatgatgcgctcggtcacgcgcacgccgccgagcaccgcgccgcgctcgttgtacagcttcacgacgtcgcccgtcgaaagtcccagcaggcccgcgtcggccgggttcacccacaccggctcgtacttgtagccgtcggggcccgtcaccttgcacgtctcctccatctcgcggaaccaggtgacgtcgtcgaggttcgcgtgcacgcgccaccgcgggtggttcgacaccagcaggaaggggtacttccgcccgcgctccaggtactgccgctcctggtgccccgcgccctcgtcgacccagtgcgggatgggcccgcgctccttatcgtcggggaactggctggcgagcgtcgtggagtagtattccagcttgccggaaggcgtctggagcgggtgcccctccggatcctcgtagaactggatgaggccggccggcatctcctcccacccctcgcgcgtggggaacgggtagtactgcttctccttgaactcctcgaagtccatcttcttggccgcgcccgtgttctcgaagccggcctggatgtactcctcgcaggtcttgccgcccatgtagcgctcgtagaggttctcgtagatgccgccgaacttctccagcgcgcgggccacctcccccacggcctccatgtcggacttggattccaggcgcggcttgatggcctggcgctcgtagtacacgaggttccactggccgttgtcggagtccgtgccgatgtcctccgtctcgaacttcgtgttcgtgggcaggatgacgtcggcgaagaagcagtcgttctccatccaggggtgctgcacgacgatgaactcgattgaggggtggcgcagggcctcctgcatctcgttgccgccgttccagcacgtctcccagcatggcgtgtccgaccagatcatgtgcaggcgctcgttgccttcgagcgggaacgtgtagggaccgtcgaactggtcctcgcgcgggaacccggcgccgatgtggccgtaccaggagacgggcgggttcatgatggcctcggggatcatggtcttggggatgaagctcttggggaagctgcggtaccagccgcggtaggccgggctgcagtcggggatctcgaccgacggcggcaagggcgtcacggtgtccatgccgtagagcgtccactcgatgaacttgaattggttggcgcccggcttgcccaggccctgcatgcccaagagcgccacctcgaggcgcgccggctcgtgcgcgtagcaggagcggatgtaggagccgccgttgcagtgcgcgatggaaaccgcgtgcttggcccaatagcgtgcgaacgccttgatggtgtagctgggcacgccgcagatggcctcggcccacttcggcgtcttcggcacgccgtcctcgccgcccatgacgtagtacttgaagttctcgaagcccacggcgtgcgtgtcgaggtaggcctggtcgtaggtgccctccttgatccacgtgtaggcgatggccagctgcagggccgcgtcggtgttgggcttgaccggtatccacttgtcggcgtgcacggcgttggtgtagttcacgtcgggcgagatgtggatctgcttgatgccgagctcggtgaaccagtagcacaggcggctggccaggtagccgccccagccgagcggcgtggtctccacgtcgcagccccagaagagcaccgcgtcgccgttttgcgccacgtcgcggataacgttgttcatctgcgagttctgccccaaggggtccatgccccacatgtgcttcgcgccccagtaccagccctcccagctgtcaggctggcgggtttgcagcgtgtaggagcctatgaggtcgaacatgcggctctggcagccgtgcggcgcgtggacgaacttcgtctcgccgtggccgtcgagctcgcagaggatcgacgcgggcccgtaggcctcgtgcacgcgcttgatctcgctggcgatgagcgcgcacgcctcgtcccagctgatgcgcacgtagccgctcgtgccgcggttctgcgggttgcgctcgccctccgggtcccagtccacgcgcttcatcgggtaggggatgcggttcttcgagtacacgcgcttcttgtagcacagcgacagcggcgagatgagcgtcttgaagcccggctcgaaggtctttccgcgggcctcgagcttccaggcgttcaggtcctcgggcgtgtagtgctcgtcgaagcgcagcgggcggatgcgcagtatcttgtcgttctcctcgtcgatgtcgaccgagcacgcgttcgtgccgatgccgaagctgttgaagcccaggcccttcacgatgggcgtgcccaacacgttgttccccatgctctctcctctcctggtctggatgtccggcgccggtgcttccctcctcgggggagggcaggcgccggcggttctacgcggtcggtgcgggcggcttgggcacgctcggcaccttcggcgcgccgggcacgccggggaccggcggcggggtgggcgcgcccggaggcgtggggatcccgggcatcggcgtggccttggcgccgcagctcgggcaggcgtcggccttcgggtcgacctcggcgccgcacttggggcacttcacgggtccgttgtcgacggtgggtggtctgaagcacatgacggaactcctctctcaacttccatggtcacgcggccttcgggggccgaagccgcggtagtgcacgcggggaatgcctgcggaaaatcgttatgggagcagcacctgtccggtgcggttcgtcttcgatgcccccgattataggagcgcccctgcggggcccttgtgcggttttcccgatgggtcatcgggaaaaccgatcacgcggcctgccatcagggtgatcggatttcccgataggctatcgggaaaacgcggctcccgcatgtgccttcccgctcctataatcggggcatcggcgaacatccgcatgacgaggaggagccatgtccgagaagcttgagaagcagggcccgcaaggcgccgcggcacccgagggggacgtgccggtggcacgaacgcaggacgatctgaccggccgcgtctgccaatgggaggaggacggctgcacggtgctgcgcacgaacgcgcgcacggggccgggctgccacgacaactgcggcgtgctcatgtacgtgagggacggcgtgctggagaagatagagggcgacccggagaacccctacaaccaggggcgcctctgcccgcggtgcctggcgttcaaggagatgctctaccatgaggaccgcctgaagtaccccctgaagcgcgcgaaggaggaccgcggcaagaacgcgtttacgcgcatcacgtgggacgaggcctacgatatcatcgagcgcgagatgaaggccgtcatcgacaagtacggcaacgaggccatctgggtcacgcagggcacgggacgcgacatcaacggctacggcccgctcatggcccagtacctgggcacgcccaactacggcaccggcttcctgtcgggcatcgcctgctacggcccgcgcatcttctccaccgcgctcaagagcggcgggctgttcgtgtgcgactactcgcagttcttccccgaccgctacgacgacccgcgctgggaggcgccggagtacatcctcgtatggggcaacaacccggtggtggccaactccgacggcacgctggggcactgggtggtggagagcatgaagcgcggcagcaagctcatcgtcatggatcccacgctcacctggctcgcgggcaaggccgacgtgtggttccagctgcgccccggcaccgacgcggcgctggcgctcgcgctctgcgatcagataatcaaggacgatctctacgaccatgagttcgtgtcctgttggtgctacggcttcgacgagttcgccgagcacgtgagccagtatcccgtgagcttcgccgccgagacctgcggcgtgcccgaggacctcatcgtggaggcggcccgcaagatcggccgcgcgaagtcgtgctgtttgcagtggggcgtggccatggaccacacctccgagggcttcatcaccggcatggcgtgcttcgacctcatggcgctcaccggcaacttcgagaacccgggcggcatgctcgcggccgaccccgccttcggcatgtcggtcacctggtcgccgcgcggctcggtgtgggacgagtgctcggagcccatcccgcaccccgagcgcaagaaccacggcggctacaaggccctcgaggccatgaacggcatcagccccgacgccctgctcgaggccatggagacgggcgagccctaccccatcaaggccatgttcatgatgcagaacaacgccatcgcctgcatgggcgcccagccccagcgcatcctgcccgcgctgcagaagatggagttcaacgtggtggtggacctgttcctcacgcccacggcgctcgcctgcgccgacgtgctgctgcccgccgcgtgcttcgcggagcgcatcggcatcaccgggcaccagccctacgcgctcggcgccatcgcgcaggccgtggagcctttgggcgagtgcaagtcggaccagcgcatcatctacgagctgggcgaccacttcgccggccgcgaccatcggccctgggattccgagcaggatttctacgactacctgctgcgcagcaccgggttcacctacgactcgctcaaggagcgcgcgtgggcctaccccgaattcgagtacaagaagtacgagaaggggctgctgcgccccgacgggacgcccggcttcgccacgtccaccgggcgctacaacttctactgcgccgagatggcctacttcggcttctcgccgttcgccacgtacgaggagccgcccgagagcccggtatcggcgcccgacctggccgagaagtacccgctcgtgctcaccacgggcgcccgcaaatgggggttcttccattcggagcaccgccagagcccgtccatgcgccgcttgcaccccgagcccgagttcctcgtgcatcccgagacggcgacagcctacggcatcgccgacggcgactggtgcaccatctcgaacaacctgggctccgcccgcctgcgcgcccataccaccgtgcgcatccgcaaagacacggtgtcggccgaccacggctggtggttccccgagcgcgggcccgaggacggcacgctgttcggcacgctcgagagcaacatcaaccagctcgtgcccatgcggccgggcaagtcggggctcggcgcgtcgtacaagtcgcagctgtgccgcatcgataggatcgaggagtgaggaccatgcgcaagtacctggccgtcgactacgagttctgcacggggtgccacacctgcgagatagcctgccagcaggagcacggcctggcgcccgaccggttcggcatcaagctgacccagataggccccgaccagctggacgagcgccgctggcagtacgagttcgtgcccgtccccaccgaccgctgcgaccgctgcgcacgccggcaggcggccggcaaggcgccgacctgcgtgcagcactgccaggcgggctgcctgtactacggcacgctcgaggagctgggcgccaaggtggacaagcgcaaggtggcgctgttcacctaggaggcgtcccggccgggcggtgcggctggcgcaacgcgcttcccgcaccgccccgtgcggccgcgggggctcctcccccgccatcgtccgatacgctacaatgctgggtagacaaagggggtttgccttgcgcatcgagacgctgtacgagtttttgctgctcacgtccaacctgaacttcaccgagacggcgaagagcttcttcatctcgcagtcggtgctctcagggcacatatcgagcctcgagaaggagctgggcgcgctcctgttcgtgcgcgaccgccattcggtgcgcctcaccgaggcgggccggctgttccagcaggacgcccagcgcatcgtggaggactacgagcgcgcgctcgagcgcctgtcccagtacgccgacggcgtgtcgtcggtcgttcgcatcggcttcttggagggctcgttcggctcgttcctgccgctcgtgtgccgcagctaccgcaaagagcaccccgacgtcgacttccatttccgcaccatggagctggccaacatacagaaggcgctcaacgagaacgagatcgacgtggggctctccatctaccaggacggcatacaaggcgcgaagttctgctaccgccgcctgtacgaggaccgctacatgctggccgtgcccgtggggcaccgccttgccaagcgagcgtcggtgagcatcgccgacctgcgcggcgagcgggtggtcgtgcctcacttcaaccgctccaagagcatgctcgagcagatgcacgtgaagctgcgcaacgccggcgccgaggtgcgcccggccggtttcgaggacgtgggcgccatgatggccacgctcgtgacggctggcgccgtggccatagcgctcgaccacctgcgcgtgttcggcaacggcaacgtggagttcgtgccgctcgcggacgagaacatggagatctgcgcgggggccgtgtggaaaaggtcgaaggagaccggcgccatcacgtcgttcgtcgactttctggagcaggcttgcgagggcttcggcaaggaggacttcctcgcccgcagcggccccgacgcgcttccctcgctgcggctcccgcccgcgtcgccgagggcctcgttctccggcgggcccggccgtccgtaacagattgaaaaccgaaaggttacggcgggcatcgcgggcttacccgtactctcgcgcgcgtgctatagtccgggtagcagaacctgacagggagggttctggatgcaaggaggaaccgatgggatactcgatctccttgctgtgcttcgcaggcgccgcgttctgcatctcgctcatacggcgccttgcttaaagcacagcgcgcgaacggggccggtccgagagggccggccctttctttgccgcccgttgccggcaacggcaaggcggggcccggcatggcccttcgccgcacggccgcctgcaaccgcagccgatccgtcaacgcgccatcaccgcttcagcagcaggtcgtcctcggcagcgctgcctgcggcgacggcccgaaccgcgctgcgctacgatgcaggcccggccgctatcgggccgatccccgaccgacaggaggctccatggcaggaaggaaaggcgcgatcgccttcggcctcgtctacataccggtggagctctatcccgccacccaggacgatgccgtgcgcttcaaccagctggcgaaggagagcatgcagcgtgtgcgctacgtgaagacgtgccccgattgcaaccgcgagctgggcccggacgacatcgtgcgcggctaccagtacgagaagggcaagtacgtggtggtgagcgacgaggagctggacgccatcaagaccgatgccgaccgtgccatgaagatcgtgcagttcgtggacctgcaagaggtgccgcccgtctacttcgagaagccctaccaggtaagggcccagcccggcggcgagaagccgctcgagcttttgcgcctggccatggtcgaggagggcaaggccgccatcggcaccacggtgctgggcaactccgagacgccgctggcgctcatcccctacggcgacgacctggtcatgatgacgctgcactaccaaagcgaggtgcgcgacctcccgaagccggccgagcgccccgccgtggacgacgcggagctggacatggcgcgccgcctggtggagagcatggccgagccgttcgaccccgcccgcttcaagaacgcctaccaggagaagctcatgggcctcatccaggacaagatagccggcaagcaggtgacccccgagaagcacagcccccagcccgcgaacgtcatcaacctcatggacgccctcgccgccagcctgaaggcccgcaccggggaggatgccggaggagcgaaagcgggcagcgccgagagcgcgaaggcgcccaagccgaagcgcaagccccccgcgaagcgcgccggctgacccgcgcctgccagccggccgaagacatgcgggcatgccccgctgcgcctgacccccccgcaggagagaagcccccggctgcagcagcaaccgggggctttccgaggagagagagggagcgaaagggggttcggcggcgcctaggccacgggcggcgtgccctcggcgttgccgaagatggcgtcgatctgcacgagggcgcccatcggcaggttcgacacgcccaccacgcggcgcgcgggggcgccggggaagtagcgggcgtacacgtcctcgatggcggccaggtcggccaggtcgcgcaggtagacgttcgccttgacggcgtcgtccatcgtgtggcccacgttctcgatgatggcctggatgttcctgcacgcctgctcggcctgcgccgcggcgccgccggcaacgagctcgccggtcgcggggtcgaggccgatctgcgcggagatgttgttgtagtgcgagaaggccacggactgggtggacagcgcgctcacgggagccgcgtcggtgttgttcgcctcgatgatcaggccgtggcgggcctccacctcctgcggcggggtgccgtcgccgtgcgacaccacggcctcgatctgcacgagcgcgtgcatcggaagctcggccgcctccaccaccgtgcgcgcgggcaggtagcccacggcgcgcgcgatgcccgagtcggggaagaagcgccggtacgcctcgtccacggcgtcgaggtcggagaggtccttcaggaagacggtcaccttgacgatgtcgtcgaagggaacgtcgatgctcgcaaggatggccttgatgttcttcaggcactggacggcctgctcggcggcgccgccggccacgatctggttcgagacggggtcgaggggcagctgggccgtcacgttgttgtagtgcgagaaggccacggtctgggacgacagggcgtcgtagggggcgttgtgcgtgttgttcacgtacttcacgaggtcgccggcctggggctcgttcgggatggtgccctcgccgttcgtgaggagcgcctccatttgcacgagcgcgtcgaggggcagcgccgccacggcgaggttcgtgcgggcgggcacgtaggttgggaagtaggcccggaacgcctcgtcgacggcgtccaggtcgcggatgtcgcgcacgaacacggtgaggcgcgccacgtcgcccagcgtgtgcccgatgccctccgccacggcctcgaggttctcgaggcactgggcggcctgctcaagggcgccgccctcgacgagctcgccggtctcggggtcgaggggaagctgggccgacaggttgttgtaatgggagaacgccacggtctgcgcgtgcagggggcttgcgggcgcgccttccacgttccgtgccaggactacgttgtcaccgctcattgaggtacctgctttctcgagtgctcgcttttcggttgcgctgctcggcccctggggcccgcgccctcgcggaaggacggccctgccaggccctccctttgcgcgagggctgcattatatcgttttgtgcatctgcacaaaacacttttcgaatgatttactgaccagcggaaaaaccgtcgaccgaccgtttaccgcaaattctggaaggccctgcggggcctatgcggaaatccgggggcgcggcccccgtttcatgcaggattatggtacctaccgctcaccgattagccttgcgcgcggggccggcgcagggtgcgggcggggtcaggacggcgttttctcgggccagagccgcagcacgagccggaccgacaggacgcccacggccgcgcccaccacggcgcctacgaggatgtcgctcgggtagtgcacgtagaggtacaggcgcgagaaggcgatgaggcacgccagcgccacgcccgccgccttgagcgccacggacaggcggcccctgccgggcacgcagcagagcgcggccgcggccgcgaacgacaccatcgagtggttcgaggggaacgagttgccggcgggcggcgggacgagcaggcccatgaagccgtaggcttcgaacggacgcacgcgcccgaacagcggcttcagcacgagcatgccgagcaccgccgtggctgccacggcaagcagcacggctgccccgtagcggcggtaccgcggctgggcggccagcacggcgccggcggcaagccacacgagcgcaaggtcgcccagatgcgtggccgcgagcatgagcgcgtccatgagcggcgagcgcaggtgcgcctggatgaggtcgaggatggcgatgtccacgcgcggccccccgccctagccgcgcccgccggcgccctcgcgggcgacgagggcggacaggagccccgtgcacccggcgagcacgtcgtcgtaggtcgcgtcgaaatcgcccgtgtaccacgggtcggccacgtcgcgttcggagccggcgtactccagcagcttgcggcagcgcccctcggccccgcgtcccagctggcggcgcatatcgcgcatgttcgcctcgtccattcccacgaacaggtcccactcgtcggcgtcggcgcggcgcaggcggcgggcggccttgcccgagcagtcgatgccctgcgcttccagcacggcgcgcgtgccgggatgcgcggggctgcctatctcgtcgtcgtgcgtggcggccgaggcgatggagaagcttccggccaagccgcgccgccgaacaaggtccctcatgacgagctcggccatcggggaccggcagatgttgccgtggcacacgaacaggatgcggaaaggcgcgctcatcggccctccccctcgtccggctcgagcacctccgcatagcgcccgtacaggtcgggcaggcagcgtttgaggctcacgggcttgaacgtggcggcgtccacgaggcaatgcgtgctgcgtcccgtgcagcacggcttctcaacgtccctgtcctgcccttcccggaacacctcgtaggcgtacacggtcttcgtcgggcgcgacgacacgacgcgcgtgcgcacgaccgccccctccccgtagcgcagcggctcgcggtagtcgcactccatgtgcgtcaccggcgacatgaagcccgcctcctcgatgcgcgcgtaggggtacccgatcgcctcgaggaacgccgtgcgcgcgtcctcgaagtacagcaggtagttggcatggtagacgacgcccatcatgtccgtctcgccgtagcgtatggttattggcgtgcaaacccgcatggccgctctcacgtcccttccgttttggtaccatggtcctatgggcaatatcgtatcgtatatccaggaaaaccagcgaacgttcgcggaatcaccgttcaaccccgtcgacagcctcgtgttctccacgctctgctacttcaactacgaggcgtgcgggctcgtggacccctcgtcgcccgagcgcgtgctcctgcacgacgtgctggcgctcgccgactggcgcgcgctcacgtgcgcgagctggctggaggacgcgaaggacacgcgcgcgttcctgcacgtcctcatggccagccggcgcttccgcggcgtggagctggccttctacgccaacgagcgctcggatgccgtggagaagcagttctcggcaacgacgttcgtcgtccccgggcgcgttgccgcccaggcggagggcgcgccctacgagggacgggcctgcgggatgcgtgccgggcgagacgagttcgcctgcctggcgttccgcgggaccgacggcagcttcgcgggctggaaggaggacttcaacctctgcttcaaggaggtcatcccctcccagcgcgcggcggccgcctacctctcgggcgtggcgtcggccgtggaggggccgcttgtggcctgcggtcattccaagggcggcaacctcgccgagttcgcggcgctcgtggtcgacgagggcgcctacgcgcggctcgcgggcgtctacaaccacgacgggccctcgtttctggacgatccgtcgccccgcatccacgacgggcgcttcgcaacgcttctgcacaagacggttcccgagtcctccgcgttcggcatgatcttggagcggcggcccgactaccgtgtggtgcagtcctcggcactctcggtgttccagcacgagccgttctcctggcaggtggacggcgacgacttcgtgtaccaggatgcgctcaaccgcgcggccgtgttcttcgacgaggcgctggacgcatggctgcgcggcaagacgccggccgagcgcgagcggttcatcgacaccatctacgagctgttcgcctccacagaggccagcacgtgggccgagttccaggagggccttttcgcgaacacgcggcggctgctgggctcgggcacgaagctggacgccgagacgaagagcttcatctggaagacgctcggcagcttgggtggcatattgaaagacgagaccgtcaggcgcttcaggccgtccccgtccacctggctggcgcggcggcgcgaggcgtacgatcggaaaggacgaaggcaatgagcgaggtatcggcagcgggcggcatcggggaagacgcggggcggcaggcgccctacggccggctttccgcgcgcatggcgctgcagctggccgcgccgcacacgtggccggcggccatcctgccggcgctcgtggccgttgccgccgctgcggcggcaacggggggcgtgtccgtgacgatggcgtgcgcgctcctggccatctgcgtgctcatgcagtcggccgtgaacacgttcaacgactactacgattacgtgaagggggctgattccgccgacgacaacgtggaccccaccgatgccgtgctcgtgtacaacaacgtgaacccccgcgcggcgctcgcgctggccgtgggcttccttgcggcggcgttcctggtcggcgcctatgtgatctggattgcgggttggatacccctcgccatcggcgccgtgggcgccgtggtcgtcgtgctgtactcggcgggcaggacgcccctctcctacctgcccgtcggcgagctggtgagcgggttcgtcatgggcggcctcatcccgcttgcgtgctaccaggcgcttacgggcacgttcgacctgcgggcgcttctgtgggccgtgcccacggtgctgggcgtgggcctcatcatgttcacgaacaacacctgcgacgtggagaaggacgtggaggccgggcgccgcacgctgtccgtgctgctgggccgcgagcgggcgcgccggctctaccacgcggtgctcctcgcgtggatcgccgccatcgtggcgctcgtggccgtgttcttcacaggcggcctcgtggtggtgcccttcatgctgctggccgcctggccgctcgtgggcgcgctgctgaagaacccgctggcgccgcccgcccgcgtgggcgccatggcgcaggtgtgcagcgtgaacgtggcgctcggcgcgttctacgccgccgccatcctggcgagcgggaccgtgctcgccgtgtagggaccgcggccggttccggcgcgcagggcgctgtcggagcggcacgtcagaatctaggaggatgcgctatggagatcgtccgtttcgccgtgggggccctgctgctcgtcgcgtcggccctgctggccgtccagctgtggaacggccgctggcagttcctcgtggcccggcccgagcgcacgaagaagggcacgttcttccctgccggcacccgcgagacggggcggcacctctcctgggtcatggtcgcctgcttcgcggcagtcgccacgctcatggcctccgagatgggacggctgtccggcagcgccctgttcgcgcaggcgggcttcgtggtgagcggcgtggcgctcgtggcgtacggggccttcgtcgtatggaccgtggccttccactgcaaggcgcacggccgcccctacttcgccggcggctcttcgcgcctagtcgtcaccctcgcagccacctgcgccgtgctcaccgccctgtcgctgctgtttgcctgacggcacgcccgctttgcggctggccacagctgacctgcaatgcgattcatgccgccctgccgatgcttgattgctcggcgcgcctcgcaacggcgctttgctatactggtgcgaccggttggacactgagaggggggggggcgatggaggagttcgggaagcacctggcgggagccgtgttctggctcgcgatgttcgccctcttcgcggtattgggctggaagttctggcatgggcagtggctgcggctcatcgccggcaacaacctcgtgtccgacgaggagcagaaaagcccctttcagcgcgccctcgggcgccgcatgggcgtggtcatgctctgctgttgcggttccctcgcggcgctcgccgcctcctcgttcgtcgaggcggcgggaggcccgtcggccggggcggtgtccgacgccttggtcgcggcgggcatagccggcatcgtcgttccctgcatctgggtcgtggtatggtccaatgtccaagggcgcaaggcacgctgcggacaggagggcgcgagggaagattcccggacagccgaggaccggaggctcgaccgcctgtccggccgcgtgctcctcgccattctgggaatctacctgctcgtcatgctggtcgtggttcccttggcagccggctgaggatcttggacatcgggctgctccccctggtccgtgtttttccgcgcgccgggcgagagggagacggaccccgtcgggcagttctccacgcagtccaggcagaaggtgcagctttccagcgtctcggtttgagggtttgccacgttgatgttttcggggcataccgtcgagcacgtgcggcaaccctcatgcgagatgcacgttgcgcagttggcttgcgggcgcaggccgaagcccagcttggcgcgcagtttggccatgaggccgaagaagaagcccagggggcagatggccgagcaccagcgcttgaacaggaacagctccgccagcagcatgagcgggaacacgacgagctcccagcccggctgcagcagcacgaacacgcggttcagggcccaaagcgtcccgaacacgagcccgatggggcacagcaggcagaacacggggaacttgacggcgaacgataccgccagcaaaaccgccagcacgatgccctgggttttgaggttggaaccgtcttcggcgcacgccgcgcagccggccgccttcccggcccctccggatgcttgcggggaggccagcgcacgatcttcgccgctgcgcccaaggatgccgcgtggggtgcggccgccgaatatgtttttgagcagctgcgaaggacacacccaggcacaaaaggcacggcccgctaaaagcacgacgagcagcaccgccaacacgccgggcagcagatgccacgggatgctctgcgacgcggcagcgacttgcgcgaagcccaccgggcacagcacacacagggttccgatagccgccgccccgccggtatgagccgcagcaacggctgccgccaagaacagcaatgccaccagaatacgaatcatttttgtacgcgttttcattgtgcgcctcctgcttgacgcatcttatcgggcccgtcgggatgcattcccagcgtatgaggcggcacagcacctgattgcgaggcacgaatgcgcctttcctccagatcagccgtagaaaccgcgccggttgtttgagcggcttcgcttgcacgcgacaccaccctgatgcccttgtcggccacgcccgggttgtaggcgcgcagcgacgcggaaggacacgcctgctcgcacttgccgcagccgtcgcagtaatcggcgtgcacgacgggacggtcgtggtcgtccagctcaatagctccttcaacagggcactcgtccacgcacaccgtgcaccctgcccagtcccacgccacgcacgcatctttcaccaccgcagccacgcctaggtcacgctcccgcggaccaccaagagaaagcgcatcagtcgggcatgcctccacgcatttcatgcagaaatcgcagtacccgtgctcgaacgccagcatgggggttccgtatgccacgaggttttccgcaagcggaaccggcgtcacgatgccgtgcgggcacgcctgcagacagcgctggcagcggttgcacgccgccgtcagctgcgcattcgactctgcaccgggcgggcgcacgtaggcggcctcggcctggcccgtcaccgcgccaaacccgcccagccccaccaaagatgcacccacagcccctgccgcaagaaaccctcgcctggatatgttctccgtcatgttgttgccttccgtgcgcgttgtgcttgtgctcacttggttcttgcctactccacaacctcggcagttgcttcggcatcggcttgtaggtaggcttgcgtgaaggtggccaggttggcatagaagccgccgcccgctgccgccttcgaatcaataacgaaacggtcgatccagttcagtaggtggtcttgcaaaaacgtcaactggccgcgcagcgcggcctcggcagcttcggcatcgtttgcctgtaaggcttcgacagccgtctcgcacaagcgagacatgaacgccagctgcaccgccagatggtcctccggttcggtaaagctggggtctttcgcgaaaccagcggcggcatacacgcgctttacctggacgtatgcctcttgcatcatcaggccgtcctcgctggtgtacaccgactcatacggaaacgccttctgtgccgtgcgcggccccatgccgaaaaacacccggttgaacgccacggccagttgctcgagcgcaccctcgtccgcatcggcgaggtcggctttgagggcggcgaagccctcgacgagcgccgggtcgtcggattcgagcgccgtctcccgcgcaagcttgtcggcgaaggccgcgtcgatctcggtttcgaagcaacgggacagcagcgcgtagacgcggcggcgattctcgcagaatatgatgagattcgcggcgagccctgcgggcatggtatcggtcatgatggtctccttgattctcgtcggccgtcccccgtgaccgaacgcgctgggagggaggggtgcgttcagtcacgggggacggccgaggcggtgggagcgagacaaaggaatggggtaatggtctcgctcccccgctgtcacgttatcagtggtagatgaactgctccacgctcgtgcccacgccgtacatgatgacgcgcaggcacaccgcgcccaccgccgagcaggcgaacgctgcgaacataaacgttgccagcttcttcgggtcggccaggccggtatccgcgtcgcccttcgtcgccttcacgcaggccagcgccgtgagggccgtcggggcaaccagccccacgaccaccacgcccagccagaacatcacggccaggtcgccggccagcaggcgctcgatagagcgcgacggtgcctggtacggcgccacggcgatccagacgatgtaggcaaccgacgtcactaccatgatgataacggccgccagcgcgatgcgcagggcaaagccgccgtcctcctcggcgttgccgcgcagcatcaccaggccgcacatcagaagcgcgcccgtggccaggccggcgcccaggtacatcaggggcaaagcggcgctgtcccacgcgggacgggcggcgatcaggtacgacatgcccgccaccaccggcagcgccagacccagcaaggctgcgatcacgccgacgatcttgcgggcgccggggtagtccttcttcgacagcaccacgtagacgatggccacaatacccatgatggcgacaatgagcagctccttcgccaaaccggagcccaggttgcccagcaggtgcgtcgcgcgctccgggtgccccatgtgcagcaccgacacgcagccgcccacggccaagcacgccagcgcgacgagcgcgccgacgaagcggacgtccttgaacctgcccttgagctcgcctgcgcccaggaacacgtagatgccgccggtgatgcccaagagcacgctgaagatcagcagaggccactggatttccatggctactcaccgcccttccaggcgaacttgtccaagccgtagtccactcccgggtggttgcccacgtcggtgagcttgtacgtcttcttggatgccctcatcttcgagggcgcggactcggggtcgtccaggtcgccgaacaggcgcgcctggccggggcagtgcttcacgcacgccggcttctcgcccttgtcgatgaggtgggcgcacatggtgcacttctcgatgacgcccttgtcgcggccctcgtcgtaggcgcgcacgccgtaggggcaggccatgacgcagtactggcagccgatgcacttgctgtggtcgaccagcaccacgccgtcctcgcgcctgtagctggcaccggtggggcacacgctcacgcactcggggttgtcgcagtgctggcacgccacgggcaggtagtacatctccaggtcgggataggttcccgaggggcccacggtgagcaccttgttgtagtaggtacccaggcccacgttgttctcctgcttgcacaccacggcgcaggaatggcacccgatgcagctatccaggtcgatagcgatgatgttgcgggtcatactacttcgcgcctcccttcaccgtcacctgcgccacgccgtcctcttggctgtcggaagccagggccgcggcgctcatgggcaggaatatcttgaggtcctcctcggtcatgcagatgttcttcggggcgccctcctcggccttgtagatcttgcagaggccgccgtagttgtcggtgcccaccgccgggtcgtaggggccgttgttctcgaacagcacgttgcagttcgagtcgaaggcgccgtgcaaatcgtcggcagcctcgcgctcggggaaccaccagtcgtgctccacgtggatggtatcgggccttaccgacgccgacaaattggccttttgcctgcactttccgtaataggtttcgatccacacccagtcgtcctgctcgatgccgttctcagccgccgccgtcgggttgatgtccacggtcgggaacatgtgcacctcgcgcatccacgggctgttgcggtactcggtgtggaagaacgcatgggagcgcccgcccgtgatgagcgtgtacgggaagtcctccagcaggtcggggcgcgaaagcttcgtgatgggcggctcgatgtacagcggcagcgggccgttgccatagagcagcagatcctctgaatagagctcgaacttcccgttgtcgcttgccgggtggttccggtctcggaagttgctgccacggaacttcgtatcaaagcccggcttgccatcccgtgatttccgcatgaacccggtcacgtatttaggcttgcccattacttttgccatatccttgccggtgatcgatatcctttcccgcagcccatcgaatgtgcttttcagctcggatggtagcgtgggaggaccggcaagaatgaagttgaagaactcgtacttgtccttccagtacatgtccacgtccatgtacttcgcgaactcgaagcagatgtccatgtcgtccttgcactcgcccagcggctcgtggaacggctggcggatgaggtaggtgtggctcgtcgggtagccgtggccggagtgcgcccactccacgcggtccacctcgttggggtgcgcggccggcaggatgatgtcggcgagctcgcccgagggggtcatgtacaggtccacgttcacgaagaagtcgaggttcttgaagccgtccctgactttgaagctgtcctccacgcccaagatgggctccgaggtttcctgccacaaagcgcgaatttgaaacggagtcccgttcagcatggcattcgtcgtggccgcgccgaatccgccctgctgaccgcatattacctggccgccggagttctggaccttcttctccagctcgcctgacttgttgtttgcaacccatatctcctggtagccggtatccttgcaaacagttagatccttgatgttcctcatcgtcttcatacgccgctcgttatatccccgcttgttcggaacgacgtcgaacatggctgcgtcgtagccggtggctggctcgcggccgatgttctgacccccaggaacatcgaagttgccggccagcgccatcatgatggtgaacgcctgcgagatgccggacgtgttgatggagaactccaccttctggccgcggcagaagcatgcgccgggacttgcctcgatataagcgtcgattgcgcttttcatcaagtcgacggggagctcggtgaatttcgcaacacgatcgagcgtccatccttcgatatgctccgcaaagatatcccatgctgtgcgataggttttgccgtctggcaaggttcgcgatccggaaagcgcgggcacgacgttttccgccgaccatttcagattatcgccgtcccagtaaaccaaggaatcgctcgcctcgtcccaaacaggatacgtgttgtctcctcccccgtcttccagatcgctctgccttagctggaggccggtttcctcgtcgatgaagaagggggcattcgaccagtttcggaagaattcctcatcgcaggcgctcgaatggaatatctcccggataaagccgaggacaagggcgatatcgcttcctggtctgataggaagccagatatcggcctttgaagcggtggttgtgtagcgcggatccacgcagatgaccttcgcgccgcgctcctgggcacgcttgaacgtcaaccagtcgtagtatccgcggctgcgctcttggcggcaccatgccaagaggcatttggcttcgttgccgtcccagccggtgtattgcgtctcgtcgccgtagatgcggcgcgaaaccatataggatccgagccagcagagattgcccacaccgaacgtggccgtggagcccagctccatccaaaggcggttgatagcattgaattgaagctgatcgcggcccgtgccgtactggtgcgcaatggtgtgccagccgctctcctcgccgatcttggtgaagcggtcggcggcctcctgataggcttcctcccaggtgatgcgcttccactggccggagcccttctcgcccacgcgcttctgcgggtagcgaacgcgcagcgggttgtacagctcctgcgggatggcgaaggcgcggccgcatagcgttccctcgctgaacaggtcggggttgccctcgaccttcaccacgcgcccgttcttcacgtgcccgaacagcgcgcaacgaccgtagcactggcggcacgcgctcgggatgatcttcacgtcatcttttccttcggcggctttcgaggcatcctcggcaaaagcgctgggtgcattcagcagcaatgccgacgaagccgtcaaggcggaaaccttgacaaacccccgacgactcatggttagcgacatctctcctccgttcactctcgagattcgttgcttgcccggccgagagcaaccacgaacgacggaacgcgtagttcggcgccccatccccccttgtgcggctatgccgccaagggcaccgtatcatcggaaaagctgaatgcgcataccccttgcgaccatatatcgacctgaaaaaggaaataccacccgaggtggtagttggtcaaaacacgagctcgcgcggcaagatggcaaagactaggaagaataagggccagcatagccaggtggcgtcattccctgatgctttcctccgttgactccacgaggcgtatgagctcctgcttcgaatggatgccgagtttctggtagatgttgcgtgcatgtactttcaccgtgccctcggagatgaacagcttctcggcaatagcctgcttgtccttgccccgggcaagcaacatgacgatctccgactcgcgcttcgtcaaatgccattgctcggctacgatcaagcagctatgctcgaaggtcatgcccgccttctcgtccgaatcgtcgatagccgtcattccccaacgggttttgaggttgctcgcgttcatgaggtacatcgtcgtcacgaatacgcagaaaagaaggaatacgacaaaagcgggaggcagaatcgaggacacctgggcctgaccctgccagaagaacaagatcagcccgatgaaactgcccagcatcgcgccgatcacaacccccaagctaagaaggtaataatccgagtccagatagcgaacaaggtaaacgaccagcgccaagatggtggccgcaaaaagctgcctgccgatcaggaacaccagcgagccaagctcgagcgccagctcgccttccaacacgaacaaggcgattcctcctgtcatgatcgggaagcagaccctgaacaaggcactgttgaagcttccacgcagatgcagcaagacggtgaacatgaggacagctgccgcgatgaaggcaagcgagaacaccacgagcttggtgtcgggcgtcatcctcacgttgtccacggccgacacgacaccttccatcatgcttgccaccaagatggtaagcagcaggatgcggggtaccttctggcccggtaccgacttggcgcataccgaagccgccgattgctcggaaagccgaaagtaggcgagcaggagcaagggggtggcggacatggccgcgataaacacctccaacggcacaagtctcgctaaaggggcaacgaccaggaggacaatgcagcaggcgatgttgcagcgaaccgtgcaggcaacgcccgaagcggcgagccgccgcgccatctcgggaagaaaacaggcgcatccgcccgaggccaggatcatgcagggaacgaacacccaagtttggtggaatatgcttcctgccacgagatgtatcaacggagccgaactcgcgcaaagtgccgcaatcgccaggcatcgacctccttcaacccgcttgccgaatagcacgtcgatagccaacatggcaacgcaggccaacagcgccacgaatacggcgatgaagctgccgaaaagaggcaccgcaatatgctccaaatcgtgaacaggtatacggaagttccggtacacgaagaacacctcgcatgccgaaaggcagaacgccactatggtcagggcatcgcgatgggcagcgaaaaacgcgcgggcttttcttccggtcctggtcgcttccatgggccatcccgtcatcgaatctgtttgcacggtgcgaaccgcctgctatcgaggaaccagtataaaccaaaccggttcaatctgcccacgcgcgaacagggagcgtgcctcttggaatacgcgccgggaccgtgcaggcggggcgcgcgggtaccggcaggcccgcgggctatttcgtgatgagcaccggcacgggcgaggcgtggagcacggccgtgctcacgctgccgagcatgcccttgatggcgcccagtccgcggctgcccatgacgatgaggccgcagggctcctgagctgcctcgcggacgatggcctcctggggcttcccgaacgccacgcgcaggtcgaccacgccctcgtgccccgcgatgcggtcggcaacctgctccttgagggcttcgaggctcgccttctcgtcgccgccgagcgacagcagcacgcctgcagcgcgcgccgcggccacgaacgcgggatcttccattttcagaggatcgctgacgctcagcaccaccacccgcgtgcccagcccgcattcaacgagctcgagggcgtccgccaatgcacggttcgagggtgccgaaccatcgtatgcgaccaagatcgctccgtaacccatagcagtcccgctttctcccgtgtccaaggctgcgcgaaccggcagcccatcaggcaccttgctcgattccctcattctaccatgcccgcaatctccagagaacccatcggcagccgacccctccccatcggcaggagcgctataatcaagccgaaggcaaccaaggatacgatacaagactgcgaggtttcggatggatggcaccactatcgccgcctttgcggcggccacggcggcactcgtcgcgttcgcgctggcagcgttcatgttctggaaggggaagtggctgttcctcgtggcgggaggcgccgcagccgtcgaggaggccgagagcgccgacgggtccgcggccgggctctccggtgcgggcggcgtccgcaagatggggcggcgcatggccgtggtgctgctcgcagcctgcgtgctcgtggccacgctgctcgcgttcgaaggggcgaagctggccggcaacgccctgctcgcctctgcggccaccctggtcaacaacgtggcgttcgtggctttgcttgtcgccatggtgtggttcttcatcgtgcagcggcccgaccgtcccaaggagagcgcctcctcgcaagatccccgcatggcctcccgtgcgcacgccgcgcgcctcgaccacctgcccctcgccaccatcctgttcaccctggccatcatagccgtcgtcgccctcgtgggcatcctgttcgccgggctgtaggtcgagtacctactcccagcgcacctgcacgaggtcggggaaggctgtcggcagggcggcgaggtcgaacgtcgcgagcagctcctcgggggtggcggggtcgcaggtgggcgcgaggccggtgaggccggcgatgtgtccgacgacggccgcgggcgtcttgaagcgcgcgagcagcgcatcgagggcggcgtcgcggtcccgcttcgagaggcgccggtcgcgctcggcgacgagcagcgggacgtgcgcgtagtccggatgcggcagccccagcaagctctgcaggtagatctgctgcggcgtcgagcacaagaggtccacgccgcgcaccaccgagctcacgccctgctcggcatcgtccaccaccacggccagctggtaggcgtacgccccgtccgagcggcgaacgaggaagtcgccgcagtcctgcgcgaggttctgcgcataggggccctgcacctggtcggtgaacgccacctcctcatggggcacccgcaggcgctgggcgggcgtgcgctccagcgcacgtgaggcgcgctctgcggcggaaagctcccggcacgtgcccgggtacaccggcttctcgccccgatgcggcgcggaggcggcgtgcaggtcggcgcgcgtgcagaagcaggggtacacgagcccgcgcgcggccagcccgtcgaaggcggcgcgataggcctccgtgcggtcgtgctggaagtacggcccctcgtcccaggtgaggccgagcgcctcgaaatcgcgctgcaccgcgtcgatataggccggcttggagcgctcggcgtcgaggtcctcgatgcgcagcaccatccgcccgccctgcgacttcgccacgagccaggcgacgagcgccgcgaacacgttgcccgcatgcatcctcccggtcggggacggcgcgaaacgcccgacgacggggacggttggcgaggcggcggccatgcggtgccccctacttcctcaggtcttccacgtgcttggccttgccggtggtgcgctcgatgccgcccggctccaccagcttcacgcgcacgcccaccaggagcacgcccttgagcttctcctctatggcgcgccgcaggccctccatctcctcgaacgagtccgagaacgcctcgggcttcagctccacgtgcaccgtcatcctgtcgaggccgttcgccgtctccacgacgatgcggtagtgcggcgtgacgccccggatgccggagagcacgtcctccacctggctcgggaacacgttcgtgccgcggatgatgagcatatcgtcgcagcgggcgcgcaccttctgcatgcgcgcgctcgtgcggccgcaggcgcaaggctcgcataccacgcgcgtcaggtcgtgcgtgcggtagcgcagcacggggatggcctgcttgtcgagcggcgtgagcacgagctcgcccatctcgccctcgcccaccggctcgccggtctcgggatccacgacctcccacaggaaatggtcctcggcgatatgctgcatgtcgcgtgccgccaggcactcgcccgacacgcccgggcccatgacctcggtcaggccgtagttgtcggtacatacgatgtgcatgcgctcctcgatctcggccttgaggcccggcgggcacggctcgcccccgaacaggcccacgcgcagcgtggacgcctcccagtcgaatcccagccgctcccccacctcgcacatatgcagggcgtaggagggcgtggcaatgagcaccgtggtgccgtagtcccctatcatggcgatgtgccgctcggtgttgcccgagccggcggggatcatcatgcagccgagcttctggcagccgtagtgcaggccgaaacctccggtgaacatgccgtagccgaacgccatctgcacgcggtcgccgggcacgacgcccgccatctgcgccaggcgtgcgatgcagtcgctccacacgtccatgtcgtgcgcgttgtagcccacgacgatgggcttgccggtcgtgccggaagaggcgtgcagctccactacctcgtcgagcggcacagcgaacagaccgtagggaaacgtgtcgcgcagcacggacttgtccgtgaacggcagcttgcgcacgtcgtcgagcgagcggatgtctcccggcgccacgccgagggcgtccatgcgctcgcggtaccacgccacgcgatcgtaggtccaagccacctgggccttcagcttctccagctggagcgcgcgcacctcctcgcgcggtgcgcactccctggcgcggtcgtagacgggcaggccggcgaagtcgccggcgcgggccgccgcaagagcggctcccttcgcggtcaggtctgccacggcgctcaccgcccctcggtgcacgccgtggcgctggggccgtcggagccgagcgcccgcgccaggtcgtcctgaccgatgagctccaccggctcgcccgccagcagctgctccgcgcgcgcaaggtccttcacggacagcgcgatataggtggatatgagcgagtagctgtacgtgacgttgatgccgcagtcggccatgacgcccatgacccgtgcgagctcgcccggctcgtcgttcaggcgcgcgcacagcacatcggtcgtcgtggcggcggcacccatgtccacgagcacgtccagcgcgcgcagggggtcgtccacgatgaaacgcacgatgccgtagtctcccgtgtcggaggcgctgtagccgcgcacgctcacgtgcgcgtcctcgaacgcgtcgagcacacggcgcagatgccccggctggctttccaggaacacgctgatctgctgaacgctcatgcttcccgcaccccctccgcgccgtcggctggcagggcgaacgcgcgaccggcgcggaatgccgccaggttcgcctccacggtcttgggcggcacgcggtcggccaagacgcgctcccatgccccgacggcaaacggcagccgcgtggacagcgcgcccagcagcacgacgttcaccgacttggcgctgcccgcctcgcgggccagctcccctgccgggatgagcgtggctcccctgtcggcgagcgtctcgcgggcccgggcgggcatggaggcgcgccccgtggcaacgggcagcggctttatggcctcgtcggccaccagcaggtagccgtcctcggccaaaaacgacaggttgcgcagcgcctcggtcgtctcgaacgacacgacgcagtcggccgttccggggtcgcacaccatggaggacacctcgtcgccgaagcgcaccacggtggtcacggcgccgccgcgctgggccatgccgtggatctccgacaccttcaccgaggtgccggcctcgagtgccgcatgggccagaaggtcggctgccaggatggtgccctggccgcccacgccgcagagcagcacggtggtcgcgttctcgttactcatgggagcccccttccggctgctcgatagcgttgaaggcgcagtactgggcgcactggccgcacccgatgcacaggcccggatcgatgctggcgcagcccgttccggcgtccttggcgatggccgggcagccgagcgtcgggcacacgccgcacgccgtgcaggcccccgtgaccaggaaggccggcttgcgcgtgcggtcgagcagcacgcagggcgcgcggaacacgagcacggacagctcgtcggtgcccgtggcgtccttgagcgctgcgcgcacggcacgcgcatcgtgcgggtcgacggtgcgcacgtcctccacgcccagcgcgcgcacgacgccctccaggtccagctcgcggctcgggcgcttctgcagcgtctcgccgttgaaggggttgccttggcggcccgtcatggccgtcgtgcggttgtcgagcacgcacaccgtgcccccgccgcggttgtacacggtggagatgagcgacgacaggcccgaatgcgcgaacgtggagtccccgatgacggccaccaccgggcgatgctccgtccccgccagcgccagctcgaagccgtgcgccatcgacaccgacgcgcccatgtccacgcacgtgtccatggcggacagcggcggcagcgcgcccagcgtgtagcagccgatgtcgccggtgacgatggccttgaggcgcgtgagctccttgaacaccaggcggtgcgggcagccggggcagagcgccggcgggcggccgggaaggccctcgggcgtcggggcgtgcgggggctccgcgagcccgaaggcggcgcggacgagcccgggcgtgagctcgccgtcggccggcagcggatgcgcgaacggggctgcctcgatacccagcgcgcgcacgctttcggtcaggtactcggacgcctcctccaccacgtagagcgcctcaacgctcgcggcgaaggcgcgcagcgcctcggcgggcagcggccaggtgcagcccagcttgaaaaccgacgcgtccggcagcgcctcgaccacatgctggtacacggcgcccgcgcacacgacgcccacggcgtcgccgcggcgcacgacctcgttgtaggggcacgtctcggcccacgcgcgcagcgcctcgacgcgcgccagctggtcgcggcggcgcggtttggcgaaggcgggcatcatgacccacttcgccgcgtccttctcgtagggcttgagcgctgcctgggcgcgcgggccgggctccaccggcgtcttcgtgtgcgacacgcgcaccgtggagcggatgaacaccggcacgtcgaagcgctcggacagctcgtaggcctctcgcgtgaagcgcagcgcctcggcggagtcggcgggatcgagcatggggatgtgcgccgcgcgggcgtagtggtgcgagtcctgctcgttctgcgacgagtacatgccggggtcgtcggcggccagcaccaccaggccgccccccacgcccgtgtaggcggcggtgaacagcgggtcggccgccacgttcacgcccacgtgcttcatggtggacagcacgcgcgcgcccgcggcggaggctcccacccccacctcgacggccaccttctcgttcacgcaccactcggcgtacacgccgtccttcttggcgaacgcctcgagcgtctcggttgagggcgtgccgggataggcgacgccgatgtgcgcgccggcctcccatgccccctgggcgatggcttcgtttcctgacatcaattccataagcgaccttcccccgcttgagattaccatggcgaattatacggcaacgaatgccgagcggcccgctcaaccgtcgtaggcggaggaaatccgcggaagggggcgcatcggcgggcgccgcacgagggtggcacgtccgcaggagcttccgggaacagcggcgagggcccctcgactcgtccgcttcgaggaaacgctacctccgggacgagatcggagcctatggcacgtttcccacgcctccgcacggacaacatcgggaaagcaccaggtcgcggaagtcacggcagcgcacgatgcgcggagatcatgccacagcctccgatctcgtccattagtcttttggtcatgtatacgagcacatggggaagcgcggggctttgcggagaaggaaggaggaagtggctctctttttatcagccggtcggggccgtgcggacaagggcggccgccccggcgcatgcggtggacctccgggacgttccggtgcgccgggggcggctctcatcgcccgcacggccccggccggctggtgaaaaaaagggcctcgccggttgataccgagggcaatcggctaataggtggagggcatgcggctgatagcgcggccgatggctggtcgccaacgagggtacggcagacggatgagggcgcagggggttggcgaaggaaacgctcggcgatgatgagggagcaaccggctggcgggtgcaggagcaaccggctggcggacgaagatcacgacgaccgcttcgcccgccggcgcgcgcatgggcttggcgacgcccggtggcggcctcacgctaccgggcgtcgctcccctattcctcctggtacagcaggcagaacgcgcctatctggatcacgtcgccattgcacagcttgcgcggggcgtccacgctgtcgttgttcacccacacgccgttgaaggaattcgtgtcatggatggcgtagccgccctcgcacggctcgatgagcgcgtgctcgcgcgacacggtcatgtcgttcaggaacacgtcgcgctggggactgcggccgatggtctgcggcgcgtcgcccagctggatgaccacgccggtctgcgggccgcgcacgacgcgcagggctgctgctgcggcgggcttggcctcgggcgagaacgactcgtcgggcagcgccacgggggcgaagcgctgcgtggagccgagcagcttgaagccgcagtgcgggcacgccgcgtcgtcaggcgccagctcgttgttgcatacggggcatctctcggtcatgtgcggctccttctatcgggcgcgccgcctagccggcgacggcggtcttgtctacgacgagcggcgtctcgttcagcgtgacggccgaggcggcctggggctggccggacaggcccctgaacaggcggtcccaccagatgccgatgccctggaacacgtcgggcgccgccacgtcctcgcaggccacgaggtcgagcgtggcgatggtggcgttgcgctgcttgaacgtgatcgtacccaccttgtcgccggccttcacgtcgcccttgacctcgtcgaactcgagcgactggctcacgttgccgttcaggtcgaatatgcgcaccgacgcctcggggtcggagagcgtggccttcacggtcttgtcgatccattccgtgtgcggcacctcggccaccacgggcacttcggacgtctggccacccgccgtcatggaggtcgtctgggcgctgttggccagcggatagtccatctcgtgcccgtagacccactcgaacagcgtctcggcgtcgttgaagcgctgcgcctcggacgtcgagtggatgacgatggcgtagagctccagctcgccgttgctcgccgcgccggcgaacgaggggcctgcgagcgccgtgaagccggtcttgatgccgatggccttgtcgtagtagtccatgagctcgtcggtggactccagctcgatggtggccctcgtgccgtccgcgcgatccaccacgatgcccgtgtcgccgccgccgacgatggtccggaacgtctcgttcctcatggcgtaccgggccatcttcgccacgtcggcggcgcagctgtgctggtcgccggcgaactcgccgtcgtccaagccgtgcgggttctcgaacacggtgtcggtgcagccgagttccgccgccttcgcgttcatggaggccacgaacgcgtcctcgctgccgccgatcgtctcggcgatggccacggcggcgtcgttgcccgacggcacgagcagcgccttgagcgccacctcgagcggcatggcgtcgccctcctgcaaccctgccgacgattcgcccaccgccgcggcggccgccgagacggtaacggtcgaatcgagcgacacggcgccggaagccacggcatccagcgccacgatggccgtcatgaccttcgtgatggaggcgatctgcgtggggctggtggcgttgcgctcgaagtagacggtgccgtccgcgtccatgaccagcgcgtactccgcgtcgatgttcgggcactgcgccaccgacaggtcgcgcgcctccaccgtctggccgtagacgacgtcggccttgcgcacatcggcgagcgccggtgcgggcgcggcaacgccccaggcaagcgtgaaggcgagcgcgcaagccaccaggcccgcgcgccgtgccttcacggtctgctttatcgtgttagtccaggtcatagatgtcttcgggtcgtaccggctcgaaaccggcagctttcagcttctcctcgatcccactatcgccgtccaccttgagcacgtcaatggcaacgttctcgttcacggaaaaacaatagccgtactctatgttggcttcctgctcgtccatgaaggaaagcagcttggccaggccgcccggcacgttgggcacgcgcacgcccagcacgggggtcacggccgcacggtagccggcggccttgagcgcgccggacgccgcctcgggcgtgtcgcacagcaggcgcacgacgccgaagtcggccgtgtcggccaggttcagcgcatgcaggttgatgcccgcgtcggcgagggtctggcaggcggcggccaggcgccccttctcgttctccaggaacacggtcagctggtcgatcatggcttacttcccttccctctggtcgatgacgcgcttcgctttgccctcgctgcgggcaatggtcttcggctcgacgatcttgacctccaccgacacctgcaggttgctcttcagctccgcgcccaggcgacgcttcaggtcctcgatcttgcgcacctcgtcgatcgggaagtcgggcaccgtctccacctgcagctccacgtgatcgagcgggccgcgcgtggtgaggatgatctgatagtgcgtggcgatctccgggaagccggtgatgacctgctcgatctgcgaggggaacacgttcacgccgcggatgatgagcatgtcgtcggtgcggccgcgcagctggtcgatcttgcggtgcgtgcgcccgcatgcgcacggctcggagatgatgcgcgtgacgtcgcgcgtgcggtagcgcacgagcgggcagcactcgcgggtgagcgtggtgatgacgagctcgccccactcgccgtcgggcacgggcttgagcgtctcggggttcaggatctcgcagtagaagtggtcctcggccacgtgcaggccggcgcgttccgcgcactccatggccacgcccgggcccatgatctcggacaagccgtacacgtcgcagtactggatgcccagcttggaggctatctcctcgcgcatgttgtccgacgccggctcggcgccgaagatgccgcccgagatcttgaactcggtggccgggtcgtagcccatctcgatggcggtgtccgcgatgaggagcgcgtacgagggcgtgcaggccaggatgtccgtgccgcagtccttcatcatctgcacctgccggcgcgtgttgcccgacgacgtggggatgaccgagcagcccatggcctcgccgccggcgtgcgcgcccagaccgcccgtgaacaggccgtagccgtaggatacctggatggtggagttctcgtcgccgcccaccatggcgatgccgcgggcgaagcagtcgccccagttcttgaggtccgacgccgtgtggcccaccaccgtggcctggcccgtcgtgccggaggaggcgtggatgcgcgccacgtccttctgcggcacggcgaacagcccgaacgggtaggcgtcgcgcatgtcctgcttcacgacgaacgggaggcgctccaagtcctcgagggtctggaggtcgtcggggacgacgcccgcctcattgaaggactgctggtagaacgccacgttgtcgtaggcgtggcggacgctttgcttcatgcgctcgagctggagctcgcgcagctgctcgcgcggcatggtttcgatgtctggctggtagtacacgggtcggtcacctttcctcgttctgcttcttcgcggcgtcgtccccggcggccgcgccgtccgtcttctcctgggtctcggggcccgcgaccacgacctcggtgatgggatcgtacgtcgagtagaacgggtcctcgtgcaggatgcttccgtcggaggaagtcaccgtgcggatcaccgtgatcttcctgccatcggtgcccgcggtcttgacgtagctcgtgcccggcgccatggagtcgtcgcgctcggtcttggtcttgtgcttctccccctcggtccactcccccacgtcggtgctcacgtggtagcccggatcgactccgtacagtgtaacggttacggacgtgtcggtgtagctggtgcgcatcaaaacatcggaagcgccgtcgttcttccacacgaggtcgagctcgtcccagctgaccgccgcgtcgcggccggcggggtagctggcgatgtagagcgagtggttgtggcgcgtgggaacggggtagccggcgtcgtacaccgcgttgaacacggtggtggccacctggcagatgccgccgcccacggcgtcgtcgtactccccgtcgatgatggcgcctgcgcccaggaagccgcgctcggcgttgcactcgcccgacgtgccgttgaacgaccaggtgccgcctgccggggccacggagttgttcagcaggtcggatacgaggcggatgttgtggttgcggttctcggtgcccgcgccgctcgtgaactcggtcgtgtacgaggatatctcggccacgagcccgagcgagacggcctcgtcgaacgtggacgtctcgggggcggtgccgctgcccaccgccacctcgacgggctgcccggggccgggccggtgcgcgctcgcggagccgccgtcgccccccgcgccgtcgccggccccgaacagcgccgcgtcgagcgcccgcgccgtctcggccgcgagcggcacctcgcccgcgccgtccgtgcgcacgcgcacctcgtcgtctgcgcgctcgaacgtcacgtgcacggggtcgcccgtgcgcgtctgctgcacgtgggcgaggatggcgggcttcgccttcgcctcgtccagcgacggtgcgagaacccagccgccgtcgtgctcaacaggcgtggcgaccacccattctcccaggtcggcagcagtcgcctcccaagaggtgcccgcccaggtgaagcgcgcgccgtcggcgatggcggcgttaacggcatcgcaggccgcctgggcctcgttgcggtcgatgcgcaggggcgcgtattccgcgcgcgccacgaaggagcccctgccgtccgggctcgtaaggtaggcccggtcgagctcgcgggcgaacgccgcgcggtcgaccatggagccgtcgtgcccctccgtgacgcgcgcctgccccgcgtccacggccaaaccgaagtccacgcgcgggctgccgatggtcgcgtctatgtcggcggccagctcctccagcgcgcccgcatcgtagtcggcccgcacctcgacggtccatccgccgaagagcgccgcgaggcgcgcgcccagcccgccctcctcgcgccccaccgcgagcgcctcctccaccagctgctcggcgggcagcacggctccgagcgcggttgcgtcggccgtccacagctgcttggccgcccgcgcctcctccacggagcgctgttcggccagggcctcgtcctcggcctgggccgccgcgtcggcgacccgcgctgcggcgtcgtcgctcgcgaagacggtggcggagcccgccgcgaggcgcgcggcgtaggcctgctccaccagcgcgcgcatctcctcggcatccttgccggacacgtccacctccccgatgctcacgccggcgtaggcctttccccagttcaacccaaagtcaaccgcgccgcctgccacgagcgccgctgccagcaccgtcacggccagcgccacgcggctgcgacgcaccagcgagccgagggagcgcgcggcccagcttgccccgcgcccggcgagcgcgagcacggacaacagcgcccgccccgtgaatccgagcgcgcggcggacggggcctcctgcaggcggcttgcccggggcgcccttcgtccagagcaagggggcgttgtaagagggggaagcctgcccgcgcgcaggggatgcgccgcccttgcgggtcgccgcggcatgggatgcgcgggcagagggccttcccgccttgggcgatgcgggcgaagaagcgcgcccggctccggcggcagggccctttgcggcgcgggacgcgggacgcaaagggccctgccgcgaggccggctgcggatccgtgcgctggcgcctcggcgcgccgcccgtgcccggcgtccttcccgccatcggctaccgtcgctccggctgggcggatgcggcttcgcgcttggcggcgcgcaccttcgcgagcgcggaaagggcgtagtagaccgtggtgaggagcgcgagcacgagccccgcgtacacgaaccagatgccccacgagtacgggcccgccgcgaggcccggcagccaggcggcgtccaccacgccgaggccgtttagcagcggccagttcagcagcaggccggcgaagcccacgaacaggagcgtggtggccaccttgcccgcgtagaccaccgccacgcgaacgcggtagcgcttgagcagcaccgcgccgcccacgagcagggccaggtcgcgtatcagcaccacgaggatgatccacaacggcagccgtcccaccaggaacaggccggccacgcccgctatcatgaggatgcggtcgacggccgggtccagaagctgcccgagcctcgacacggcgtgcgtgcgccgggcgatctgcccgtcgacccaatccgtgcccgcggccagcgcgaacaggaacgtggccataaggtcgtagccgttgaacagcagcacgaggaatatgggcacgaggcacagccggatgagcgatattatgttcggcacggtgaagatgcggtcgctcgcctcttccctgcccttccgacctccggtctcacgcgcttctttgcctgccatcgtcctcttctcccgccgcctgccaatgggccgtccgccctgcgcggtgccgccggccaagaggtcgcagcagcctccccacgcaaagaccgggctcgaagcccggtcccttgcctatcggcgtttattctagcagttttgcacgcgcccgccggcgcgcccacgcatccttcgcagttttttaagactgccccgcagccgccttcgcgtgctcgggcacctcgaacacgtcggagcgcttctcggtggcgggaggcgtgtaggtgggctccatggccaggcactgcttcgggcactcgcgcacgcacgtgccgcactgcacgcagcggaagcggttgatggaccacgtgcgggccggcttgtccaccgtgatggcgtcgcaggggcagcgcttcatgcagatgccgcacaggatgcacgcgtccacgttgttggtcacgtggcccttgaggcccggcggaggcgtcttctgctcggcagggtactggatggtctccggcttgccgaacagcgacttcagcgtcatctttcccagtttgaacgatcccattcccgcctacctttccgtgcagctgatgcaggggtcgatggtcagcacgatcatgttgacgtcggccaggtcgcatccggccagcgccgtggccatgccggccaggttctgcgacgtgggcgtgcgcatgcgcatgcgctccaggtacttcgacccgttgccgcgcgcgtagtagtagcactcgccgcgcggctgctccaccaggttggccgcctcggcccccggcgcgggcgagcccttcacgtccaccgcgatgtcgccggcggggatcttcgcgatcatctcctcgatgatgtcgatggactgcagcacctccagcgcgcgcaccttcacgcgggcgtagcagtcgccctgggtgtcgagcacgggctggaagtcggcgagcttgccgtagccgccgttgcccaggcagcgcacgtcgttgttcacgttggacgcgcgggcgaaggggcccaccatgctcagggagaacgcgtcttccgggctgatgtagccgatgcccacggtgcggttcttgaccgaggtgtccttgaggaacgcgttgcacagctggcggtagtcgtcctttatgccgtccagcacgcgcttcatctcggcgagcatgccctcgtcgatgtcgcgcacgacgccgcccaccttcaccaccgagaagatgacgcgcccgccggtggtcttctcgaagatgtcgagcacccgctcgcgcaggcgccagcagtgcatgaacaggctctcgtagccgaacgcgtcggcggccaggcccatccacagcacgtgggagtggacacgggacagctcgtgccagatgacgcgcaggtactcggcgcgctcggggatctccacgcccatgagcttctccaccgtctcggcgtagcccatggagtggccgaaggcgcagatgccgcagatgcgctcggccacgtagatgaactggttgtagtcgcgcgtctcgacgagcttctcgagcccgcggtggatgaagccgatctgcggcacggcctcgatgacggtctcgtcctccaccaccaggtcgaggtgcaggggctcgggcagcaccgggtgctgcgggccgaacgggatgacggtcgccttccccatgctactcaccttccttcccggcctcggcggccgccttcttggccttcgcggcgatggccgcgcgcacgcgggcgaccttctcggggtccatgccggccagcttcgtctccagatcgtcgtcctcgggcggcgcgatgtagccgcgctcgccgggggcgggggcggcgtcggggtgcgtctccacgtaggcggcgttcgccgcggccgccttggcggccttctccttcgcagccttggcggcggccaccttcttggccttctcgcgcgcggccttctgctccggcgatatgatggtcatgggctctttctgcgccagcgcgtagaagttgccgccgaagtcgatggcgatgccctgcacgtccacgccgaacaggtcgtgcgtctcgttctcgaacacgaacgcctcgaggaaccggtcggtgatgctgggcaccgtcgtgcccttctggacgcccttgatctcgtggttctccagcaggttgtccttcatgaacgagtagaccaggtcgatgccgtcctcggtgttcacggcgagcagctgcacgaaccgccagccgccgtccttcttggcggccgccagcgccggcagctcctcgacggtcagcgggacgaacgtcgtctcaagcgccatgtcacgctcccttcttctgagcctgcagggccttcgatttctcttccagtatgccaaggccctgcacgaccgcgtcgatgatggcctcggggcgcacggcgcagccgggcgcgtacacgtcaacgggtatggcctggtccacgccgcctatcacgttgtagcagtcgtggaagatgccggccgagcacgcgcagatgccgcacgcgatgacgaccttgggctcgaccatctggttgtagatctcctgcaccaccttgatgttgcgctcgttcacgctgccggtgaccaggaagatgtcggcgtgcttggggttgcccgtgttgatgatgccgaagcgctccacgtcgtagccggggcacagcgccgccagcacctcgatgtcgcagccgttgcagctcgagccgtcgtagtggatgacccacggtgatttcgttgcgaacgtcattggttccgcgcctccttacaggtacgccaggacggcgatgttgacgaagcccgccacgaacgccacggcccaggccgacgagagcatggcctgccatttcacgcgggcgaagttgttgtcgatccagatctccaggaagtacacgagcacgaccacggcgatggccagcacgatggagagcgggttgccccacacgaagaacaggccgacccaacccaggaacagcacgttctcgcaccagtgcatgatctccaccttcgcgagcgtcttgccgctcatctcggtggtgatgcccttgacgagctcctggtgggcgtggtgggagtacgaaaggtcgaacggcgacttgcgcagcttgatggtgagcacgaacagcaggcccaggaacacgagccagatgctcgtgaccacgggcgcgtcgagggcgaagacgcccgccgagtcgaacgtgccggcagccatgtagaacgccacggccatgaacagcaccatgggttcgtaggacatgacctgcagcgtctcgcggttcgcgccgagctccgcgtaggggctgcgcgtggagtacgcggcgatgatgaagaacaggcccgcgagcgtgatgacgaacacgctcatgagcaggttgccgcccgagtagaagatgcctccagccagcagcgtgaacacgagcgcgcacgtgatgtaggttccctcgctggagttgacggagacgttgtccttctcgatgagcttgcgcacatcgtagtacggctgcagcagcggcgggcccacgcggccctgcatgcgcgccgtgatcttgcggtcgaggccggccaggaggcagcccagcaccggtgccgcgatggcgaaggcgagggtgccgatgagagcgaagagcagggacatttcagatcacaccctttcctagaacaggcccggcagcgtgatggccgagaaaccgaacgcgacgatgatgacgagggcgcaggccaccgtgcccacggggttgatgcgcttctccccgaatatgccgtccaggtacatgttgcgggacgtggcggccgactcgcccgacagcgagttgcggtagacgcgcgcctcgttgtcggcgctcacgccggcgaggtacacctcggccttcttggccttgccgcgcccgagccccgcgaacagcacgatggcgatgagcgctgcggcgatggaggcgatccacaggttcgtggaggcgatgtcctggccgagcacgccgaacacgctgtacacgtagggctcgacgacaagctgcgagatgatgggcaggcacacgcagcccacgaccacgagcacggccatgatgacgatggcggtccactcgctcttgtgcacggtcatctccacgttctcgggccggccggcgatgccggagagcttgcccagccacttggcccagaacatgaacgtggcggccgagccgaaggccaggagcaggatgagggcgacctggcccgtgtcaacgaacgaaacgagcgtggcccacttcgccaccagcatgccgaacggtgcgatgaacatgcacatgatacccagcatcatgaagcgtgcaagccgcggcatgcgatcgaacagaaggtccatatcctcgatatcgcggctgccgatgtggtgctcggccgtgccgacgcacaggaacagcagcgacttcgcgatggcatggaacaggatgaggaacgcggcggcccagacggcctccggggttccgacgcccgcgcaggccgtgatgaggccgaggttcgcgatcgtggagtacgcgagcacgcgcttggcgttgctctgcgagatggccatgaacgagcacagcgcgaacgtgatgccgcccacgagcacgaccatcaccgacggcacggggcacaccaggaacacgggcgccagcttcaccagcaggaacacgccggccttgaccatggtggacgagtggagcagcgccgaggtgggcgtgggcgccaccatggcgccgagcagccacgtgtggaacggcatctgcgcggccttcgtgaggcccgcgaacgccagcgcgcacaccggcagcaccacgagcgccgggttctggacgccgatctgcaggaactcgaggaacgacagcgtgcccagctggatggcgctcaggtagagcgccgccaggaagccgaggccgcccagcaggttcatgatgatctggcggaaggcgttcttgatggcctcctcggtgcgcgtgtaggcgatgaggaggaacgagcagaccgtcgtgacctcccagcccgtgaacatccacaccatgttgttcgagaacacgatcaggaacatggcggacaggaacacgaacatgagcgcgaagaacacggggcggcggtccttggccccctccggctcgtgggcctggaagtcctccatgtagccgagcgcgtacacgcagatgccggagccgatgacgccgatgatgaacgccatgagcagcgacagcgagtcgaggtacagcgcctcggtcacgtcgatggagtgggcgaagccgaactcgaacacgagcgagcccaccacctggatcacggcgagcacgcaggcgagcacgttcttgtagcggatgccgtagtacaggatagcagccgccacgagcacgctcaccgccgtgctggcgtagtcgatgaggggcgattcgaagtcgaacgttacccagggagcccccaggtaggtggccaccaaccagatggaggccaggccgatgacgagcgccgaggcgcccacaatcgcgcttctcgcccggttgttgcgcacgaccaaaagcacggcggcaacgaccagcgggaaaaggattaagaacccgagcagagccacgtcgtatcccttcacttgtgtcggttgatggaaagcttgcagaatgcggcagggaaacctgaacccccgtgcaagcgatgaccgaactttagcaaacctgggcatccccggccccagcgcttccccatcggagcgtattatccggcgaaaggagagcgccacggttgtattatggatgcattgggtattcgtatcgccgggcagtggcaggtttgccgtcgcgagcggtttttaacggcggtaacggcttttcaacaggccgtataccgtagggcgtcgcaatgtgcgcgcccgccctcccctgcacgcagaaacgccccgcatggcatgcggggcgcgctttcgggcatgctttcggccggaccctacctcatcttgacgaccggtttgatggtcttgccggttcgggaatcctcgaacgcctggttgatgttctcgaagtcatagaactccaccagcttgtcgaaggggaagcggccctggcggtagtactctaccagctcggggatgaacagctggggcacggtgtcgccctctatgacgcccgtcaccgttttcccctcggccatgacctcgccgaacatatcgacggtcatctcgggcgtgatgcccacgatggccaccgtgcccagcgggcgcagcgccgccaggctctggtggacgaccgcggggacgccggtcgtctcgaccgcgaaatgggtgcccgagcccgtagccttcctgacttcctccaccacgtccacctcgctgctgttgagcgcgtagtcggcgcccagctcgcgcgccagctcgaggcggctctcgtgcacgtcgaccgcgatgacggtcctgcatcccgcgatcttcgccgccatgacggcgctaagccccaccgctccgcaaccgtacacggcgatcgtggagccgaacgagggcttgaggcggacgagcaccgtcccgctgcccgtctggatgccgcaacccagagggccgagcagctccaactccacgtcgtcggggaccttcaccacgttgcgctcgtcggcgacggcgtaggtggcgaacgaggactgcccgaagaacgtggccaccggcctcccgtcctgctccaggcgctcgatgccctcggagccgaaattcaggtcgttcatcttctcgcacgtggagggatgggcggacaggcagttctcgcaatggccgcacgaggagtacgagagcaccacgtggtctcccggcccgaccgtcttcacgttcgcgcccgcccgctcgacgatgccggccccctcgtgcccgaggacgatcggatagggcacgatgccgttgtcccgggcgacggcatccgtatggcagacgcccgtcgccaccaccctcaccagaacctcgttggagcggggttctgccagctcgacttccccgatctcgaattcctcgcccatgccgtgggtaacggcggcctcgatcttcatggtgcgctcctccttcgtgctcctcggtagccttgcgcaccatgctaggctccgcgtcgagcgcagacgcggccgcaccgccaaccggcggtatcgcccatccctgcggacgcgcgcggcggcgggcggcgagggagctgcggcgggcggaggctcccttaggaggcgccgggcgcttcaagggcctcgcgcgcctccagcttgcgcaggcggcgccactccgccgccaggaaggccaccacgagcagcgtggaggtgatgtccgagatcgagggcgcgaagaacaggctctgcagcggcgtccagggaagcacgagcggcagtacgtgggggctcgccaagagcagcgggatgaagaacagtatctggcgcgtgagcgtgagcagcgtcgccttgagcgcctgcccggtggcgtcgaagtagttcgacccgatgagcgccacgggaaggatgggtatgaacacgaggtaggcgatgagcgcccacgccgtggcgtccaggtaggcctccggcaggctgaacaggtgcgcgtacatatcgggcaggaagagcacggtgagccacaggggcgtggtgatggcgatgcccaggaggatgccctgccccagcgtgcgcttcatgcgcccgaacttccgcgcgccgtagttgtagccgatgatgggctgcgcgcccatggcgatgcccatggacggcatgatggtgaacatgcccacggccgagagcacgcgcatgaccgcgagcgcgccgtccgagccgagggggtcggaggcgccgtaggacagcagcaggttgttcatgatcatgttcgacaccgcgaagcccagctccatgaccgagggggccacgccgagcgcgcagatgcgcagcgccacgcgccacttgatgccgagggcctcgcggcgcagcggcatgggcgagcccttcttcaggaagaactgcatgacgaaggcggccgagagcgcccacgagcatacggtggcgagccccgcgcccgtcatgccgccgtcgagcacgatgatgaacaggtagccgagcacgatgttcgcgcccgtgcccacgagcatggagccgagcgcgcggttggggtggcccgccgtgcggatgaagttgttcatgccgaacgccacgaactgcaagggacagcccgcgatgatgaccgtcatgaaggcgcgcgcgtgcggcagcaccgcgtcgtcggcgcccgaggcgcgcaggatggggtcgagcgccgcgaggccgacgatccaggcgacgacgcccgcgcccacgagcagcacgaagctgttgcccagcacgcgctcggccacgcgcttcttccgctcgcccagcttgatggccgcgagcgcgttgccgcccacgcccacgagcatggccacggccaccatgaacgtcatggcggggttcgccaccgtcgtggccgccaggccgttctcccccaccgcggcgcccacgtacacggcgtcgatgacgttgtagagcgtctgcacgagcacgccgaacacggccgggatggagaattccagcagcagcttgagcgtgctggcggtgcccatgcggtcgatcttcgcgtcgccggcgcgctgctggtccgtgcgcgcgacgggcacggccacctcgaggtcgccggtgtcgagcaccgggcggcgctcgaacggctcctgggcggctatttgggccgacagcgacgtatcctcggcttcgccgccgacgcgggaggcgccctctcccccgcctcgcggcgttcccttcttctcctccatcgtgctaccccgttgcatgaacgcaggcgacctcgagccctgcccgcctcgcggacggtgcggttttctcgatcgcggaatttcccgggttgtcccggcagactggacaggcggcggaacttccctctcggggctcgacgccgcgccggctcgggtcatcccgaacagaggccagtatacgggagcccgcaagcggcggcaagcccgcccgtgcgggcaaatgcgggcgcttgcgaggccctgcttgccagccggccggttgacgggagcgcgacgggcgctcccccggtttttccgagaattcgcgctatgctgtcaggaaagccgtccctggatcgtattgaaggtgaagcgacgttgctcgaacatccccggcggcagccgggcaagagagggaaaagccacggatggagacaagaagagcaagcgaggtggaggccgagcggctggtcgaggcctacgcggacctcatactgcggctgagctacacctacctgaagtccacgcacgacgcggaggacgtctgccagacggtgctgctcaagctcatgggggcccgcacgaggttcgagggacccaagcacgagaaggcctgggtcgtccgcacgacggcgaacgcctgcaaggacgcgctgcgcagcgggttcaggaggcacacggttgggctggaggcggcgcctgatgccgcagtccccgacgagcctgacagcggggtcgtggacgccgtcatggcgctgccggcgaagtaccgcgaggccatctacctccattattacgaagggtactcgatccgggagatctcggagctcaccggacggagcgagtcggccgtcagcgctcatctgagccgcggccgcggcaagctccgcactatgttggaaggagcctattgtggacagggagtataacgaggccatggacgacctgagattctcgcccgccgcgaaggagcgcatggcggcgcgcctggctgcggcgcaggagcaggcgcgggcggcgcgcccgcaaccggatgtgcacgcagcgcgcggcgacaagcgccgctggcgcttcgcggcggcagcggcggccacggtggttctggcagtaggcctggcagggggtgcgtacgcctccggcgcgctcatgggcgtgggcaacgtcatggacgacctgttcggcggcccacccgcccagaccgaggtcgtgggcaagatagggcgccccctcggcgcgagcgccacgtcgaacggcgtcaccgtcacggccgaggccatcatcggcgaccgggcgaactacaccatcgtgttcagcatcgccaaggacgacggcacgccgttcggggatatcgatgccctggacaacggtgcgctgcccctcgggttcggagaggcggccggagtccacgtcgacggggtgacgacgggcggcggcagcggccacttctacgatgccgacccctccgacaacgccatccagtacgtggagcagatgtccgtcacctcgatcggcggcagcatcatcgggcatacggcgcgcgcgagcttccagaacctgtaccggtacggcgacggcgggcgcgaggccgttgccgaaggcacctgggacatgaagttcgtcgtggactacgaggacacctccgtcgacctgccggccgggcagccgttcgagctgaacggcatgggcgccacgctggacagcgccagcatctcgccgatcgcgctcacgctcgagtacacggccgacggcgccatggactggctcgagcaaggatccgggcgcctgtccgagcacaacggcagcgaggtcgaccgcttcctcaacccgtccatcacggtgaacatgaaggacgggacggttctcgaaatcgatgcctcgaagcacagcgggggaacccgcgagaacggcagcacgaccgcctgccataagaacatagtgttcgaagagttcttgaacaccgacgacgtggcctccgtcaccatcggcggcacggagatagcgctgccgtagccactaagccggaggaggcgccgcaagccaaagcagcggggcctcctccggttcgcctaggcgctcttcttggtgacgaagttgatgatggccagcagcaccaccgacccgagcaacgccaccacgaacgaccataggttgaacccggtgaagccctcagccccgaagaagctcatgatgaacccgccgatgagcgcgcccacgatgcccactatgatgttcttcaccaagctgccctgctccttcatgatcatgcccgcgacccagccggccaggccgccgatgatgatccacacgataatgctcatagttatgctcctttctgtgaccgacaccgtccagtgtaggagttcgcgggccgggcagccgatactggaagcatcccgtgcgcacggcgtttccacgctgtttcgcgaagatccgcccgccggccgtcagcggcagtccaggtactccaggaagcgttgcgtggcgagcgaggccgcctcgcggctgcgcagggcgagtcctatggtgcggtaggcgggctcctccaacggccgcgccgcgatgcggtacggcgcgcgccgcaggatgagcccaggcaggatgctcacgcccagcccgcattccaccatggccatgatggcgtagtcgtcccaggtggtgaaccgcgtgcgcggtgacaggccgtcgcgctcgaacacctcggacaccacggtgttgtcgcccttctccagcagcaggaacggctcctcgcacagctcctccgccggcacgcgctcctgctcggccaacgggtgcccctcggggagcacggccagcagctcgtcgcgctcgatgaacaccgtctccaggccgcggtgcgcaggcaggcgcaggaagccgcagtccacgcgcccctcgagcacccactcctcgatctcgctgtaatctcccagcaaaagctcgtagtcgatgttcgggtagtcctcttggaacgcgcggatgacgttcggcagccaatgggtggccacgctggagaacgtgccgatgcggatgaggcccgcctgcagcccgttcagctcgtcgacctgggcctgcaggcgcgcatgctcctcgcacacgcgtcggatgcagggcaggaggcgcgtgccctcggacgtgaggcgcacgccggcccgcccgcgctcgagcaaggcgactttccactcccgctccaggtcggccaccatgcggctcacgcccgactgggaatacgacagcgactcggccgccttggtgaagcttcccagctcaaccgtcctcacgaacgcctggtacttctggatgctcgcgtccaccgccgtcctctctttccgcctccgtgggccatcgtttcccttttgcatgcgattttatcatgcttattatgataaacattcgcttttgtgctttttggttctgtgacacactgtcgtccggcagtttctcgcaccttatgcgggtaggcggcgtatcaaggaaagaaggacgaaggtggcacgggattacgggaagtacgtaggggcgctgctcctgttcggcagcaacggcatcgtggcgagcggcatcgccttgcccagctcctcggtcgtgctgctgcgcacgttgctgggaagcctgctgctggtcgtgctgctgcttgccgcgaagcgccgcgtcacgttccaccggcacctcggcgacttgggctgccttgccgcatccggcgccgcgctgggcgccagctggctcttcctgttcgaggcgtatcgccatctgggcgtgggcaccgcctcgctcgtgtactactgcggccccatcatcgtggccgccctgtcgccgtggctgttcggcgagcggctgacccgtgcgaagctcgccgggttcggcctcgtgctggtcggcgtgctgctggtgaacggccgcgcgctcggcgagggcgcatcgggatgggggctgttctgcggcgggatgtcggcagtcatgtacgcagcgatggtcgtgttcgcgaagaaggtgcgccacgtggaggggcttgagagctctgccgtgcagctcgtgtccagcttcgcggccgttgcgctgttcgtcggcgcaaccggggggacctcgctgcagataggcccggccgactgggcgcccctcctggtgctgggcctggtgaacaccggattcggctgcttcgtgtacttctccgccatgggcaagctgccggcgcagacggtgtcggtgtgcggctacctggagccgctcgcggccgtcgtgctgtccgcgctgctcttgggcgaggccttctcccctgctcaggcgataggcgtggtgctcgtcataggcggcgccgtgtacgccgagtgcggcgcgaggctgcacctgccccacgtccgtcgcgctcgcggcgcggaagcggcgctgtagggccaggcgtttcggcttcgccccaagcgcctggcgtgaagcccgcgcacgctgcgccgcgaaacccccgcaagcacgaaaaagccgcccgaaggcggctttcgagtttctggtcgggttgacaggatttgaacctgcgaccccttgacccccagtcaagtgcgctaccaaactgcgccacaacccgttatgcgtcttggggtttgtatcgtttccccgtcagacagcttgaatatattaccgttactcgccgggtatttcaagatggaatttatcatcttccccgaatctttttcaattgcaggtgatcttgggtgcaacgcccgccggcgggccgatcgtgtggatagcgtgtgcaaggggctttccgcccaaccccgaccgaaaagcacgcggatgcgcgtacactggttgacgcggcacgttgccgcacgttgttggcagtggttcgggctcggcccgcgctgcctgttaaatgccccgcggggcagaaagctaggttttcatgtctacaggtacagttaagtggttcaacgccgacaagggctacggtttcatctcccaggacggcggcgatgacctgttcgtgcacttcagcgagatccagaccgacaggttcaagaccctcgaggagaacgcccacgtggagttcaccgttgccgtcggcaacaacggcaagagccaggctacgatggtgcacaccatctagctcgccgaacttcgaactgcccggggccggcccgccggtcccgattctaaagcccctccgcccttcacgggccgaggggctttttacacccacgtaaggccggcgcagacctggcccggccttacggcaggaacgaggcggccacgtcgaggatgcggtcggccagacggtccttgggcatgaggggaaggccgtacgtctcctccgccgtgacgaaccacacctcgttgtcgtcggtgccgaaggcgcggccccctcccacctcgtttcccacgataagatcggcatgcttggaagagagtttccgctgggcattggccaccacgtcgtcggtctcggcggcgaagcccaccaccacctggccgggacgcttggcggcgccgagcgtggccaggatgtcgggattctccacgagctcgatggtgccgagcagcgcatccgcctcgcccttcttcagcttgcgcgccgcagcctcgcgcggccgcatgtcggccacggcggccgagaacacggccacgtcggccgtcgcgaacgcctcctgggccgcagaaagcatctcgcgcgccgtctccacgtgcacggtgcgcacgccctcgggctcggggagcgccaccgggccggacacgagcgtgacgtcggccccgcgggcggccgcggcccgcgcgagggcgtagccggtcttgcccgacgagcggttcgtgaggtagcgtaccgggtcgatgggctccacggtgggcccggccgtgaccatgacgcggcggccggccaggtcgcggcgcatatccagctcctcgagcacggcggccacgatgtcggccggctcggccagacggccccgtcccacgtcgccgcaggccagatacccgtcgccggcctcgacgatgcgtgcgccgcggatgtgcagcttgcccaggttgtagcgcgtcgccgggttctcgtacatgtgcacgttcatggcgggcgcgaccacgagcgggcacgtgcaggcgagcgccgtggtggtgagcaggtcgtctgccaggccgttcgctatcttggcgataacgttcgccgtacagggcgcgatgacgaagcagtcggcctcctgcgcgagcgacacgtggtgtatggggtcggccgggtcgtcgaacaggcccacggccaccggctcgcgcgtgagcgcgcggaacgtcgtgggacccacgaactcggtggcgtgctcggtcatgaccaccttcgccctcacgccggccttctgcagaaggcgcacgatctcgcaggacttgtaggccgcgatgcagcccgtcacgcccacgagcaccgtcttctgcggcgccggggctgcggcgccttcctccctggccatcagcggcctccttccaaaggggtgcgcagcacgtcggcgagcaccctcacgtgcgcgcggctgcggtcgaggcagggtacatacgtgaaagcgccttcgcgcggttcgcggcccgccttcctgatctggtcgaagtagaacggtttcagctcgtgctcgatgtcgtagagcgtctcgaggcagtccacggcgaagttcgggcacacgaagaacacgcgacccacgtccgcctcggcccagcgcgccagcacgtcgcgcgtgaacggcgagagccattcgcgccccttgtcgaagcggcactggtagccgatggtccaccggttgcgctcgatacccagctcgcccgctatctggaggctcgaggcgcccgtctgcagctcgtaggtgtcgcccgcctcgatgtcggcgagcgggatggaatggtacgagaacagcaccttgtcgtccgagccgggatcgaagccggcatgccgtagggaggcggcgatggcgcgcacgtaggtggggtcgtcatggtagttgtccacgaagtcgcacggcacgttccagcgctcgcggcgcagcgcgcgggccacgccgtccgacaccgatccggtggtggaatgcgcgctctgcgggtacagcggcagcacgacgaggcgcgtgcagccggcctccttcagctcgcgcacggcatcgcgcacgaacggggcgctgtagctcatggcgcagcgcacgacggcatcgaggccctcctcggcaagctgcgcgtccaggccgcggacgagcttcccgtgggcgaccgtgaagggagagccctcgtcggtccagatcctcgcgtacttctccgccgacgcgcgcccgcgcttcggcaggatgaacaggtggaggacgaaccaccagcccacacggttcatcgggacgatgcgcggatccatgaggaagcgcgcgaggtactttcgcacggcatgcgggcgcggctcgtccggcgtgccggtgttcaccaggagaatgccggtgcggtccccttcttgcacgatgtcgatccccttcccggcccgcgcgcgtcgccgaggcgaaacggtgcccgtccaacttgagaaatctgctatagtttagccctatcggcccctcgaggaacggacgaatggagaaagaaccgaaaaacccgggttcgcccgaagcggagggcgatgctccggccccttcgggggctgcgcccgcatgcgcgggcgcctcggagggcacgggcctgctgcgcgaggtcaagcaggaggtaaaggcccaggtgttccacaacaccggctatctgcggctcgactggttcaccctgttctggctgttcgtggcgggctgcgttatcgggctcgccgtggagaccgtgttccacgccatcgtctacggcggcctcgagagccgcgcaggcctggtgtggggacccttctcgcccatctacggcgtgggcgccgtggtgctgacgctgttcctcaaccgcttctaccattcgcacaacctggtcatattcctggttgccatggtggtgggcagcgtgctggagtacgtgaccagctggggcatggagtttttctggggtgccgtggcctggaactactcgggcacgttcggctccatcaacgggcgcacgaacttcgcgttcggcatgatgtggggcctcttgggcctcgtgtgggtacgcgtggcactgcctgccgtcaagcaggcgttctcgcacgtgaacgcgcaaaacgcagccgtgcgcgccgtgacggtgctcatgacggccttcctggccgcagacatcgcggtgacggtgctcgccctcgaccgcgaggggcagcgcgcccagggcgtccccgccaccacctgggagcagcgcttcctcgacgagcacttccccgacagcttcctgcaagccaggatgcagaacatgagcgtgtacgggaaaggataggcaagacagggggacggttctcttgtccccctgttcgatgaaagccagcaaggagtggagggggacaagagaaccgtccccctgtcttgccccttgctgtcttgcccctgccttacagcctcgggcgcggcgcatccctcagcaactcgaagacctcctcgccggcctcggtgcgaccgcggctgcggtcggccagggaatcgagggcggcttgcaggtcggcgggcaggttgtcggcgaacgagagctcctcccccgtggcgggatgggtgaacgccagctggaacgaatgcaggaactggcgctcgagccccaggtcggcagccgggtccttaggggcgcgtgagcggtagaccggctcgccggccagcgggtgcttcgcatactccatatgcacgcggatctggtgcgtgcgtccggtgaacagcttgcagtcgatgagcgagtagccatcgtcgcgcggcccgtgctcgaagcgctccagcacgcggaacgtcgtcaccgcgtcgcgggcagagggcacgtcgcgcacggccatgcgcgtgcgctccttctcggcgcgggcgatgggcgcgtccaccatgccggtgtcgtgcgggatgacgccatgcacgagcgccaggtagcgccggtcgacggcgcgggcgcggatgtcctccatgagcgcgtagcccgcctcgtcggtcttggcggccagcatgaggccgctcgtgtcgcggtcgaggcggtgcacgatgcccaggcggtcgtcctcgccctgcacgttgcacaggttggcggccccgcaatggtggacgagcgcgttcaccagcgtgccgtcgtagtggtcgaccgaggggtggcacaccaggcccacctgcttcgacagcaccaggaggtgctcgtcctcgaagcggatgtccaggtcgatgggctcgccttcgagcgcgcggggggctgcctcctcggccgcctcgtacacgacggtgtcgccggccgccacggcgtgcttcttggccacgttcgcgccgttcacgaacacggcgccctcctcaatggcgcgcgcggcggcgctgcggctggggtatagtccgcgctcggccatgagcgcgtccaggcgcgcgccggcatcggccgcggccacgatgtggcagagcgagcgcgtcatcgctcccccggcccttccccgccgccgtccccgggcgcctgcggctccccggagccctcggccagcgccgcggcctcgcggtcggcgcggcggtacgccaggatcatccccgccacgaacagcacgaatccgcacgtcacgcctatgtcggccacgttgaacacgggaaagtcgatgaaaacgggctcgatgaagtccaccacgtagcccagcgtgaaacggtcgaacgcgttgcccagcccgcccgccaccacaagcgccacgcccacgacctccagcatccccggacggggcgacaggaagaacaggtacgccacgagcacgaggcacaccacgatggacaccacgcccagcaagaacgtcgagtcgccgaacataccccacgccgcacccgtgttgtgcacgagacggaagcgcacgagcccgaggaagggtccgccggctacctcgcccacggcgaacgagccgttgaagtaccctttcgtgagcgtgtcgagcgcgagccacaccagggcaaccgcgccgaacacgagcgtatcgcgcagccgcgcggcccgtccgagggcgccggcgccgcctacggcacccacgcccgtcccgcgcctgtcctcgctcaagcgtccgaccccgcttcctcgtagccgatggcgtcgagcacgtcgccgcagcgctcgcacacggacgggtggttcgggttgccgccgagctcgcggtagttccagcagcgcgggcacttctcggcggtcgtcttgcgcacctcggccgagagctcctcgccttcgacgaacgagaccgacgccacgatgaacagctcctcgaacacggcggcgtcgtactgctcgacatggtcgagcaccgagcgcggggccgtcacggtcacatcggcctcctggctcttgttcacgatcttctggccgcgcgcgtcctcgagcgccttcgtcacgatctcgcgcaccccgaggatgacgccgaagtcctcggcgatgcgctcggcgtccgcatcgcccggcagcgcgggcgcgaagtcggacttctcgggccagccggccagctgcacgtttccgggacgtccctcgcgcgagcggatggcctcgggatagtgctcccacacctcgtcagtggtgaacgacagcaccggcgccagcacgcgcacgagcacctcgacgatgttcatgagcacggtctgcgcagcgcggcggcgcggcgagtcgggcgcctcggagtacacgcggtccttcgtggcgtccatgtaaacggccgaaaggtcgcccacgatgtagtcgtacaccgcgcggtacaccatatggaacttgtattcgtcgtaggcacgctccacgtcgacgagcaggtgccacaggcgcaccatggcccactggtcgacgggttcaagcgcattccagtcggtgaccgtatgcttcaggtcgtcgaagtcgctcaaactgcccagcaggaagcgcatcgtgttgcggatgcggcggtacgcctcgctcgtgcgctcgaggatctcgtcgccgatgttcacgtcctgggagtagtcgacgctggccacccacaggcgcagcacgtcggcgccgctcttcgccatgacgtccgccgggtcgacgccgtttccggccgacttcgacatcttcttgccctcggcgtccatcgtgaagccgcagtgcatgacggacttgtacggcggcaccccgtaggcgcccatgctggtgagcagggacgactggaaccagccgcgatgctggtcggagccttcgaggtacatatcggctgggaagcgcaggccctcgtcggcgcggtgcttcagcacggaggtgtgcgacacgccgctctcccaccacacgtcgaggatgtccttctcggggatgagctcggagcagccgcaggtctcgcacttcacgccgcgcggcaggtactcggacggctcgtgcgtgaaccacgcgtcggcgccctcgcggtagaacaggtcgatcaccgcgtcgaacgtctcggcggtggccaccgtgttgccgcacttggcgcacttgaacacggggatgggcacgccccacgagcgctggcgcgagatgcaccagtcggggcggtcggccaccatggacccgatgcggttcttcgcccacgcggggatgaattccaccttgtggtcgatggcgtcgagcgcatcctcgcgcagcgagttcttgtccatggacacgaaccactggtcggtggcgcggaagatgaccggctcgtggcaacgccagcagtgcgggtagctgtgcaggatcttcttctcggccatgagcgtgccgcgctcgcgcagccactcgatgatggccgggttcgcctcgtccacgtcgaggcccgcgaaggggcccgcctcgtcggtgagcacgccgttgtcgtccaccggcatgagcagcggcacgtcgaactccagcgccaccaggtagtcgtcctggccgtggccgggggccgtgtgcaccgcgcccgtgcccgactcgagcgtgacgtggtcgccgtagatgacggtgcccttgaggtcctggcggatggggcacgtgtaggtgaggcccgtgaactcgcggcccttgagcgcgacgggctcgccgtcggcgccgcgcacgagatcgtaggactcccagcccgcgatctcggccacctgctccacgagctcgcgcgccatgatcatgttggagccgtcggcgaccaccatgacgtagtcggcgtcgggggccagcgacacggccgtgttggccggcagcgtccagggcgtggtggtccagatgagcacgtaggcgtcgccctcggcgcccgcggcctcgaacatcccgggcatgaggtccatcttgaacttcacgaagatggacggcgacgtctcgtcggagtactcgatctcggcctcggcgagcgcggtgtggcagcgcttgcaccagtggatgggcttgcggccgcggtacaccgagccgtcgaggtacatcttcttgaacacctcgacgttgccggcctcgtagttcggggtgaacgtgaggtagggatgctcccagtcgccgttcacgccgaggcgcttgaagccctcgcgctgcacgtcgacgtacttctcggcccactcgcggcagaggcggcgcagcgtgggctggtcgatcttcgccatcttctcggggccgagcgtcttctccaccatgtgttcgatgggctggccgtggcagtcccagccgggcacgtacggcgtgaagaagccgcgctgcgcatgggacttgttcacgaagtccttgaggatcttgttgaaggcgtggccgatgtggatgggaccgttcgcgtacggggggccgtcgtgcaggatgaagggcttgccgtccttgttcttctccagcacgcgctcgtagatgcgctcctcctcccacttcgcgaggcgcttcggctcgttctcgggcaggttcgcccgcatcgcgaagtcggtcttgggcaggttcatcgtttccttgtaactgttcgccacggctgtgagtacctttccttcaagtatgcgctctcgcggggcggcgatcgggccgccgggccccgcggggtttccgttcgttacaaaccgctctagtatagtgtaagcgggcccggatgcccacgtcctgcgcggcgatttccaaaaacgccacaggagcgggcgggcgcggacggtcaggccgctagcggcggcgggaggccgtgcgcaggagggcggcggccgagacggcgcacgcgagcgcgatgagggcgagcgcacccgacgggtcgccggttgcggcgagcgcgcccccgcggcgctcggccggtgccgggctgccgtcggcggggtcgccggttcggtcggcgccgtccgcggagacgatggcgaggtcggtttcggccgaggctgcggcgtagagcgcgccgcctgcgtccgccccctcgggaagcgtcgcgcgcacgcggtacgttccgacatcctcgggcagaccggccttccagtccgaccggccggcttcccgatgctcgaacgccacggcgtcgagggcgtcggcgtctccgtagcgcgcagtcgagacgacctcggacgcggcgaccgccgatccgtcgcagacatgctggacgtcggcgcgcacttccagcgtggccacggggagcacccgcacggggaaggcgtccttggtcgccccctcgcggttctcggccgcagcgtaccccggcgcgggcgccagcccgtagaccgtgttgcccgcccagtcccgcgcctcgtcggcgaagaaccctcccgtgatggaggagtcgccataggtcagcgagccgtagccgctgccgatggcctgcgcgatcggcctgatgacggttccttgggcgtagtcggggtctggtgtctgaccggggatcgccgcgacgaatccgccggtgatcgcaatgttcgagccgcgtccgcccgagcacggcctgatgttgttgtcgagcccggatccgccgcctatggcggtggcgaagtcgccgccataggccataaccgtcccgcccgagatggcgatgttcctgccatcgccaacgaccccgccgccgatgccggccccttccgatcctcccgtcgccgtcaccgttccgcccgagatggccatgtcgctgccgtcgccattgaaaccgccgccgacgcctgcggcccattcaccgcctgtcgccgtcacggttcctccggtgatgacgatatcgttgccgccgccgccttcgccgccgccgatgcctgcggcgcgctcgcctccttgagccgtgacctgaccaccttctatcacaacgtttgagcagaatccccagtagccgccgccgatgccggctgacccgtatccgcctatcgccgtgacctcgccgcccgtgatggtgacgtctgcgctgttgccggtgaggtcgtatccgtatgaaccaccgattccagcgccgaacttgcctccttgggccgtcacgacccctccggtgatggtgatgttcgagccgctgctcatgaacccgccgccgatgcctgctcccggttcattgcctacagccgtcaccgtcccgcccgcgatggtgatgttcgagccgttctgcttgcggtcgccgccgatgccggcagcccctccgccttctgcgaagagcgagccttgtccggatatggcaagcggattctcgccgttccggagaccggcatggccaaaagtcgacgtgagggaattctccccttcgatcacgaggtcgagtccgccggacgcaaccgaaaacgccgctcccggattttctgccgtcgtcggtgggcggtgcgcccgggtccgccatcgagatggtcagcggcgtctcgccgagaaccgtgaggacgccgccctcataggtgaaatcgacgccctcctggccgccgagcacattgagggcgcggccgtccgcgtaagcggtccgcgcgaggacgagggcacagcacgccgcaaggacgataaggacccgcgcccagcgaaccgccgacgcggcctggcgcagcccgggccgttccgccgccttcgaagcccccatacgcgccgcctcttctcggatccctcgccctcctgcacgatcggtagcccattctatcatgggcccaaagcaattcgttgaagaggggcgcgcgcctcggagatcggaggtgttcacccgttctccaaaatcgcggcgtcgaacgcgtagcgaaaggctatacttttactcgatacacggagaagctatgcgtagaagccgctgatcccgttccacgtcggcgcggtgcaacagaggaaggatccgccatgcccatggattttgagatcgtcaccgattcaagcagcaacctcgtcgaggagatgatcgacgacttcggcctgcacgtcctgcccctcaccttcatggtggacggcgaggagtaccagagctacctcaagggccagcacaccgacctcaagcagttctacaccatgatgcgcgagggcaaggtcatcaccacgtcgctgccgaacctggccgagtccgaggcgctcatgcgcggcctcctagagcaggggcgcgacatcctgtacctgggcttctcgagcggcctctccggcaccttcgaggccaccgagcttttgatgcgcgacctggcggcggagttcccggagcgcaccctcctcgcggtggacacgctggcggcctccggtggcgagggcctgctcgtgtggcatgccgtgcagcgcgcccgcgccggcgcccccatcggggaggtgcgcgactgggtggaggagaacaagctgcacctggcccactggttcacggtggacgacctcatgttcctgttccgcggcgggcgcgtgtcgaagacggccgcctgggcgggcaccatgctcaacatcaagccggtcatgcacgtggacgacgaggggcatctcatcccgctcgagaaggtgcgcggccgcaagaagtcgctgaacgcgctcgtggaccacatggagaagagcgccgtccagcccatcgaccagcagatggtgttcatcacccacggcgactgcctcgaggaggccgagtacgtggccgagcaggtgaaggagcgcttcggcgtgaaggaggtcgtcatcaactacgtcgaccccgtcatcggcgcccactccggccccggcaccatggccctgttcttccttgccgacaagcgctagccttgatcttgagcgggccgccgggcaaccgacggcccgccgtcacttgtagtccgccgggttcttgctggacgagccggtggtgttctcctcgttgcgcagctcgtggccgaagcgcacggcggcctcgccgaagcggtccttcacgaggtcggtggcctcgatgaggccgcggcgcttgcgctcgtcgcgcacgacgggctcgacgtcgtcagcggacggcgccgcctcggccacgtcgaagaggctctcctgcacgacgccctcctccgaaaagccgctcatgcccacgccgatgaggcgcagcggcgtgccggggcgccacacctcgtcgaccatggcatagagcagcggcgtgtaagccagctcgtcatcgctcgggcgcggcagttggcgctgcaccgagcgcacgctcaggtcgtcgaacttcacgcgcagcgcgagcgtgcggccgcgcaggcccttgcggcgaaggcggcggcccaccttcgccgccatcgtggcgatggcggcctccacgtcctcgcggcgggtcagatccgtcgcgaacgtcatctcgttggacaccgacttcacggcatcgtcctgctcgaccggcgcgtcgtcgccgccgttcgcccgcacgtgcatcacgcgcccgagcttgccgaacacgcgctcgagcatgcgcaggtcggcgtcggccagctgccccagcgtgcggatgccgcgcgatttcagcttctcctcggccgatgcgccgatgccgctcatcactcgcacgggcagcggcgccaggaagtcgcgctcgctgccggggtagaccacggtgaggccgcgcggcttgtccatgtccgaggcgatcttcgcgatggtcttggaggtgcctgcgccgatggagcatgtcacccccagctcctccacgcgccgctggatgcgctgggccacccgcaccgggtgctcgcggttcaccacggtaggcgtgacgtccaggaacgcctcgtcgatgctcacctgctgcacatgcggcgtctcggagcgcaggatggccatgatggcgttggacacctcgcggtagcgatcgaagcgcccgtgcgtccagatggcgtcggggcacaggcggcgcgccgtcgacgagggcatggcgcttctcaccccgtagggccgcgcctcgtaggaggcggtggacaccacgccgtgcttgtccgcatcgccgcccacgatgacgggcttgccacgccaggcagggtggtccagctgctcgaccgaggcgaagaacgcgtccaggtccaccagcaggatggccgacccctcccacggctcgagcggcagcgggcgcgccggagcttcccctgccggcgggcgggaggggcggttgcccggtgcgggcgcggcggtctgcgggaattcttccttcattgcgcgaattagtctaccatgccgcacgtggccgttgggaacatgtgctaggattatcattccctcgcaacctccgcgcccgatcgcgcgggcggggaacttgacatacacggccgcgctcgaatctgccacctgctgaaacgtcccccagattcccctcaagcccgcagcggaccgtatcgggaagagatgggaaggagagacgacatgtcgaacggatgcgatgcgacgcccggcgtgcgcgccgcggtgaccgccctgcccgagcagctgctctcccctccctacgagttgcgcaccgagatgaactggatagacttctcgggaacggccaacccgctgggcacgcccccctcgttcatccgcgccatgcaggccgccctcgcagccggcgagctgaactactcccccgaccgtgaggcgcacacgctgcgcagcgtgctggcgcgccagcacggcctgcccgtggagtcgtttttggtgggctcgaccgtgggcgacatggtgcgcgccgtcgcgcagacctaccagccctgcaccgtgggcgtggccgtgccgggcccggtggagtacgcgctggcggccggcaacgccgggcaccgcgtggtggagatcacgagccccgccggcttcgtcatgcccgaccccgccgcggccgcgcgccacggcgtgtccttcgacgccgcggtgctggcgaaccccggctaccctacgagccgcctgctgcccctgcccacgttgctggcctacctggacgcatgcacctgggtcgtggtggacgagcgctccatcgagctcacgctcggcggcgagagcatggtgggcctggtgaaggagcaccgcaacctcgtggtggtgcgctcgctctgcgagccgtacgccatgccgggcatccccatcagctactgcgtggcgcaccccgacaccatcgcgcagatcgcgcgcttctacgacagctcgggcgtgccgatgttcgccgaggtgctgggcgagctcgcgctggccgagcgcgagcacctggagcgcacgcgcgagttcctggactccgagataccgtggatgcagtgcatgctgagcctggtgccgggcatcgacatcttccccgccgaggcgaactacgtcatgtgcgcgttcgaccacggccccgacctggatctgggcgtggcgagcaccgaggagctggcggcgcgcctgcagctggccgggttcctcatccgcaagctgcagggcacgccggggctcaccaacggcaagtacttctgcgtggccgtgcgcacccgcgaggacaacgagaagctcatcgccgccctccgcgagatcatcgcggggtgctaggggaggctactccacgcccgtcacctcgtagtcctgctcctccacggcggccttcagggtcgcatcgtccacctcgtgcgcgagcttcgcgacggcggtcttcgcgtcgaggtccacgacggcctcctccacgccgtccacggcttcgagggccttcttcacgcgcgcgacgcagtgctggcacatcatgccctcgacatgcagggtcttctccatggcgctctccttcgttatagggtcttccttcacggcgggcgcgggggcgtccgccggtgctgctgtgaaccgcggctgccacccgcgcagccgcagcgcgttcgacaccacgcacaccgagctcaacgacatggcggccgcggcgatcatcgggttcaggttcacgcctgcgaaggccagcgcgccggccgccaccgggatgcacacggcgttgtagacgagcgcccagaacaggttctgcttgatgttgcgcagggtggcgcgcgacagctggatggccgccggcacgtccatgaggtcgcttctcatgagcacaacatcggcgctctcgatggccacgtcggtgccggcgccgatggcgatgccgatgtcggcgcgggcgagcgcgggcgcatcgttgatgccgtcgcccaccatggccacgcggccgcgctcggccaggcggcggatctcgcgctccttgccctcgggcagcacgccggctatcacctcgtctgcgcccacctcgcgctggatggcggcggccgtgcgctcgttgtcgccggtgagcatcacggtgcggatgcccatggctttgagctcggccacggcggcgcggctcgtgggcttcaccgtgtcggccacggcgatcacgcccagcagcctgccgtcggcggcgaagaacagcggcgtcttgccatcgtcggccaggcgctgcgcccgtgcccccatctcgcctgcatccacgccgtgcgcctccatcatgcgcaggttgccggccagcacggccgcgtcgtccacggcggcggacaggccctcgccggacacctgcatgaagccctcgacgcgagcgtccgccgccatcccgcgcgcctcggcgaagccgcacacggcgcgggcgagcgggtgctcgcttggatgctccacggccagcgccgtcgccagcaggcgctcctcgggcacgcccggcgcaggcagcacgtcggtcacgctcggggttccctgggtcacggtgccggttttgtccagcacgacggtgcgcacgtcgtgggcgccctccagcgcctcggccgacttcaccaggatgccgctcctcgcgccgcggccggtgcccaccatgatggccgtgggcgtggcgagccccagcgcgcaggggcacgatatcacgagcaccgagatggcgtgcgacagggccgactcgagccccgcccccagcaccatccatacggcgaacgtgcccagcgcgatgacgatgaccacgggcacgaacacgccgcttatgcggtcggcgatcttctcgatgggcgccttggaactggtggcctcgtccacgaggcggatgatgccggcgagcgtggtgtcgtcgcccacgcgcgtggcgcgcatggtgaagtagcccgtgcggctcaccgtggcccccgtcaccgggtcgccaggcgccttgtcgaccggcaccgactcgccggtgatggccgactcgtccaccgatgccgcgccggccaccaccacgccgtccaccggcacgccctcgcccgcgcgcaccgccaacacgtcgccctcgcgcacgtcgtcggccaggatctgctcctgggtgccgtcggcggatacgcgcacggccgtcttgggcgccaggtccatgagcgtggcgatggcatcggtcgtgcggcccttcgcgcgcgcctcgaagtacttgcccagcgtgatgagcgtgaggatcatggccgcgctctcgaagtacaggtccatgccggccgcatgcgccccgtgcacgtcgcccgcaccgagcgcgtaggcgatgcggtacagcgcgtacacgccgtataccgtggccgccgtggagccgagcgctatgagcgagtccatgttgggcgcgccgcggaagagcgtcttgaagcccacgcggaagaacttgaagttcacgaacaccacgggcgcgagcagcagcagctgcgtgaggccgaacgccatgatgttgcgctcgcccagcaagaaccccggcagcggccagccgaacatgtggcccatggagatatagaacagcgggatggtgaacgcgaacgacacgacgagccgcatcctcacctgcttggcctctgcggcggccgcacccatcggcgtgggcgctcccgtccgggcgtcgccgcccgcaacagagcccccggcacccacggggcccgcccccttggccgggcgcgggaaggcgccgtagcccgccttctccacggccgcggccacggctgcgagcgtctcgggcgcgccgtcggagtccacttccatgctgttcttcagcaggttcacagcaacgtcggacacgccttccacgccgcgcgccgccttctccacgtgcgccgagcacgccgcgcacgtcatgccggtcacgtcgaacgtctgcttcaaggcttccgcctcctaacttgcgcggcccgtgcggaccgcgtcgtccgtcctggttgtcttcgccgtcgaacggggccgcgtgctcctgcgccacgcgcatcgcaccgttcgatcgggcgcgagcccgccttggctcgcatgcccgcgacgtcggtttttcgttcgctcgcaagcccgcccgatccacccgctgaaagcaccgcttccgcacaggcagctttcccgatcacgaacggatgtttcacgtgaaacatccgccgtcgaatcgcttgcggcgatacgcgctgcggtgcggtcagcgcgagaacttcctcatgagctgcatgacctcgtcgacgacctccacgttgccgcgctgtatctgctcgaccacgcatgtctccaaatggttctgcagaagcttgctcgagatgctgcgcacggcgctctcggccgcggccagctgcacgagcacgtcgccgcagtagcggttgtcgtcgagcatggccttcaccccgcccagctgccctatcacccggttgaggcgcttttgcaggtcggcctgcagctcctcgtcgcggggcgtttccttgtgacggcacgggcacgccgccccgtcgcgcgcgccgccctccgtcgccctcgcgccgtcgtcggtcgcggtcgccttttcatccgtcaacgggccgtcgctcgccatggctcgtcctctctgcttgccttatacccctgtcgggtatctatcacgcggtcagtatataccccatgagggtattgtcaagagacgttgcccgacagtttgtcaacatcgtgcaggttttcgctcctccttggcccgggtcggtccgtgcgaaactgcatgaatggtagaattgcccgctgaaaccgatagaggaggaattccatgaccaccgtctcgtccgtgaaagacgtgaggaacagcaagataagcgtgcaggttgccgtgatatccatgctgctggtgccggtggcgggcgtgagctgcctgctgttccccgcccttgccgaggaggcgctgccgtggtacctgggcgtgccgatggtggtctcggccatcggcagcatcgtggccgtcgtgcgcgagcgcgatgcgggcgcgggccgcgagagcctggggtcggccatcgtgctgtgcgtcctcggcctggtcatcatcgtgcacggggcgaactccaccgtgttcatcggcatcgtatggggccttctcggcctgcagaaggccgcccgcacgttcgacggcatcttctccgacatcaggcacaagcgccccttcgccgtggcgctggcgttctgcgtgctgcagttcgtgctgtcggtgctgctcatactgaacccgttcgccaacatcgagcaccatctcatcgtgctgggcatcgagctcatcctctatcccttcaagctgcatcgcaagcacggcaagctgaagatagaggccgaggcgtagcgacgggggcagggctgcgcgggcggcatccgcgcagctgcaagaggcgtgccgcactggaaaacgcgcggcagaagcccgtcttggaggcggtcctggcaagcggttcctagagcagctcgccgcgcgtcgatatcgtggccaccgcgaacggcacgtcttttccgctgcgcgcgagcgccgtccgcgccgcctgctccagcccgccgcagcagggaacctccatgcgcgcgaccgtgaccgaggccacgtcgttggaggcgaatatctcggccagcttgtccgcgtagtcgaccgcgtcgagcttggggcagccgatgaccgtgatcttgccgtccatgaggcgacggtggaagtccgcataggcgaacgccgtgcagtcggccgccacgagcacgtgcgcgcccgcgaagtacggcgcctgagcaggcacgagcttgatctccaccggccactgcgccaaccgggacctcggcggagcgtccggggctgcggcggcggcagaagcgtcggccgccgccgacgcggcaggcgagtcctctgccgcgaagaacctcgagagcgaccccgggcagccggctgcatgccgcgctgctgcgacgggctcgggcgcggcgcccgcatgccccgacgacccatcggccggggaccctgctgccgccttcgccgcgagcaccgcctgcttgtcgtagggctgcgcctcgcgctgtacgaacgagatggccccggccgggcatgccggcaggcagtcgcccagcccgtcgcagtagtcgtcgcgcaggagccgcgccttgccgcccaccaggccgatcgcgccctcgtggcatgcttctgcgcacagcccgcatccgttgcaggcaacctcgtctatctccacgatcgtacggatcatctccgcctcctccgtctccccgcctgccgcgggcccgcaacctgcgtcacgcaaccgccgcccgcgcccgagcttgctcctattcgaggcaagcctaccatcccgacctcctctcttctgttgtatttacaacatttcccactccaaccgttttttggttcgcgaaaaaacggttgtggagcctctcgccgcggttcgacagccccgaaacgccgcgacccctcggctcggcagctcggtagctcggcagttccgcaggactctctcggttaccgcatctccccatccctcttttttcactcccctgctcacttactccccgcgggcactccccctgcattttctgcaacaatacggcgcccgggcggcctggccgtcccctgcgctggcaccaccgggccccgtcatccaaaaatgtttcacgtgaaacattcgttcgctatcccgacgacccacagcccccgccatgagaggtgccccctcctctttttctctttctcttgcacatctttcccgcgacctccttgcctcccgctcatcgaccgccgtttttccagcacccttccacccccctcccgacccaaccccaacccctccgctccctttcgccgttttccggcgattcgttttttcgttggctgggagaaaatctcccgaacctcttgacagctcccttccggttcgtatacttatgatcagttgttcatatgttaagaggttgaaatgacatcaaagcgaaacgaagcgaacgaagcgcccgccccgacgacggagcacgatcacggatgcgcgtgcggaagcgcggagcatccctcgcccgaccagccgcccgattcgttgcccgacgaggagctgctctacgacctggccgacctgttcaaggtgttcggcgacaccacgcgcatcaagatactctacgccctcatgggcacggagcggtgcgtggccgacatcgccgagctcatcggcgccacgcagagcgccgtgtcgcaccagctgcgcacgctcaagcaggcccgcctcgtgaagttccagcgcgacggcaagaacgtcatctactcgctgtcggacgaccacgtgtacaccatgctggcccagggcatgacccacatctgcgaatgacgagcgccaccgacacgtacagatgtttcacgtgaaacatctcgcccggaagacgaaaacaggagagcgccggcagcggcgcacgtgaaaggaagaaccatgcgcaaggctttcaaactccaggacctcgattgcgcgaattgcgccgcgaagatggagaacgccatcaagggcatcgacggcgtgaaaagcgccacggtcagcttcatgacgcagaagctcgtgatcgaggccgacgacgactgtttcgacgccgtgctcgacgaagcgcagcgcgcctgctcgaagatcgagccggattgcgtcatcctgcgttaacccaccgaccatcgagggggcgcctgcgcacgagcgcgctcgccgcacttttcacgaacggatgtttcacgtgaaacactccggcggcgttccgcgccctcgaccgaaccgaaagttgaaatcgatgaacaagaaacagaaacgaacgaggaaccgcatcgtcctcgccatcgcgctgttcgccgtcgtctacgtgatcgccgagctcatgccgctcgccacgtggctcggaagcgagacagccgcgctctgggtggagttcgcgctcttcctcgtcccctacctcatcgccggctacgacgtgcttttgcgcgcggcgaagaacatcggccacggccaggtgttcgacgagaacttcctcatgagcgtggccaccatcggcgcgttcgcgctggtgctgttccccgacagcgacccgcacatggccgaaggcgcggccgtcatgctgttctaccaggtgggcgagctgttccaaagctacgccgtgggcaaatcgcgcaagtcgatcgccgacatgatggacatcgcgcccgatttcgccaacgtggagcgcgacgggcggctcgtgcaggtcgacccctacgaggtggccgtgggcgacgagatcgtcgtcaaagccggcgagcgcgtgccgctcgacggcgtggtggtgcgcggctcctcgcagctggacaccgcggccctcaccggcgagtcggtgccgcgcgaggtgcgcgagggcgacgagatcatctcgggctgcgtcaacatgagcggcctcgtcaccgtgcgcgtgaccaagcccttcggcgagtccaccgtgagccgcatcctcgagctcgtggagaacgcagccgagaagaaggccaagaccgagaacttcatcacccgcttcgcgcgctactacaccccggcggtcgtcggcatcgcggcgctcttggccatcatgccgccgcttctgctgggcggcggctggtccgactgggtgcagcgcgggctgatcttcctcgtggtgtcgtgcccctgcgcgctcgtcatcagcgtgccgctgtcgttcttcggcggcatcggcggcgcctcgcgcctcggcatcctcgtgaagggcagcaactacctggagacgctgagccgggccgagaccgtcgtgttcgacaagaccggcacgctcaccgacggctcgttcaacgtggtggccgtgcaccccgcctccggcatcgaccccgaccggctgctgtccatcgcggcgcacgccgaggcgtactcgaaccatccgatcgcgctgtcggtgcgcgcggcctactcggggcccatcgaccagcagcgcatcgacgacgtggaggagcagagcggccacggcgtgcgggcgcgggtcgacgagcacgtggtgtacgtgggcaacgacaagctcatgagcgcgtgcggcgtggactgccgcgactgcgagctgaccggcaccatcctgcacgtgtcgctggacggcgaatacatcggccacatcgtcatcgccgacgtcgtcaagtccgacgcggccgaggccgtcgccgccttgcgcgcggccggcgtgaagaagaccgtcatgctgacgggcgaccgcgccgacgtggccgccgccgtggcgaaggagctgggcatcgacgagttccgcgcgcagcttctgccgcaggacaaggtcgccgaagtggagaagctgctcgaggagacccacgcgcagggcgccgggaagggcaagctggccttcgtgggcgacggcatcaacgacgccccggtgctcacgcgcgccgacatcggcatcgccatgggcgcgatgggctcggacgcggccatcgaggcggccgacgtggtgctcatggacgacaagccgtccaacatcgcccgcgccatccgcgtggcccgcaccaccatgggcatcgtgtggcagaacatcgtgttcgccctcggcgtgaagttcttggtgctgatcctggcggcgctcggcatcgccaacatgtggctggccgtgttcgccgacgtgggcgtggccgtgatcgccatcttgaacgccatgcgcgccatgaacgtgggcaagctgaagtagccccctccccaagcggcgccgtcctcgcagccgtcgccgcttggcaaccccaccatcaacaggatgagcctcccgcccctacgtttcgttcgagacacctgttctcggcgtatggttgatagaactttgcaaagtggagcgtgcgacggatgcagaaggccgtgcacctcggcattccgctcgcatggaacctgtccaggaaatcttcctcgcactccttcgagtaagccattttccaggcttctttcatcatcgtaaaaccagtccggaaaacgtccgaaagccctaacgatataatgagaaagaacaagttaaagcgagaggaaattagcaatgaaatcagttttacttatagggcagtcaaatatggcaggacgtggattttcaagcgaggttatgccgatttgcaatgagaatatttttatgcttagaaatagcagatggcagatgatgacagagcctatccactttgaccgggcagttgccggtgtcggaccggcagcgtcatttgcgcaagcatggtgcaacgcgaataaaaatgaacaaattgggcttatcccttgtgcggaaggaggaagttccattgatgaatggaataaggaaggcgctctatttcgccatgcagtcagcgaggcaaaattcgccatgggaaacagtgaattgattgcaattctgtggcatcaaggtgaaagtgatggtcacagcggaaagtacaaaaattattatcaaaaacttaacgttttaattaattcattcagaaaagaactgggagctttggaagctccgttcattgttggtggtttgggagattatttaggtaagtctggatttggaataagctgtgtagagcatgacttgattaaccaggaattacttaaatacgcagaaaataataggaattgttattttgtaacagggaaaaaattataccctaatccagatggtatccatatcaatgcagagtctcaaagaagatttggcattagatattttgaagcttatcagaccaaatcaaatcaatctataaggaaataaaagcaaatcgaaaaacaggatatatgcgaacccaccaaaggaaaaagctatgacccgtcgatttttcagtataatcatctaggccccgttaacgatggggtcttttttttgctttcgttttcgattaattttttagttccgttcccaccattctgtactaaagtagctggccttgtcgcggggcgcctgtcctcgagcagtattctacggagcctgtcggcatcaatcttatcggcgatggacgggcgccgctggaaccggtggcatgattagttaggctctcgaagagcaatatatatacgccagtgtccggctccagcgacgaccagcggacgagccatgcatagcacgtccggttcattattataggcaacaatcgtgccaatttgccgaggagcgaaaaggtttcaggctttttcatccaggattagggtgtgcaaaattaacccccccatgctctataatgtggggagcgcaaaggacctgcttccggaaaagggctaggctgttgcgcgatgcgacggctcgtagaaggtgccgttagccaagagggcgtagatgaggtctacgcgccttcgcgccagggctcggagcgcctgcttgtgctgcaagccctcggcgcgtttcctgtcgtaataggccttgcagcgcgggtcgtaccgtttcgctttctgcgccgactcgatgaacgcattcttgagcttccggttgccgttcttccttttcttgttcttcttgacgctcgtgcccgactcttccttcacgggcgcgatgcccccgtaggaagccaggtggttcgcgtctgggaagcggttgatgtcgccgatctcggcggcgatcgtcgccccgtagacgcgcccgatgcctgggacgctctttaggatcgccgtctcgggcaccgcatcggcgcgctcctcgatggcggcgtccagctccgattcctcctggtcgagctcgaggatgcgcttggctagcttcttgatctgaatctcgatgacctcggttgccgggagttcaaccgtcatggtgccgagcgcctcgaacacctcctcaaccttcttaggcccacgggttttctgatacttgaggcttcccgcccacttggagacgcgggccttgccagcgcgtttgagccctcgggggccgccgtagcgctcgaatatttttatggccagatcggaatggaggctatcgccctcgaaaagctgctcgaggggcggggacacctgcagcaggaggtcgtgcagtcggttgtagtagcgcgtgcgctctttgacgatgtccacccgccgcgagttgaggactttgatttctgcgaccgcgtcgtcgcgcgtgccgacagttcggatcagcctcggggtgctgagggacacgtcggcgatgatgaaggcgtccttggcgtccgacttgccttccttgtaggtctcggcgatgttcttgaagtccttaggggtgatatgggcgacgtcgatccccatatccttggcgacggccaccacgagccgtccgatgttgccgaactggtcgacggttacgagcaccttgccatgcccgctcgcctcttccaacaactcgcggatactcgcctcatcttgatcgaagggccgggacagcaaccgttcgcccgtcgccccgtcgagcgccaccgcatggtgcttggtctttcctacgtctacaccgacgtacacgtcgtaatccatctccgcccgctccatagttccccttcctcgatgaatggaagctggccttgtcgcggggcgcctgtcctcgagcagtattctacggagcctgtcggcatcaatcttatcggcgatggacgggcgccgctggatccggtggcatgatactgggagctataggtagcattagcactgcgccggtgtccggttccagcgacgaccagctgcggaagccatgcatggcttccgcaagagaattataagcaaaactacctagtagaatattgtcgagccgttagataatgaagcgaacatagtaaaagggttgcatgaaagagaacacactgttgcggagaaaagatacctggcactagagcgatttacattagggaaaagctctatggaggaagtgatggaatttttaaagtaggggtatgacttctagtttatgtaggaaacggggcgttcatgggcgggcaacgggagggcgaccgcttaggcgcggagggggcccgcggtacgctggcgggcatggaatctcgcaagacatcagggaacgcccccgccccctccggccgctcgaagatgcggccgttcatcgtcgccgggcgatgggcggtcgccgtcgcctggggcgtggcggtcgtggcgctctggcctgccatcccccgcatgttcgccgccttcctgctcgccttcctcctggtgaacgcgctctggcaacacgcagagctcaagcgggcatgcgcgatggcgttcgccctcacagggctgcttgccatcgtgggagaggttgccctgggaaccgccgactacgtgtccgtcccggtgctctggctcgtggacgcgctcggcgcggtcatcggggtcctcgtggcctacaccgcgctgccgccgatcgaccgcgcgatcaaccgcctcgggtagcgtccggcgaaccgcaccggcccccctctcccctcccgagcccgcccgcatcgtggcgcctcgagggcatgagccaagcgagcgaacccgccccggcacgccttcctccctgcgcggcatcccgttttctgctaccgtgttcgcaaacgcccgcaggagaaggagccgagcgcatgcgcatactcatcgtggaagacgacgcggccatcgtggccagcctgaccgacctcttgcgccgcgaggggtacgagaccgagcacgccgacggccaggacgcggccgaggggctcctggccgcatcgcggttcgacctcgcgctcgtggacgtggccctcgcgcagggcaacgggttcgccgtgtgcgcggcggcgaaggcggccgacccggcaccggccgtgatcttcctcaccgcctccgacgacgagtacagcacggtggcgggcctggacatgggggccgacgactacatagccaagcccttccgcgcccgcgagctgctctcgcgcatcaagagcgtgctgcgccgcacctcgggcgcgtcggcggcgctgcgcctgggcgacgtggaggtggacccggcggcggccgtcgtgcgcaaggcgggccgcgaggtgcagctgacggcgctcgagtaccggctgctgctgctgttcgcgcagagccagggccgcctggtcacgcgcgagcacgtgcgcaacgccatctgggacagcgccggcgagtacgtgagcgacaacacgctgaacgtgtacgtgaagcgcctgcgcgacaagatagaggacgacccggccgacccccagctcgtgctcacggtgcggggcctcgggtacaaggcgggccccgcggcggaaggcggcgcgcgatgagccttctgcgcaaccgatccttcgccgtggagctggccgtgatggccggcgcactcggcgcggtcgcggccttggccggggcgctcgcggggccggcggcgggatgcgcctccctgtgctcgctcgccgcaacctgcgcgctcttcgccgcgttctcggcgcgccgataccgcgagatcgcgcgcctcgccgccgaggtggacgaggtgctgcacggcggccggcgcatcgccttcgcggactaccgcgaaggcgacgtggccgtgctcaagaacgagctggcgaagatgaccgcggcgctgaccggcgccaccgagcgcctcggacaggagaaagccgccctcgccgacgcgctggcagacgtgtcgcaccagatcagaacgccgctcacggctatcggcctcttagtgcccgccatcgaggacgccacaggccccgccgagcgcacgcgcgccctgcgcgagctggaggcgctcgtggagcgcgtgggctggctcgtgacgacgctcctcaagctggcgaaggccgacgcgggggccatccgcgtgcaggccgcgcccgtggacgtggagcgcatcgtgcgcgacgcgctggccccgctggccggcgcgttcgatttgcgcggcgtggcctgcgaggtgaacgtggcccccggcgccacgttcacgggcgacgccgcgtggtcggccgaggcgctcggcaacgtgctgaagaactgcctcgagcacacgcccgccggcggcaccgtgcgcgtgagcgcgcgggaggacgcggtggcgctgcgcctgcatgtcacggacacgggccccggcatcgcggccgaggacctgccgcacctgttcgagcgcttctaccgcggggaggggtcggaaggcttcggcatagggctcccgctcgcccgctcgctcaccatcgcccaaggcgggacgctgcgcgccggcaacgaccgcgcgacgggcggcgcgcgcttcgacttcgcgttccccaagatggtggtgtgacgcgcggccccgcgaaggcgaagatgacgatttcgtaatgcggggttcacggtgccgcaagcgcgcgatgggacactgttccgtagagaatcgagagaaaggcgagatatggatatcctctctgcggagcggctgacgaaggtgtacgggcaggggccgacggcgctcaaggcgctcgacagcgtgacgctgtccatcgggcagggcgagttcgtggccatcgtgggctcgtcgggctccggcaagtcgacgcttctgcacctcatgggcggcgtggaccgccccacatcgggcaccgtgcgcctggccggcgcggacgtgtacgcgcgcaccgacgaggagcttgcggtgctgcgccggcgcgaggtggggctggtctaccagttctacaacctcatccccgtgctcaacgtggtggagaacatgacgctgcccgtgctcatggacggccggccggtgaacgaggagcgcctgggcacgctgctcgacggcctggggctgcgcggccacgagggattcctgcccaaccagctctccggcggccagcagcagcgcgtggccatcgggcgcgccctcatgaacgcgcccgccgtggtgctggccgacgagcccaccggcaacctcgactcgcggaactcccgcgagatcatgggccttctgcgcgactcgaaccgccacttcgaccagacgctcgtcgtgatcacgcacgacgaggacatagcctgcgcggccgaccgcgtcatcgccatcgaggacgggcgcgtcgcctcggacgagaggcggcgctagcatgggcatcttcacgcgcttcacgctgcggtcgctcgcgaaaaaccgcgtgcgcaccgccgtcaccgtggtgggcatagcgctctccaccgcgcttctggccgccgtgctcacgagcgtgggcagcatgcaggcggcgcttatggagcgcaccatggccaccgaggggtcgtggcacgtgttctcctcggagctgtccgcgaccgccgtcgacgcgcttgcggacagcgaccaggtgagcgacctcatgacgttcacgaagggcggcacggcggcgctctcggaggaggatgcgcgcaacctgggcgacttcctcacgctgaagagcatgcccaccgtggctaaggggtcggacgagccgatgggcgcgccgtacgcgctcatgcccgagctcgtggagggcggcatgccgcagaccgcggacgaggtcatcctgcccgactacctcaagggcgagacgctcggcgccgacggcagcggcggcgtgcgctcggacggcccgatcgccgtgggctcgtcggtgacggccgacctgggcgtgcgcaccgccggtcccgacggcgaggagtccatcgaggacccgcgcccgcgcacgctcgtcgtgaccgggttctacgagcgccagccgcccttcctagcgaacaactacgcggtggccacgtactcctcggtcgcgatcaacgccgccggctcccctgcgggcatcggcgcaggcgcggacgatgcgacgatgggcgcgtacgtggtgacgcggggcatcggcagcgtcgacgagatgcacgcgttcttcgaggaggcgacggggctcgccgatgcggacacgaccctgtaccaccggaccttgttcccctacctgggcatctccgatggccggcccatctggggcacgctttggatggtggccatcgtgctcgccgcggtgatcgtggtggcgtcggtgtcgcttatctacaacgccttcgccatctcggtggcggagcgcacgcggcagttcgggctcttggcctcgctcggcgcgtcgaggcggcagctgcggcgcacggtgctcgccgaggcgctcgtgctgggcgccgtgggcgtgccgctggggctcgtgctgggcgttgccggcacggtcggcgcgttcgccctgtcgcaagaggcgttcacctcgctcgtgggcaccggaggcggcgtgcccgtgcacgtggacgccgccgtgctggccgccgcggcggcgctctcgctggccacgctcgtggcgagcgcctgggtgccggccctgcgcgcggcccgcgtgtcggccgtcgacgccatccgccagacccaggacgtgcgcctctcgaagcgcgcgcgccgcaaggcggccgcgcccgccgggacccaggtgaggatgggcgcggccgggaagctcttcggcgtgcccggcttcgtggcgcaccgcaacctctcgcgctccgcctcccgcgggcgcaccgtcgtggcgtcgctcgcggtgagcgtggtgctcatcgtggccaccggcagcctggccgacgcgctctcgcccatctccgaccgggtcgggcgcggcggcgcggcgggccaggcggacgtcacggtgtcggcgcacgtggactcctacgagcaagggtcgaccgccgatctgcactcctacgcccaggagctcgaacgcttcctcgagcaggcccgcgctgtcgagggggtcgagttcctgggctccacgcgccaggggcaggccgaggccgtcgtgcctgcgggcatgatctcgcccgaggcgagggcggcgcgcgagctcatcgacgccgagcggcgcgccgcatacagcgcgccgagcttcaacgcgcagggggactacctcggatacctggcgctgttctacctcgacgacgcctcgtggcgctcgctcgtggcggagctgggccaggacgaggcggcgttctgcgatccggacaacccgcgcgccatcggcctgaacacgttccaggaaacgctcgcggacggcacctacgtctcggccgagcccttcgccggcacgggaagcatcgagctgtacacggtggatcgccgcgagggcctggccttcatgggattgcgggaaggcccgaacggagagctcgttgcaagctataccgatgggaacgacccgaaccagcgtatcgagacgttcccgatcgaggaggtggcggcgaagcgcgtcctcgacgtgggcgcgctcaccgagggcgagcccggcgtcctgaacgccttggccgcgagcagccagttccccgcgctcgtccttcccgagagcgcggccgccgcccctgcggacgaccgcttcgccagcccgttcacgtactcgttcgcaagcttctccttcaaggcggccgaccacgcgaaggccgccgaggagctcgaggcgctcgcgcagggcctcgacggcgtcaccctgtacgtgagcgacctcgcggagagcgcgcgccaaaaccgcctgatgacgcaggccatccagctgttcgtgatgtgcttctccctcatcatggcgctcatcgcggtggcgaacgtgttcaacacgctggcgaacagcatcatcctgcgcacccgcgagttcgcggtgctgaagtcggcgggcatgggcaaccgcgcgttcgcccggatgctcgcctacgagtgcgcgagctacgcggcgcgcggcctcgtgatcggcctggcggcggccacggccgtggcctgggcgctccaccgggccacgtcgctggcgttcgagggcctggcgttctcgctgccatgggcctacgtgggcgctgcggtgggcatggtgctggcagtgctcgccctgagcgtggcctacgcgctcgtccgcgcccgcgccggcagcatcgtggaggccctgcgcgccgacgcgatctaaaagggcaggctcctcgccccgtcctgctcgagcaggacggggcgctccctccctcagcggttctctatatggccgatgtttttgagctcgatgttgatgaggccgttcgggccgctcacgaactcgatgaagtcggggttctcgccgtactcggccgggaaggttatgtcgatgcccgtgtcggtgcggatcttgtggctcttcgccacgcgcttggccacgctcttctccaccaccacgcgctcgggcagggcctcctcggcaagcgcctcctcgaagcgcttctgcaggggctcgtcctcgaacacctcctcgcccaggtcccacggggccagctcgtcggactcgtcggcgttctcggccacgtaggccttcgccttcgacaccgccacggccgtgttggcgccgtattcctcggccacttcctccaccaggcgcgccaccgtgtcgaacacctccttgctcgacgcctccatcgagcattgcaagaggccgtcggggatgagccagcggcgctcgcccgcgatctcgcgctccttgtcgcagaacgacacggagagcgtcttggactccaccaccgcgaacgacgccaccttctgcgaggggttcggcaggatggcgtggtggcgcgccacgtccacgcgctgcgcgccgctctcgccgtagcccacctcgtgcatataggcctgtttgctctccagcagcatgaacgcgaagtagcgcttgccgcgcgcctcgtaggcggccacggcctcctcgtcgtccatcgcgcgcaccgtggtatcgggatcgtcctcgaagtcgagcaccaagaggtcggccgactcgctcttctccatccgccccagctcgccggctatgaactccgccacctggacggacaggtccacgaacccgcgctgcccgcggaagtaggcgcgcagctcctcggcgaacatgctgtcctcggcgaactcgccgcgcttgctgtccatgttgccgagcgccttctttgcatggctcgtcacgtagcgcttcgcgttcttgctggcaaggtccagctcctcctgggcgtacacgttcacgcacgacacgaagtcgaagacgtgcaggatggcatggtttatcttcatgaacggctttcctctttctcttccatttcctcgaacccccacaggcgcacctcgggcacgagctccacgcccgcgctctcgcgcacgcgcgcctgcacgtcggcgatgagccgccgcacgtcggcagccgtcgcgccgcccgcgttcaccacgaagcccgtgtgcttctccgacacctgggcgccgcccacgcggtatccgcgcaggcccgcctcctgcacgagctggcccacgaagcacccttcggggcgcttgaacgtgctgccggcgctcggcagctcgagcggctgcttctcggcgcgccggcccgccaagtcgtccatgcgcgcctggatggcggccgcgtcgtcgcggcgcaggaccagcgtggcggccagcactacgtagcctgccgcgcccatcatggagtgccggtacgaccattccgcccgttcggcgtccacgtcctccacgctgccgtcgggggccaggcagcgcaccgaggtgcacacgtccttgaactcgccgccgtaggcgcccgcgttcatgatggcggctccccccaccgtgcccgggatgccgcaggcgaactcgtagcccgcgagccccgccgcgtgcgcggcgcgggcgacgtcggcgttcgcgcaccccgcctgcgcgcgcaccgtctcgccgtccacctcgagcgccgcgaggttctcggccaggcgcaccacgatgccgcgcacgccctcgtcggccgccagtacgtcgctgcccagccccagcacccggaagcgcgcgcccgcccggcggcaggccgccgccacggcgcgcacctcgtcctcggtccgcggctccacgcagcactcggccgggccgccgatgtgaaacgtcgtcatctccgccagcggcgcatcgcagcgcacgcccgccgcgcccacgatgccgcgcagctgctccaagagcgcttcgcccaccacggcgctcacctccgccggttcagctcgtggaggcggcgcaggccgcgcagcgtgagcgtctggtcggcacgtgccccgtggcgcaggagcgccgccatggcgtccgcgtccgcgcccgtcaccaccaccggcgcctcgcagccgagctcggccagcaccaggtccaacagcccgtcgatgcgcgcaacctcgcccatgaccacgccggcctgcatggcctcgcgcgtggacgtgccgatgaccgacgtcggcgccttcagctccacgcgcggcaggcgcgcggcggcctgcgagagcgccttcgcgcccagcgccagccccggcgcgatgatgccgcccaggaacgtgccctcggcgtccagcacctcgaagttcgtcgtcgtgcccaggtccaccaccacgagcggcccgccgtagtcggcaagcgccgccgccaggtcggccacgcggtcggggcccacctcggcagggtcgcggtagcgcatcctgatgcccgtcttcaggccggggcccaccacgagcgcccggcgcccgcactccgcgtgcagggcccgggcccacacgtccacgaggtcgggcacgacgcacgagaggatggcgtcggccggccggcacgctccgcctgcgggcgccgcatcccccttcccggcgcctttgcggcgcgcgagcgcatcgaggaagcccgtcaccacgaggcgcgcctcgtcggacgtgcaccgctccggcgtggtggcctcccacgttgccacgagctccccgccgtcgaacagccccagccgcgtgacggtgtttcccacgtcgaccgccagcaggccgccggcccgctcgccgccgaccgcctcacgcgcatccgttcccatgatgtcgcctcgccttccgcgcctcgtgcggccgtcggaccgcgcgctgcgccttttttacccaatactgcgaaattaacgatgttcaccgtcgctcgccccgattatactgtacccgtctcatcagtaacccgacttcccgaagagaggggaagcggatatacgagaaggagcggaacatgcaagccttgaaggggcaactgaccctgcgcggcgtcgccatcgggtgcgtcggctgcgcgatcatcaccgcggcatcggcctacacggccctcaagatgggggcgcttccctggcccatcatcttcgccgccatcatctccctgttcttcctgaaagccctcgggcacacgaacctgagcgaggcgaacgtcacgcacacggtcatgtcggccggcgccatggtggcgggcgggctggctttcaccatccccggcgcctggatgctcgggcacgccaccgagatcgactggttccagatgctggccgtggcgctggcgggcgtggtgctgggcctcgtgtgcacggccctgctgcgccggcacttcatcgaggacgccgagctggagtaccccattggccaggcggccgcgcagacgctcgtcgcgggcgactccggcggctccaccggcaagaagctgttcggcgccatggggctggcgggcctgttcacggcgctgcgggacgggttgggcgccatcccctccctgctgttcggcaacgtggccctgccgggcgtggcgttcggggtgtacctctcccccatgctcctggccgtgggctttctcgtgggcaccggcgcggtggccgtatggttcgccggggcgctcatcggcaacttcggcatcgtcgtgggcggcacggcggcggggctctgggacgtggccgcggcgcagggcatcgtatcgagcctggggatgggcgttatgatgggctgcggcgtgggcgtcatcgcgaagaacatcctgccgaaggccgtctcgctcgtcagggacacgcgcggctcggtggccgtggcccgcgttgaggccgcctcgccgaccgccgccgacgaggcggcggccccgggcgcccgccgtcgccgccgcctcaccgcgggactcgcggcgctggccgtggccgccgtggcgctgctcgcgtgcttcgcgctggggctcggcgcggtgccgagcgtcatcgtggtgctgctcgcgttcgtgacctgcgccatgagcgcgcagagcgtgggccagaccggcatcgaccccatggagatcttcggcctcatcgtgctcttggccgtggccgccctctccgacgtggcgcaggtgcagctgttcttcgtggccggcgtggtggctgtggcgtgcggcctggcgggcgacatcatgaacgacttcaaggcggggcacgtgctgggaacggacccgcgggcgcagtggatcgggcaggccgtgggaggcgtgctgggcgccgtggtggccgtggccgtcatggcagtgctcctggccgcctacgggcccgacgcgttcggcctgcagggcacgttcgtcgcggcgcaggcatccgtcgtggccaccatggtggcgggcatcccctcggtgccggcgttccttgtcggcctggccgtcggcttcgcgctctacctgctgggcgcgccggccatgatgctgggcctgggcatctacctgccgttctacatgtccctcaccgcgttcctcggcgccatggcaaagatggcctacgatgccgtgtgcgcgcgtcgccgcgcgaagctgccgcccgacgaggcggccacgcggctcaaggcgcaggacgagacagggctcgtggtggcaagcggcctgctgggcggcgagtcggtcgtgggcgtggtcatagccctggccgccgtcgcggccggattgggggcgtaaggacgcccctcccgctgcaggcgccggcccggggagggcggcttcgtggtaccatggcgaggacgggcgcggcgcgggacgcgcatcggccgaccccgcaaccgcccgccccgcccgaccctcggaggttttcccatggagctcatcatcaccctatgcgcggcgctgtccgccggcacggtgttcggcgtcgtcgccggcgcggcgaagtaccgcctgcaccgcaagcggagctattccgacaagcaggtggccgcctaccagcgcctgtggaagaagggctccatcctcttgcggttcgccacgggcaccgtcctcgccctcgggctcatctggtgcacaggcttcctcgtcgtcggcgcgctctaccccgaccagaccgattacgcgaacaacatggcggagctcatcgtgtgcgtgctcaccgtggtgtccatcatcttcgccttctacgagttcgtgcgcaggaagtagcgtcgcgcgcggatcgggcacgaagcgaaacgggtgcggaggttggcgtggcaagacagcgagaagccccctcgtgcagattcggcacgagggggcttctcgctgctggctcgttccggcagccgtcgagccgccggaacctagttgaacttgaatatcttctgggccatgcggtagccggtgatgccgatcttgcggcccagctcggtgggcaggttcgtgcccatgttcagcacgctgcggcggatgcgccggtagacgtcggggttcttctccttgaggtagtcccagatgccctcgcgcttgtcctcggcctcgtcggtgcctatcatgcgcaggaagatggagcagatgcacatcatcatggacaggtagttctccatgtagcgctccaggcgcttctcgggaacggcgtcgggcagctgcacggcgtcgatcatgaggcgcgtgacgcgcagctgctggtcgatgcggcccttcatgacgctctcgttcacgctctggtcctcgcggcctatgtagtagcggtacatgtccacgtcgcggtagtagatggtgcgcacgtgcggcagcggcacgtacacgaagatgttgtccacgtagaacgtgtgcttcggcagctccaggcccatgtcgcgcagaagctcggtgcggtagaccaccgagtgcatgagcaggtactggctctggccgaagtgccccacctcgtcccagccgaactcgcgtccctcggggaacacgttgcggtagtgcatgacggtgcgcgagccctcggacaccttctcgtacacgtagttgccgatcacgaggtcggtggcgtcctccagctcgttctggcggcgcaggtaggccatgatctcgcgcatggcggcctcgtcgagccagtcgtcggaatccaccaccttgaagtagcgccccgtggcgttcgccaggcccgtgttcacggcctggccgtgcccgccgttctcctggtgcacggccttgacgatgccggggtgccgctccgcccacgcatcggccttggcggcggtgtcgtccttcgtcgagccgtcgtccacgatgatgatctctatgtcgtcgccgcacttcaagatggactcgatgcacgcgtccatgtaatcggccgagttgtagcacggcacggcgaaggagatagtcttcacggcgctaccccaccagctcgtctgccagcgccagcgcgcgcccgatgatgacgtccatgttgtagtagcggtactcggccaaccggcccaacgggtggaagttcggcagcgacttcgtcagcgcgcggtagcgctcgtagtgcgcggcgttctcgtcgttgatgatggcgtagtacggcgtctgcgtcttggggtcgtcgtaggagtggctgtactccttcatgatggtggtcttgtcggtctcctggcccgtgaggtacttgaactccgtgatgcgcgtgtagtcctcggtcacggtgaagttcaccgtgccgcagggcagcacgtggtcggcgtcgtgcgtctcgtacacgaagtccaggctgcggtacggcaggcggccgaagcgcgacaggaagagctcgtccagcggcccggtgtagacgatgggccccgtgaacgggcggtccttgacgttgatggcggacagcggagcgtcctcgtcgtcgctctcgaactccaggtcgaacacgctctccgcctccacgcccaggcacacctgaatgttctcgtggtcgagcatgcgctcgaacagcggggtgtagccgtgcagcggcatgccctggaaggcgtcctggaagtagcggttgtcgcgcgacacgaacacgggcacgcgcgccgtgacggaggggtcaacctcctcgggcgtgaggccccattgcttctgcgtgtagtagaggaacacgttcttgtagacgaagtcggcgatctcggagagctccgggtcgtcctgggcgcgcagctcggtgatggtcaccttgcgctcgtcgccgaacgtgtccacgagcttctccgtgaggcgcgcggccttctcctcgccgaaggcgatctccatggagttcttgttgaacggcacgggcaggtaggtgccgtaccagtcggccagcacctcgtgctggtagtcgcgccattcggtgaagcggcgcacgtagtcgaaggcgcgctcgtcgttggtgtggaagatgtgcggcccgtagcggtgcacgaggatgccggcctcgtcggcctcgtcgtacatgttgccgccgatgtgcgggcgcttctccaccacgagcacgcgcttgccgccgcgctcggccagctcgcgcgccatgacgccgcccgcgaacccgcttcccacgacgagggcgtccacctcgtcgatatcgacgtccttgaaatcgcagtactgcacacccatggggcaccttcctttagtctctataccagcggtagggcctctcccggcccgaagtatgcgcatattgcaccgagaagccagtttaccgaaaaacccagcccgcgggcacgctatcatacaaccatcgtttttttcgcatgccttccgtcgtgcgagcttcgatcatatacgcgaaaggatagtgccgatgagtgcatttcttgattccatgctggttcgcgccaagggcgacctgcagacgatcgtgctgcccgagggcgacgacgagcgcacgctgcaggcggccgagcgcatcttggccgaaggggttgcgaacctcgtcatcctgggcgatgccgcggccatcgaggcgagcccctacgcgctggacggcgcccgcatcgtggacgtgcgcacggccgccgagcgcgccgagttcgccgccgccctctacgagctgcgccgccacaagggcctgacgcccgagcaggccgaggccctcatggacgacgtgctgtacttcggcgtgatgatggtgaagcagggcttggccgacggcatggtggccggcgcctgccacgccacgggcgacgtgctgcgcccgagcctgcagatactcaagaccgcgcccggcgtgaagctggtcagctcgttcttcgtcatgtgcgtgcccgactgcgacttgggcgcgaacggcacgttcctgttctccgactgcggcctggaggtgcagcccgacagcgagaggctggcgcacatcgccgtgaactccgcgaagtcgtgggagaccctcatgggcgaggaggcccgcgtggcgctgctctcgcattcgacccatggctcggccaagaacgccgacgccgccaaggtggtggaggcgaccgagatcgcacgcgagctggcgccggacctggcgttggacggcgagctgcagctcgacgcggccatcatcggctccgtgggcgcgtcgaaggcgcccggctcccccgtggccggccgcgcgaacgtgctcgtgttccccgacctggacgccggcaacatcggctacaagctcgtgcagcgcctcgcccgcgccgaggcgtacggccccgtcacccagggcatcgccgcgccggtgaacgacctgtcacgcggctgctccgccgacgacatcgtgggcgtcatcgccatcacctgcgtgcaggcccaggcgaaagccatcgaatagcgaagcgcctgcaggccgcccccgcctatgcgcaagggggcggccgagcgcaggggatttcctgctcccccggacggccatgcacggcataccaaggcggccccccgcgttgggcggggccgctccaggttctgggctcgcaggagaaagcgccctacaccagcaccggctcctcgtcgaacacggtgccttccacgcgcatctgctcgtggacgatgtcgtaggtgtcgcgcgcgatcatgtactcctcgttcgtggggatgatgatgatcttcacctgcgaggagtcggccgatatctcgcgctcgaagccgcgctggcggttcttctcctcgtcgaggatgatgccgagcggctgcaggccggtgaagatcatgcggcgcatcttctcgcagttctcgcccacgccggccgtgagcacgatggcgtccacgccgcccatgacggcgatgtactggccgatgtacttcttcacggagttcgagtacatgtcgtaggcgagcatggcgcgctcgtcgcccttctcggaggcgtcgcgcacgctgcgcaggtcgttcgagatgcccgagatgcccagcaggcccgacttcttgttcatgaggtcgttcatctcggcgccggtcaggttctcgtgctccatgacgaagggcacgatggccgggtcgatggcgccgcagcgcgtgcccatcatgaggccatcgagcggcgtgaggcccatggacgtgtccacggccacgccgtggtcgatggcgctgatggagcagccgttgcccaggtggcacgtgatgagcttgaggtcctctatcggctcgtcgagcacggcggcggcgcgctcggagatgtagcggtggctcgtgccgtgcgcgccgtacttgcggatggcgtacttctcgtacagctcgtagggcagcgggtacatgtaggccttcgggggcagcgtctggaagaacgacgtgtcgaacacggccaccatgggcacgtccggcatgtgcttctggcaggcgtggatgcccatgagggcggcaccgttgtgcagcggcgcgagctcggccagctcgtctatcttgtcgatgacgtcctggtcgatgagcaccgagcggtcgaagtacttgccgccctgaacgatgcggtgccccacggcgtcgatctcgtcgagcgagtcgatggccttcgccgggcccgacgtgagcgattccaggacgagcgccatggcgtcgtcgtggtcggacatcttggcgtcgatgacctcctcgttcttgtcgaggccgtgcttgtggaaggcctccgccgagcccacgcgctcgcagatgcccttcgcgagcagctcgtgctgctccacgttcaccagctggtacttcaaggaagatgatcctgcattgataacgagaacgttcaacgacctgcctccttttgggctcaattcctgaaacaattagtttagggaagcactgcggtcgttgaatggatacggcccgttcattcggcaaacggcgcgccgctcaccgaaaaccagccgaaggggccgggctgcggcgggagcgtgacagggggggggacggggatattgtcacattccgcagcgtatcacgaccaggcaagccgaacgcaatgtgacaacatccccgtccccccccctgtcacgcccgctcgaggcggactgccgccgtgctacttctgcgaggggtctcccgagttcatgggcgcgccgcccagcacgtgcacgtgcaggtgatgcaccgactgctgcgcgtcgtcgttcgtgttcacgatcacgcggtagccgctctcggcgatgcccttgatgtcggctaccttccgcaccgtgttgaacaggtagcccagctcctcgtcgggcacgccgtcgccgatgttgtcgtaatggttcttcggcacgatgagcgtgtgcaccggcatctggggattcacgtcctcgaacgcgagcacccgatcgtcctcgtacaccttcgtcgacgggatctcccccgccactatcttgcagaacaggcagtcttccttgcacatggagccctctccttcccttccgtgcgccgccccgtcggaggcggcgtcagcctatgacagcgtggcgtcgcgcgtggcgtcgtccacctcgccctcaagctcgcccatcagcacctcgaccttctgctgcgcctcgttcaggcggccctgcagcgcgcgcagcagagccacgccgcgctcgtagctgaccaggctgtcctcgagctccagcgagttgctctccagaacccgcacgatgccgtcgagctcgcccatggcctcgcggaacgtcagctcctcgatgggcttgcgatcacctgtctccattatcatcatcctcccatagtatcatctcgatatcctcgcgccgagccgactccacgcggcacgccagcacgccgtccgacaccgtcacctcgagcgccgagccaggcggcgcgtcctcgatgctcctcgccacggcgccctcatgggtacgcgcgatggcgtagccgcgcccgatgacggacaggggcgacaggtcctcgaggcgcgcggccgccagtgccgcctgctggccgaaccggggcacgagcccgggccccagcgacgcgagccgctgccgcgcgtgcccgacctgcacccgatcgcgctccaggttggcgggcagagccggcagcaggcgctcccggcaccgttccagcgcggcctgctcgcgcgccacgccctcgggcagaaggcgcgccaggcgctcgcgctggcggtcgagcgtggcgcggtcgcgctccaggttggcgggaatggcgcggaacagccgctccgaggccaggtcgacgccctgcataggagcggcgagcagcaggttcgggtcccggagcacggggcgctcggcacagcggcgcacctcggcggccgtccgctccacggcgcgccctgcgctcatggacagcgagcgggcatgcgcgcagaacagctccgacaagctctcgcgcgtgggcgtgacggccatggccgcataggtgggcgtggaggcgcgccggtcggccaccatgtcggcgatgaacgtgtccggctcgtgcccgatgccggtgaccacggggatgggacacgccgcgatggcgcgcgccagggcctcatcgttgaagggcatcatgtcctcgtaggacccgccgccgcgcccgaccagcatgacctccacgccggcgcggtacaggcagcgcatgccctccacgatgctggcggcggcctgggcaccctccacctgcacgcccgccacgaacacgcgcgccacggggaagcggttgcgcagcgtgcgcagcatgtcgtgcaccgcgtcgccgcgcggcgaggtgacgatgccgatggtcagcgggaactgcgggatgggcagcttgcgcgccgggtccatgagcccctcggcctccagcttgcgcgcgagcgccgccacctgggcgcgcaggcgcccctcgccggcgagctcgatcgagaacacgtcgaagttcatgcggcccttggccgcgtacagcgtgaacctgccggtcagctctaccagctgccccactgccaggtccacgcccgaggccttgtagcggcccatccacatcatgcagggcagcgcggcgtcggcgtccttcaccgtgaagtacacggccttgtagccgcgcttgctgctcgtctcggacacctcgcccaccaggcgcacgaccacgccctcgagcgcgcccttcgcaagggccatggccgcggagacggagagcgccgtgggcgcgcctccggcatccgacccgtcctcgccgcgcgccggcgcggcagcgcacgaggcggcgggcgcggaggcccctgccgtcgccgcgcgcgcccgttcgagcgcgtcggccagggccgcgcgccctccttctcctcgatcccccatggacgcctcgctattcccggcgctggcccagcagccacagcagctgcaggatggacgtgagggccgccgccacataggtgagcgcgcaggcgcgcagcacgctgaacgcgccgccctgctcggactgcggcagcgcgatggtgtccatgtaggtcatggcgcggcgcgaggcattgaactccaccggcagcgtgaccagctggaacagcaccaccacggcgtacatgacgatggcgagcgtcgtgagctgcccgatgttcatgataatgcccaacatgagcaggaagatccacgcgttcgacgccaggttcaccacgggaaccacagccccgcggatcttcatgggcgcgtagttctcggcgtactggcaggcgtgccccacctcgtggcacgcggtggccgtggccgtgatggagcgcccgtcgaacgcgtcgggcgagagcgtcaccgagttcgtgcgcgggtcgaagaagtcctggcccggcccgccgcggtgcaccgccacgtccgtcacgccgtagtaggcgagcatgcggcgcgcggcctcggcgccggtgagcccgttggaaatgggcaccctcgtgtacttcttaagctgcgagttcacgtaccacgtggcgagcccgccgatggcgagcgtggccacgatcagcagcaggtattcatagctcaatccgaaaaacataggacgtaaccgctccttcgaagaggttgcttccgcgaccgcatggcggccgctttttaccgtacacctgtattatacaagagcgtgaaatcgggctgaaaacgcgcggcaaacagcgcggaatcaccaaaggcgcgttaccgagccgtgatcttcccgcaaccttgcggccgcgggcctttatcaggagcggcctgcccaggtgcccgccgcctttccgggccgcgcgaacccggccggcctcacgcggcgccggggccctcccgccgctccaccttgagcccgccgtccaggctaagcgccagccggccgtccagcagctccagcagctcctcgcccacgatggcgcgccgccagccgcgcagcaggtccacgccctcgcggtagccgcgcgcgacgcgcgccaggtcgtcgtggctggccagcgtggggaacgcgatgccgttctccttggccctcaggcgcacgagcgcactcatgaggtcgagctctgcatccacgttcggctcgctcttgccgcagcggtcgagctcgggccacgtgtccggcggcgccgagagcgccgaggagatgagcgacaccaccgcgcgcgcgtccttcgtggacaggcggtcggacagcccccgcaccatgaacagctcgtcgatcgtgcgcgcctcgcgcttgcacgcctccacgatctgctcgtcggtgaccacccacttccgcggcacgtcgcggcgctgcgcctccagctcgcgccaggccgccacctcgcgcgcggccgagagctgccggcgcgacagctgggacacgcgcttgagccgccggaagcgctcgcgctcgttcgcctcgtagcgcgccgggtcggacagctcctcgaagtcgtggtcgagccagtgcagccgccccttctcctccagcgccgcccgcatgcccgcatacagccgcgggaggtacaccacgtcgtcggccgcgtagtcgcgctgcgaggcagacagcggccggcgcgaccagtcggtgaacgagtcgatcttcttgagcgacacgccgcattcggcatgcacgagcgccgcgtagccgatctgctgcgtgtggcccagcagcgccgccgcgatctgcgtgtcgaatacggggcgcgggagcacgcccacctcgcgcaggatgatctccaggtcctgccccgccgcgtggaagagcttcacgatgcgctcgtcctccaaaagcggcgccatcacggaaaggtcgtccatctcgaaggggtcgacgatcaccacctcgtcgtcggtggccatctgcaaaaggcacagcttggcgtagtacgtcttctcgcgcaagaactccgtgtcgatggcgagcacgctcgacgagcgcgcccgctccacgaatgccgcgaggttttcctgggtagcaatatacatgtacgagattccttgccttgtcatccgcgctccatgttgtactatgccatcatagcaaacagaaagggattgtgtgaaactgctcgtcatcaacaaccttgcctcgggtttcggagaagggtccgtctacgacttcatccgctcgttcgcccgcgacggcgacgaggtgtgcgtgcgctcgaccgacggcaccaccgacgtgcgcgacctcctgggcgacgcggaggcgttcgacgccgtggtggcgagcggcggcgacggcacggtggccaccgtgagctaccgtctggcgaacacgggcgtccccatcctgccgtttcccgcgggcacggcgaacctgctggccgcgaacctggcctcgcccatggagccccacgcgctcgcgaagctcgtgcgcgaggagcgcacgctcgacttcgacctgggcgagatcgaggtggacgggcaacgcttcggcttcggcatcatggcgggggccggctacgacgcggccatcatgcacggcgccgcgccggcgaagcgcctcctgggccccatggcctacttctcggccgccttggcgaaccccttgccgcagacctccaagttcaagctggacctcgacggcgagcacgttgagagcgagggcctgggcatccttttggtgaatttctcgaagatccagttcgacatcacggtcacgcatgagaacgagccgcgcgacggcgtgttcgacgtggtggtgctgaaggcccagaacgccttcgagctcatccccgcgctcctcgccggcctgctcgaccgcggcggcgacttccccgaacgcacgggctcgctcgagatccaccgcgcccgcgaggtgcgcgtggaggccgacccgcccatggaggtgcagtacgacggcgaggccaccaacctcaccacgccgttcaccgcccacatcatgcgccgcgccgcccgcttcttcgtgagcgaggaaggctggagcctcttcgccgagaaatagggcgtgggggggggggggcccgccccccccccccccccgaaacgctatacgttcttcagcaggatggtgctcatggtgtcggccacgtgctcgcaggcgtcgcagcacttctccatgcggtcgaagatctgcgaccacaccagcacgcgcatggggttgtcgttgtcctcggtgtgcagcttgcggatgaccttgaggtacagccggtcggcctcttcctcgtaggtgttcacgtccacgatgagctgcttgaacgtcttcgacttcttgaagttgcggaagtccaccatggccttgtcgagcgcctcgcagctcttcttgataaggcaggcgaactcttcggcatcgtggtgcatgaagtggacgtcgtacatgtagaagcgctgcatgacgtcctcgatgtagtcgatgatgttgtcgaggtactgcgacagctcgatgatgtcctcgcgctcgatgggcgtgatgaagtcggtggccaccgtcttgaagatggcgtggttgacctcgtcgccctcgtgctcgagctcgtgcgcgcgctccatgataccgcgcaggtcctcggcctcggtgaagttctcgatagcctcgataagcagctcggcctccttcacggccatcgcggactgcttttcaaaggcgtcgaagtaatcgaacttgtgcttcttggacattgaactctccttttacgagaagaacaggaacaagtgggcgaatgcgaacccgagcagaccgcatccggggaacgtgagcacccacgtcttcaccatatcgacggcgatgccccatttcacggcgctcttgcgcttggcggcgcccacgcccatgatggccgtggtgttcgtgtgcgtcgtggaaaccggcaagccggcgaacgtggacagcatgaggcagaagaacgtggcggcgctggccgcgaacccttggaacggctccagcttcaccatgtcgaggccgacgctcttgatgatgcgctcgcctcccacagccgtgccgatgcccatgttcagcgcgcagaagaacatgagccaaatgggcaggaccatctggtcggcctggcccacgcccgtggccagcgtgatggccagcacgaagatgctcatgaacttctgcccgtcctgggcgccgtgcatgaacgccacgcccgcgcccgaggccacctgggcccagcggaacaccttcgtcgtgcgcttgcggtccatgttgcggcacacgcggccgacgatcttggaattggcccaacccaggaagaaccccagcagcgtggacagcaggatgccgtacaccaccttcatccactcgccgccgttgatggcgccgaagccgccctgcagcgcgatggccgcacccgtgaggccggcgatgagcgaatgcgactggctcgtgggaatgccgaaccaccaggccgccgcaccccacacgatgatggcgatcatggcggccgtaagcgcgatgagcgcctgttgggagttgccgccgaaatccaccatgttgaagatggtgtgcgcgacggcggacgtgacgagcgagacgagcagcaggcccaggaagttgcagaccgccgccatgaggatggctagcttgggcttcatggcccgcgtcgagacgaccgtggcaatggcgttgggggcgtcggtggcgccgttgacgacgatgacgccgatattgagcagcgtcacggccaccagcaccgggttggaggcgagctcggcaatgaacgtagcccactctatggtcacaggttccctctcgacaaaacagcaaaaaggccagcagctcatcagtttaacgtaaatctaacaaagagctaggggagcaacctgctttttacgtcgacggacgaaccgtttggtaaaattcgcgtaaaggggcctatacgaaaagaaaataccgggcattcggcaaagggccgcgtgcgccgactgctaatatataagcatgccgctatggattggaggcgagggccgcgcagggaggccgatgcctccggcggcacgagggggacatctttgctcgaggggagcaaacgcatgaagaagagcatacagctgccgctgcagacgggcgacctcatcgtgggcttcatggtgtgggtgatcctgtcgtcgctgctgccgtacatcttgcaggacattgccattccgcctgatcgggtggcgctcgtcacggccgtccccgtgatcctgggctcggtgctgcgcgtgccgttgggctacctgacgaaccggctgggtgcacgcacggtgttcctggccagcttcgtctgcctgctcctccccgtgtggctcatcagcgaggccaccacgtacgaggcgctcatcaccggcggggtgttcctgggcataggcggctccgtgttctccgtgggcgtgacgtcgctgccgaaatactacccgcgcgagcgtcacggtttcgtgaacggagtgtacgggttcggcaacatgggcacggcgcttaccacgtggctcgcacccctcgcggcggcggcctgggactggcgtgtggccgtgaagctgtacctggtgctgctcgtggcggccatagcggtgaacctcgtgctgggcgaccgcgccgagccgcgcgtgaggacgcccatcgtggcccagatcaaaaccgtatggcgcgatgggcgcctgtgggccctgtcgctgttctacttcgtgacgttcggggcgttcgtggcgctcaccgtgtacctgccgaacttccttgtgacgcactatgggctggacggcgtgacggcaggcatgctcaccagcgcattcatcgtggcggccgcaaccttgcgcgtcttgggcggctggctggccgaccggtatgactgcttacggcttctggcggtcgtgttcgctgcgctcgcggtgggcgccgcggcgctggcgctggcacctggcctgcccgtgtacctggcgggcatctatctgatcagcgcggcatgcggcatcggcaacggcgcggtgttcaagctggtgcccacgtacttcctgggacaagccggcccggtgaacggcctggtgtccatgtggggaggcctgggcggcttctttcccccgctcgtgctggccgcgagcacggccgtcttcggctcgaacgtgccggggctggccctgttcgcggcgttctgcatcgcatgcctgggtgtggcagcctggatggggaggaaggaacgggcgcaggcgagctaggcgcccacgcggcgccgccttgcggccgccttacgcgtacagcttgaacactcggccgcgctcggcgccgatggtggtgagggcgttgtggccgggaaggacgaccgtatcgtcgggcagctgggccaggcgcttcagggagcggcgcatgtcgtccatgctgccgccgatgaaatcggtgcggccgaccgtaccgcagaacagcgtgtcgcccgacacgagcacgggagcggcggccgggttcccggtgcattccgggtcgaggtacaggcagatgccccccttcgtatggccgggcgtcgcgatgaccttccacgccatgccgcccacctggaccttgtcgccatccttcacggtgaggtcgaccgggcaagtctcgaaaggccggtcgtcccgcggcagctcctcgtcgcccgagatcaccggggcgtcgacggcggaggcgatgacgggtgcgcccgtcttctcgcgcagggcacgcgccgcgcccacatggtcgaaatgccggtgcgtgagcacgatggcgtccaccttgcggccgtcgagcgcctccaggatggcatccgccttgcaggaggggtcgaccaccaaggtggactccccgtccgagatgaggtacacgttgttctcaagcatgccgagcacgaggtactccaccgacacgcatgttccttttgcctggtaagccatggggtgttccttccctatttcttcttcttgccgctctcgccggggagcatgcggcgggcatcgaacacgccctcgatgccgcgcagcttgctcaggatgaggtcgatgtgcttgatgtccgaaacctggaacaaaaagcgcatctcggccatgccgtcgcgatgcgacgtggtggacgacgacagcacgttcgcacccacctcggacagcgtcacggccacgtcgcgcagcaggttcatgcggtcgagcgcctccacgaacacctcgatctggtacgacgtgctcttcgacggctcgttctcccacgacacctcgatgatgcgctcgggttccgtcatgaggtcctgcgcgttcgggcagtctgcgcggtgcaccgacacgccacggccgcgcgtgacgaacccgaggatctcgtcgcccggcaccgggttgcagcaccgggacaggcgcaccagcacgtcgtcgatgcccttcaccaccacgccgttggagctgtgggcctcgtgctttttcgggcgcttcacgctggtgagcatgggcggcagcttgcccgtggacatgtcgcccgcacccaggcccaccgtctcggccgcctcgttgcccttgtccaccagtatcttgagcaggcggttcgccacgtgctgggcgctctccttacccgtgccgatgttcacgagcatgtcgtcgggatcgttgtagcccagatgctccgacaccgacttcaccgcgcgcatggactgcgcgctggagatgcccaggccatgcttgcgcatctcgcgcgtgagcttgtcgcggccgttctgcagatcgtcgccgcggctcaccttgctgaagtacgagcgtatcttgctgcgtgcgctcggcgtcttcaccaggttcagccagtcgcgcgaagggctcgcgctcttctgcgtgaggatctccacgcggtcgcccagctgcagctcgtaggtgagcggcacgatggcgccgttcaccttcgcgcccacgcagtggttgcccacctcggtgtggatggcgtaggcgaaatcaaccggcgttgagccggcgcgcaggctcatggcctcgcccttcggcgtgaacacgaacacctcggacggcgccagatccactttcaggtctttcaggaactcgcgcgagtcctgcgtctcgtcctgccagtcgaccatctggcggagccacgccagctgctggtcgatggcatcgccgctcttgccgcccttctccttgtagcgccagtgcgcggccacgccgtactcgctctggcggtgcatgtcctcggtgcggatctgcacctcgagcgggcgtcccgccgggccgatgaccgtagtgtgcaggctctggtacatgttgtacttcggcatggcgatgtagtctttgaaacggccgggcatcgggtgccacagcgtatggaccgcgccgagggccgagtagcagtccttcaccgacggcacgatgatgcgcacggcaatgaggtcgtagatctcggagaagcccttgcccttctgcgtcatcttctggtagatggagtagaggtgcttcgggcggcccatgatctgggcctggatgcccaccttctccatctcgtcgtgcaggatgccgatgatctggtccaggtagccctcgcgctcggcgcggctctccgtgaccatgcggctgacctgcttgtacttgttcggctccaggtagtagaacgacaggtcctcaagctcccacttgatgttgttgatgcccagccggtgcgcgatgggcgcgtagatctccagcgtctcgcgcgccttgaagatgcggcggtcctcgcgcagggcgcccagggtgcgcatgttgtgcaggcggtcggccagcttgatgacgatgacgcggatgtccttgctcatggccacgaacatcttgcggatggtggcggcctgctcgtcggacaggctctccacctcgatgcgcgtgatcttcgtcacgccctccaccagctgggccacctgctcgttgaactcgacggccacctgctcggtggtgacgcacgtgtcctcgacggtgtcgtgcaagagcgccgcgcagagcgtttccacgtccatgcgcaggtccgccaggatgatggccacctccacggggtgcgccacgaacggctcgccgctcttgcggcactggccctcgtgcgcctcgctggcgaactggaacgccttggcgagcagcgcctgatcgggctcggagaggtaggcggacgtgagccgctggagctcggcgaagcgctcctcgggcgtctccgtgcggtgcgggttgcgcgcgtcggcgcgcccttcggaggcgaacgccttctgggccacgtgggggcggcccaagaggtcgtcctcgaccgtctgcttatgcgacgcctgttcgagcggctcccccagcagctcttcgcgcttgtgatcggctttgcccataacggtgcgcctcctttcctcgtcctagcgcgttccacgcggcgcggagcccggcaggatggggcgcgagacacgcacgtgcaggctggctgcgtcggtgcccatcgcccagtcgcggaacgcgctgaatatagcgcgctcgcccaagccctcgcggtagcgcacgctgtcggtgagctccaccttgctggcggtgtccaccacacggatggagcgggtgatctcgcccgacgcgtaggccgtgtgcgtttcgatgagccccagctcgcggaacacggccacgccgcatgccgccgactgggagctcacggcgtgcccgccctcgctggcgagcttggccaaatccacgttgcccagcgtgaagaacccgtcgccgtgatcgcgctgcagcgcgcgcaggcggcggtacacctgggccaggcagtcgtggtcgggcgtcatgtcgcgcagcacctgctcgttcacgcacgcatcgccgcgaccgaacagcaggtgcacctgcgcggcggcgccgtcgcggccggcacggccgctcatctggttgaactccacctcgttgtacggcaggtggtacagcaccacgtgccgaatgtttggtatgttcacgccctcgccgaaggcggacgtggccacgagcaccttgagcgcatcggtgcggaacagctgctccacccgtgcgcgctcggcacgcgtgaggcccgcgttgtagaagccgatgagcggcgccatctgcggcacgcgcttgcgcagagtgcgcgccacggccaccgactgctcgcgcgagttcacgtacacgaccgtcttctcgccgccggccacgaggttcgccaggtagtcgtcgcggttcttcaggttgcgccggtcgtccacgcccaggttcgcgcgttccgtctcgtcgagcacgagctcgtcgagcggcagggcgcctcggatggcgtcggctatgccgtcgtcggccgtggcggtgagcgcgagcaccgtgggcgcggggcggcccgccgtgcggacgccggcggccagctgctccacggcctgcccgatggcggcataggcggggcgctgtcccgcgcgggccaggccgatgtggtgcgcctcgtccaccaccacgaagcccacgcggcccgggcgcgcgaactccccggcgtggtagcccaggaactcgggcgtggtgagcacgatgtccaccgagccgtccgcaagccccgcgaacgtctggcggcgctcctcgggcgtgctctcgcccgtgagcaccgccacggcgatgccgaagggctccagcgcctcgttcaggtggaacgcctggtcggcgatcagcgcgcgcagcgggtacacgaacaggctggccgtgccctcgcgcagggcgcgctcggccgcatgcacctggaacaggagcgacttgccgcgccccgtggccatgacggccagcaccgagcggcccgcgtccaggcagtcgagcacggtgcgctgcgacgcatggagcgagccgtccccgatgatggcccgcacgatgtcggcctcgaggcccgccgggtcctcgtgcgcacggcgctcccactcggcgcgccgcgcggcgcgggccgcctcgtaggcctcgatgtcctcggggttgtgggccacgtcggcgcagagctccgcatcgctcgtggcgtacaggtcggccacgaacgagcgctccaccgggtcgaggcacgcctcgagcgcgcagcatgtgcgcgcgggggcgagcgactgcagcatggccttcaccgagcggcggccgcgccattcgtctatctgcacctcgaacgcggcgttgaccacgctgtcggtgtgcatgagcgcctcgatgtccgtgcagtggaacatgatgccggccaccgtgttgcgtccgtcggaaagcgcgcacgagaagtggttcttctccgcgcccaccgcgcggcagttcgcgagggtgacgtcgcgcgcgaggaagcacggcacggggttctcctggccgaagggggcgagcgtgtccagcttctccacgttctccagcgtgagctcgccgagcgcgacgcaggcgtcgatctcgatgagcgggtggaacgcgccctcgggcagctcgtccatgtaggcgcacaggcggcgctcgaactccggcaggttggccgtgggcagggtgacgcccacggcggcctcatgcccgccaaaacgcgtgaccaggtcggatgcggcctccacggccttgaacaggttcacctggcccacgctgcggcccgagccgcgcgcctcgtcgccggttatggtgaacagcaggctgggcacgccgtaggtgttcaccaggcggctggccacgatgcccttcacgccctcgtgccagccgtcccccgacaccacgagcgcgcgctggccacggtagacgtcggcagcctgggccttcgctatctcggagagctcggcctcgatggtgcggcgctggtcgttcacggcctcgagctcggccgccagacggcaggcggcgtcgaagtcgtcggtcatgagcaggtcgagcgccagctgcgcgtcgcccatgcgtccggcggcgttgaggcgcggaatgagcgagaagctgaggttcgtggcggagacgggcttgtcggccgcgccgctcgagcccagcagcgccgcgatgcaggggcgcggggcgctgttcatgcggcggatgccgtcggacacgagcgcgcggttctcgccgcgcatgggcatgaggtcggccaccgtgccgagcgtggccaggtcggtgtagcttcgccacaggtgtgggtagccgaagcggccgcccagcacctgcacgagcttcaaggccacgcccacgccggccaggatggcgctctcgcagttctcgtcgcacttcgggtcggccacgggcacgtcctcgggcacgaggtcgaccggctcgtggtggtcggtgacggccaggcccacgccggcggccacgatggcggccgcctccgccttgcaggcgatgccgcagtccaccgtgacgatgaagtcggggttgagcgtgcgggcgcgcgcgaaggcggcctcggtcaggccgtagccctcctcgaagcgccgcgggatgaacgggtcggcgtgggcgccgagcgcacgcaggccgcgcgtgagcacggacgtggccgagatgccgtcgaggtcgaagtcgccgaacacgaggatgcggccgtcggcgcgcatgacctgctccaacgcgtccgccacctcggacaggccgggtatggtgtagggatcgagccagtcgcggtcgagcgagggctccaggaaggcgcggacctcggaaggctcggagatgccgcgcgcgacgagcgtcgcggccacgaaacgcggaagccccagcccgcgctcgatgcgcgagacggcggcggggtcggccgctttgatgttgaactgggcagacatggcgctcatacctcacatgcgaagagtaatatttcacgccccattgtcccacaatcggcgcgagctgtcaccgcagggaacgaagcgtgcacgagaagaaaacggagggcgttcgagagggcgccctcggccgacgggcgacggttgttctcgccgagggtgccccgctgccgccgggcggtcgcgaccgcatctgcacgatcggcgtctgcccgcggagggtgcgccgacacgattttccccaccgcgaacaatcgcggcgcttcgttcgtgttatggtcgaggaggtgaaacccatgcccgaacatatcccctgcagccacgactcggcggacgccgacggcctgcgccccgatgcgttcctcgaggatgccatgcaccgctggggcgacacggtgctgcggctggcgctgagccagctgcgcgacgcctccgatgccgaggacgtgttccaagacgtgttcgtccgcctgctcaaggaccgcacggcgttcaacgacgacgagcacctgaaggcgtggctgctgcgcgtgaccatcaaccgttgccgcgacatcgggcgctcgggatggaaacgccgcaacgagccgcttgcagaacgccatgcggccctggccgtcgaggctcccgacctgctggaatccgacatctggaacgccatcggcgccctcccgcccgacctgcgcgccgtggtgcacctgcactacgtggagggctattccaccgacgaggcggccgccctcgtgggatgccgcccctccacggcgcgcacgcgccttcaccgcgcccgcaagcacctgaaggccgccctcgagaccgcggacctcgcaggccgccctgcgccctgccaacctgcaggcgcatcgctcgcggacgacggctccgctttttcgcgccccgcccgcagcacgttcgcaagcacccggcccgcgcgccccgcaaccaccgattccccgtcttccggaaaggaggccgaccatgagccaggaccccttcaacgattatgctgcgaagatgcaggaggtgagaacctccgaccgcctgcgtgacgaagtgctgaagaaggcggcggccgaacgacgggccgcaggcgcaaccgggaaggtgcccgcaggcagcggcgcagcttgcaacgaggcgcggccgtgcgcgggcccgggcgcatcttcgcacagcggatccgcccgcaagcccagcgctcgtccgcgcgccaaacggcccgcgatccgcaggctcgccctggccgcctgcctggccgcactcgcggcggtcgtgggcatctcgctcgcgtggccgcagggaagcggttccctgcctgcggggatatcccccaccgcgttcgccgtgaaggcctacggcgcggttgacgacaccctgttccccaccggctcgaacggcaccatcgtctttaactgcgagacggagacgcagcgcatgatcccgcccgaaggcgacgagtacgccaacgagggcttctacaccggctgcgtgttcagcgtggagggcgacaacatcgcccgcgtccaggcgaacgtgtcgcgcggcgagctgtaccgggtgacgagcaaggtatggtcgcgcgagaacgacccggagtttgtaaaggaagtcaacagttggaaaccctataagatcgggcagggagagctgctgggaaagtacgactacgtggccggcgttctgtattacggcaccatcgaacccggcgacgaaaacgtggggaaagaccgcaatgaccccagcagaacgggcaagtccaacctttaccagcggctcgggtccacggtcgacacctccgccatggacgcgcccgaagcgagcgcaagcgagtaccgcttcgggctgtggacgaacgagccgttcgatgccgttgagaacgatcgcggggagcttgacgggctggccagcatgaacgccgccctcgacacgctcgacggcgcacagctcaccatcaccgtcacgttcacggacggccgcacggccacgcaggtggtagacctgcacgccgccgatttcaaagccaacatcatcgagaccgccgacggggtgaaccacgtgctggagctggtgccccagatcaccaccgaggcgaagaagaccacggacgagttctgggaggcctacaaccagggcatcgcctccatccacacgctgtacggcacggtcgcgagcgagacggacgagccgttcccctgcggcgaggcgtcgtaccccttcctcaccgaaccgctcacgcagccgcgagagctcgaactgccgcccgagacctcgcccgatggcgatgcatccaacagcaagtccaacgtgccgccgggcccgaccatcgagaagggcaacgtcgccgacctcgcgtccatgcagccgtaccacgaggcagacaccacgaccacgttcgagcgcgtcgaacgcctggacgggttgcccgagggcgtggcggtggaggacctcatcctgtactacgaaggcagcggcggccggcgcgacgaggagaccggcagcatcgatgtgcgtgggaagttctccatcgcggccgacggaacgctgtcgcccggcttctcgtacgtgctgatcacaaagacggtgacgaacaactccagcgagcaggccgacgtgttcctgacccaagggttcttcgtcacgctccagccggacggcggcaatcggtacacttccgggagagacatgctctccgaggcgatctggcgcagcggccacgatggacccgcctgggaatcgcactactacttccagatgatggaacctggcgagacgcgcgaggtatcggtgctgtatgtgatcagcgatgagatgctggccaaccccggattctcgttcgtgtactacggccacgaagacatgcccggcgtgctggccttccgcatcggagcactcggataggcaccggccgttctcaatggggaggggcctcgcccctccccttctcgcgaacgccgctccccgttatggggtgcggcgttctttttagtgcggcttttcctttctctgaaacattccctccttcttgatcgtatgcttcttcaaggaggtgaaaccatgccgaaccatgaacgagcggaagacggggcgttgcgagagcccgcggcgctgcggcaaagcggggcgaacccgcatcccgaggcgttcctcaggcaggccatggccgattggggcgatgcggtataccggctggcgctcggccagaccagatcgcgcgccgacgcggaggacgtgtaccaagacgtgttcctgcggctgctggacagcggcacggctttcgagagccctgagcatctgaaggcatggctgctgcgcgtgaccgtgaaccggtgccgcgacctggcacggtcgggctggaagcgccgcacagtcgcgctcgaccccgaatgggacgcgcccgactcccccgcgcgcgacgacgaggacgccgccgtctgggacgccgtgggccagctgcccgagcagcagcgcacggccgtgcacctgcactacgtggagggctactcgaccgaggagatagcgagcgcactggattgccggcccgcgacggcacgcacctggctgttccgcgcccgggcgcgcatcagggagctgatggaggccgacgctgccgaaggcgcgcccgcaacgctcccgaacagcggaaacgcgtccgcgaccagcggcacgcccaccctgccgcggccgcccaacgccgcagcgctgaccgccgaatagcccccccccccgactgaccactccatcctccccttgaaaggaggcaccctatgagtaccgaccccttggaccgctaccagtccatgatgcacgacacccatgtgcctgcccacctgcccgaccaggtgctcgaacaggcccgcgcccggctggctgccgataaggtcgaatcagccgcagcggcaagctgcagcgcccgtgcggccaacgcaacccgcacgccgcagccgagcgctcccactccgacacgcgaggcgcctgcaactcccgtgttctccgtgaagcgcagccgcatgaagggcttcgccctagccgcctgcaccgtgctagccctgggcctgggcggcacggccatcgcgctgggactgcccggcctggttgggaacgacgacgtcccggcagtcgccaactcgttccagctggccgccttcgccgacgagggcgggacgccggcgaacgggccggttacgttgagctcccaggatttcatgctcatgcgcgcgtcgaccggacccctcttcgatgccgaaactggttcgtatccgggccctatcgtggcatcgcgcgcctacaacctgaacctcacctgctcgggcgagaacatcgcctccattacctacgagcttcagggcgaaggggtctccttcaacaactggcagctgacgagcgagtaccttgaatcgaacggcgaacccgaggtgggaagcgccgtggcaaccgcagaccaagacagtacgttcaccgtcgattaccacgaccaggacatgagcgccatcgatcgcgtacaccatgaaatctgcctgagctacgtgctcgagggcagcgacaggcaggcgtgggacgagctccaagccagcaccgcccagcctcgggttccgcgcgacaacatgaccgaagaggaaatcgccgcatggaacgaggcgtctgacaaattcgagcttgtactcggccagcatgatgccgagataatctcgcaggccaagatcgccatcaccgccacgttcaacgacggaacaaccgcaaccaaaacctaccggcttgtccccgtggacgacttcgaacaggcgtactccgcgtaccttgcagaccgcttctccaccgatggtgctgccgagccgaaccgtcccgtcctctacacgctcgaggaagtgaccggttagacggcgcgtccaaccgggccgcgtttgcggaatgcggccgtgcgtcctatgatgtcgggagcccgaacggtgttcgggctcccgttctcttgtccaaggagccgacccatgagaatagccggattgcagaagctgacattgttggacttccccgagcacactgcggccaccgttttcctcccgggatgcaacttccgctgccccttctgccacaacgccgcgctcgtgctgggcgcgggcgatgcaaccggcgatacgccggtcgaggagttcttcgcgttcctagacaagcggcacggcctgctcgacggcgtgtgcatcaccggcggcgagccgctgctccagcccgagctggccgatttctgcgcccgcatcaaaggcgcgggcttcgcggtgaagctggacacgaacggcagctttcccgaccggctgcgcgagctcgtcgaaagcgggctcgtggactatgtggcgctggacgtgaagaacgcgcccgagcgctacgcggaaaccgtcggcgtacccggcttcgacccggcgcccgtcgccgcatcggtcgattacctgctcgccgacgcggtgccctacgagttccgcaccaccgtcacgcgcgagctgcacggggcggccgaccttgtggcgctctcccgctggatcgccggcgcccatgcctggcacctgcagagcttcgtcgacgccgacaccgtacttgccggccccggcgccctgcacgcctggaaccccgacgacctcgaggccctccttcccgaactgcgcaaagccatccccaacacccagctgcgcggcgtgtagaagagcgcacgcgacgaatttttgcctttcttcggaacaatcgggacgcctctcccgtattgtctgcagagaggtgaatgcatgcacattccgtttaagcgcaaaacgggccgtaccgatgcggccgacaacccttgcccgcttcgttcggacgcgttcctgaaacgcgccatggatgcgtggggcgacacggtgtatcgagtggcgctcgcgcagacgggttcgccgagcgacgccgacgacgtgtaccaagacgtgttcatgcgcctgctggagcacacggccgccttcgagagcgacgaacacctgaaggcgtggctgctgcgcgtcaccatcaaccgctgccacgatatcgcgcggctgagctggaaccgccgcaccggcgggttggagcaggagctcatcgacattcccgcgcccgatgccttccgggcggatatctgggaagttgtcggcgcgttgccgcccgacctgcgcaccaccgttcacctgcactacgcagaaggctattcgaccgaggagatcgcccgcattgcaggctgcaagccgagcaccgtccgcacccgcctccaccgggcgcgcgagcgccttcggacaacgttgctggacgagcagcttgagcaagctggcagcaccgtgtcgagaaaggagccggaccatggccgaacagcataaccgtcctcaacctcccaccctcgacgactaccaagccatgatgagcgatttgcgtgctcccgagcagttgagagaagccgtcctcaaggaagcccgcgcgcgtcgtggcggtgcgagcaccgcagcaacgggaaagggccccagccgcccgtctgtgtttttcaggcatcatcggaccaggatcctcgtcatagccgcctgcgctgccttgctgctcggtgcgggcacgaccgcgctcgccctcaactcgccgggcgggttcggcatcgtcaacgacctcatggcagagcccccgtcgccggacgagaacgctgcaaaagaacccgtagcgaaagagaactcattggagctcgatacgagccaattcaaaggcggcggaggctacagcgggccgtggtacaaccctgccgacgactcgttctggagctacgaatgggccgggtacaagtatcatttcaacatacgctgcaccggaaacaacatcgagaccataacctacgagatcgagggagaacgcagctatttcgagatcatcgacacaaccgtcacgcaggagcagcgagcggagggcgtccatgtataccattatcctaagaccgccacgttcgacttcagccaccaagaatcgatcgacaacacgcgcatcgttgaaatatatgttgggttccccctttcggaatcgggcctcgaagcgtatcgccgcctgatggccgagggtcactcatacgaggcttccgcacaactggatgccgccgtcgaagaaggggccgcacgcgagctgacaggctcggtactcagcgcgacggccacgttcgccgacggctcgacccaaaccaagtcgtatctcatagaagcccccgacctgggcaacccgaccagctttaccttcaccgaaataaccggcaactagacagccgaagcgaaggcgccgggcgcaggagcaggccgttcataccgtctcccgcaccctactcgaggaacaacgcgcttgtgggctcgagggcacgcgctagctcctcctcggtggggaggcacagcgtgtagcgcgacgcgaacaggcctttgtcatcggcgagggccgagtagcgtgccacggttgcgtccttcgtcgcgcagaggatgatgccgatagtggggttgtcgtccggttgcgtgcagcggtcgtcgtacaggcgcacgtagaagtccatctgaccgacatcctgcggcgtgatcttgcccgtcttgaggtctatgaggacgtagcatttcaggatgcagtggtagaacacgaggtcgacgtagtagctctccgtctccgcggcgatgcgctgctggcgcgcgacgaatgcgaagcccctgccgagctctaggaggaactcctgcagccggtccatgagcgcctgctccaaatcgtcctcgcggtagtcggtgcggccgcccatgtcgaggaaatcgagcacgtaggggtccttgagcaggccgtcagccttggtgggcggctcgagcactttgacctcctgccggacggactcgcgcccctcctcgcgcgtcgccaagaggcgttcgtaatagaaggagtggatctcgcgatcgagctggcgcaccgtccagcgctgatcgaccgcttcgcgcatgtagaacaggcgcttcctctcgtcctccacgcgcatgagcaggcggtagtgagaccagctcaattgtgaacacagtgtgttcacaattggaaacgccaagtaaaactgccgcatgtagtgaaggttccgcttggtgtacgcccgtccgaactccttcgtcagacgttcggacaggtactccatgagatgcttgccgtactcggcacggtcgccctgcgcctccacgatctgacggccgatctcccagtacgcctccaccatagcatcgttcacggcaaccgcggccttcttccgcgccgcctcgagcgtgccgcgcaccgagtcgtacactgccgcgtctttcctcgccatcggatcgtccatgcctcgctcctctcgtccccttccggcgcgccgccgcgcatgcgcgcgcaagcgcggcggcgcgaagggcattccgttggcttcgaggatcttgcaagcgtggtacgggcggcgcggaacccaccgccatctatgggcatcccgacgacgagcggattcgggatgcgcttgcactggctcgtttctgaagctattctaccacataaaaggaacgtttgtacgttaattttgttcatttagaattcagccctcgctgagtgccgaattcggtacacaacatgcaaagaaccctctcctcgagtttgagaattgtgcgcacgctgtgcgcacaattcggaactcagcgtgttccgaattcgctacacacggtgtagcgaacttctccctccatcaaaaagggccggatcgcatcgacccggccctcaacctgcttgcttgctcggcgccttacgccaccacttgggcgcgcatcgcgttgaccttctggaacaccgccgccgcgccggccgtcacctccacggtaccgtccgcacccacctcgagcagcgtcggcgcctgcatgatgcgatagcgctgcgccagctccacgttctcctcggccaacagctcctcgtaggcgatgccggcggcatccatctcggccgccgcgaacttgcagttcgggcacgtgcgcgttgctaccaggtacaaaccagcaggcagcgcactgtgctcgggcgcggtcgccggctcttcgatgcccgaaaccgtcacgtgcgagccggcctggccggcggtctcggctgccgccgtcacggccacggcgccttcgcgcgtcagatgcgaatgccccaggtcgtactccacgcggtcggcgaactcctgagacttgccgtcgttccagttcttcaccgggcgatagtagccggtgatgcgcgagtacacctcggtctcctcgtggcagcacgggcactcgtacacctcgccggcgatgtagccgtggttcttgcacacggagtacgtgggcgacatggtgtaatacggcagcttgtagttctcggcgatcttgcgcacgagcgtggcggccgccttccagtcgggcagcttctcgcccaagaacgcatggaacacggtgccggacgtgtagagcgtctgcagctcgtcctgcacgtcgagcgcgctgaagatgtcgtcggtgaagcccaccggcaaatgcgaggagttcgtgtagtacggcttgccctggtcgttggccgagatgatgtccgggaactgctccttgtcgtgcttggcgaagcggtacgtggtgctctcggccggcgtggcctcgaggttgtacaggtcgccgtactcctcctggtagtcggccaggcgggcgcgcatgtggttgagcacgtccttcgtgaacgcctgcgccgcctcctgcgtcatatcggcgcgcagccagctggcgttcaggcacgcctcgttcatgcccacgagaccgatcgtggagaagtggttctcgaacgtgcccaggtagcgcttcgtgtacgggtagaggcccgcgtcgagcagcttcgtgatgacctcgcgcttcgtgtggagcgagcgcgcggacacgtccatgaggtggtcgaggcgtcggtagaagtcggcctcgtccaccgcctggtaggcgatgcgcggcatgttgatggtcacgacgccgatggagcccgtggactcgccgcttccgaagaacccgcccgacttcttgcgcagctcgcgcaggtcgaggcgcaggcggcagcacatggagcgcacgtcggagggctccatgtcggagttgatgtagttggagaagtagggggtaccgtacttgctggtcatctcgaacagcaagcggttgttctccgtctcgctccagtcgaagtcgcgcgtgatggaataggtggggatggggtactggaagccgcggccgttcgcatcgccctcgatcatgatctcgataaacgccttgttcaccatgtccatctcggcctggcagtcgccgtaggtgaagccctgctcgcgtccgcccacgatggccggctggtcgcgcaggtcggccgggcacacccagtcgagcgtgatgttgctgaacggcgcctgcgtgccccagcgcgacggcgtgttcacgccgaacacgaacgactcgacgcactgcttcgtctcctcgtaggacaggccgtccgccttcacgaacggcgcgaggtaggtgtcgaaactgctgaacgcctgcgcgccggcccactcgttctgcatgatgccgaggaagttcaccatctggttgcagaggctcgacaggtggctcgccggcttcgacgtgatcttgccgggcacgccgccgagcccctcctggatgagctgcttgagcgaccagcccgcgcagtagcccgtgagcatggacagatcgtgcaggtggatgtcggcgtcgcggtgcgccttcgccacctcgtcgtcgtagatctcggagagccagtagttcgccgtgatggcgccggagttcgacaggatgaggccgcccacggagtacgtgaccgtggagttctccttcacgcgccagtcctccactttgacgtactggtccacaaggtccttgtagtccagcagcgtcgcgttagcgttgcgcaccttctcgcgctgcttgcggtacaggatgtaggacttcgccacatcggcgtagccggctgtggagagcacctcctccacgctgtcctgcacgtcctctacgctgacgatgccgtccctgatcttcggttcgaaatgggcggtcacgttgagggccaggaggtcgatggtcgacggatggtactgcttgcccaaggcgtcgaacgccttggcgatggcgcttgaaatcttggcgatgtcgaattccgcgatcttgccgtcgcgcttctgaacctcgtacatggtcgctcctttttcgcttgcttccgcgttgcttctacgattggtcgaccgcgtgcagcatggcgccggcaggcgcagatggggtttgcgatcggtcgggaatcggtagcccacaccctaccagcgtcgcgcctcctcgtcaacttctgtcacccatatgttgaagttccaaagaggtgaaccaactagatatggtatgttttgccatctggggttttatacgagcatcccggtaagctctatgaaaggcgacctgcggcaacagaacaaacctccctccgcaccccgtgagcaaggtgcggaaaaggccacctgcggctatctgtttctcgtggaattcggcgggcggaagccggcagaatggcgcggaagcaggcgcatctcaaccggcgaatgcgcggcgcacatcgtcctgcagacgttcttcttcgcggacgtcgtcgacgcgctcgtgctgttcttccgcggtcgcgcgctcgaacggcgtcccggcgccttcgccatcccccacaacgtccccgccgtccccgctccgtgccagcgaaaggacccgccatgacccatcaccccctgagccgagctgcgaggcgtggaatgacgcggacgccgaagaagcggctctacttgcgcgcctccacgagacacgccgagccttcgacgcgccgccacgccacggaggagaaccaccgcccgaggatgcgctcgtactcgcccttcgagtagatgtgcacgtcgccctcggacgagaagcgcagcgatgcgttcatgacggcccgcaccggcgcgggcagggtgcagtcgcccaccacgagcaggcccccggggcgcatcacccgccagatctcgaacaccgccttcccgggatccgggtagtggtggaatgagtcgttgcagtacgctgcgtcgaacgactcctcgtggaacggcagccgctcgctgtcggcttccgcgatgcgcgcgcgatcgccgaaagcggccaagctcgcgcgagcatgcgccaccatgccgggcgcgaggtcgacaccggtcacccggcgcttcggcccctgctccagcacgagccgcgcgagcgcgcccgtgccgcaccccacgtcgagcagctcgccttcccgcacgccatcgagcgccgcgagcacatgcgggtagagccggcgcgcatgggctcccttttcggtgcggtcgtagtctgccgcctgcgcgtcgaaggccttccgcgacttctctttgagctggtccatggcgccccatcctttcattgaacaaaattcaatcccagtgtcgaaagaagcccggctctgcaccgggcttgatcgggttgcgtcgcacgggcgacggccccgatgttcacctgaaacattcgtacggttttcaggcttccgggcgctccgtctgcgagtcgatcagcacgtgcgcgtactcccgcaggcgggcgaccgtctgcgcgtccgcgtccccgtgcgcggagaggatgccgatgtggccgtgcagaaggaagctcgccagcgtctcggggtcgcgcacgatgaggccctcgctgcggcgcgcctgctcgagagccgccgccatgtgcggttgcacgtgctcgcacagccgcagggacagctggcgatggaagccctcgttgccctgccggtggaagaaatcgctgtggcgttggagccgctcgtcgccgatgtcgtcgtagagcgcgtccaccttctcgcggaatcccaggtcggtggagcgcaagaggttcacgagcccttcggtgcactcctccacgtaccgctccatggcctcgtcgagcagcttccgcttcgagtcgaagtagtggtacacgagccccggcgcagtgcccatgcgccgggcgatgtcccgcatggacacgccctcgagccccttctccgcgaacaggtccatggccgtgtcgagaatctcgcgcctgcggtcgtccggtgccttcacgatgcgcaccatacgcgcccctcctttcgctcgcctccccgccatcgtaccgctttattgaacaagcgtcaatgaatattgttcagtcatcaagtccgttgcagatttcgcgtggcctttcgcgaggccaaggttgcgaggcgttgacgaactggcctcgtcgcgcgatactcggcaactaccgaagagaacaggagcgcatcatggccaactgcctcgtcgcgcaatccggcgggcccaccgccgtcatcaactccagcctggccggtgtcgtgcgcgccaaccagctgaaccccctgtacgaccgcgtgttcggcggcctctacggcatcgagggcacgctggacgggaagctctacgacctcaccgacctcaccggccgcgacatcgagctcttgcagcagacgccgtcgtcggcgctcggcacgtgccgctacaagctcaagcgcggcaacgacgccgactaccatcgccttgttgaggtcatggacgcgcacgacatcacgacgatgttctacatcggcggcaacgactccatggacaccgtggacgcgctggccgaatgggcgcacgacaacgcgccgggcaagcggttcatcggcatccccaagacggtggacaacgacctcgtgccggtggaccactgccccggctttccgagcgcggcgaaggtggcctgcgagatcacgcacgccacgcggctggattacgacgcgtacacgcgccccgaggtgttcgtgctcgaggtgatgggccgcgacgcgggctggctcgccgcgagctgctgcgtcaccggcgacgtggatttgctcgtgctgccggaggtggacttcgaccgcgaggcgttcctggcagaggtgcgccgaaagttcgacgagacgggcaagtgctacatcgtcacgtccgagggcgctcactacgcggacggtgcgtacctctccgccggcaacgcggccgacgacgggttcgcgcacgccgtgctgggcggtgccgcagccaccatcaagcagatgatcgtggacgcgggcatcgtgccgcgcggcatcgtgcaggacctctcgcgcgcggcgcgctccagcaacttcgcgcagagcatcgtcgaccgcaccgaggcatgggagctggggctgagcgcccacatgcgcagcgccgaccctgcgttcaccggccaggtggtgggcgtgcgccgcgacgaggcggcggctgcggaggggctctacaacgcgaagttcttcgcggcgccggcctccgagttcgccaacttcgtgcggcgcttccccgccgagtggatcctgccggactaccagggcatcgcgccggaggcgctggactacttccgcccgctcatcaagggcgagccgcgcgtggtgatggacggcggcatccccgccaccatcgtgccgttcaaccggcgctaggcggcggccggcgcaacggaggagccggggcctcggagatcggacgctcaactttcacgtgaagctgcggggcctgcgcgagcgggccccgtcgcgcgcctatacttgttcgcgctctcgccgattgcgaaggaggggcgtgatgagcctgatggaacgaggaaccatgcggaagaaggcggccgccgcggcgctcgccttgatgatgctctgctgcgccgccgggtgctccgcgcctgcggcgaccgacgcgccggagtcgccggagagcgagttcggcggcgtgcgcgacgagcgcgagtcgcagcccgccgagcctgcgcccacgcccacgcccgcgccgtccgcgcccaagcccgcggccgtccccacgctcgacgagcgcaccgccgagaatgcggcttccctcacgctcgagcagaaggtcgcgcagctgttcgtggtcacgcccgaggccatcaccggggtggacaccgccacgcaggccggatctgccacgcagcaggcgctcgccgcctaccctgtgggcggcctcgtgtacttccagaagaacctgctctcagccgaccagacgcgcgaaatgatcgcgaactcccaggccttcgcgcagggcgcgtgcgggctgccgctgttcgtcggcgtggacgaggagggcggcaccgtgagccgcatcggcggcaaccccggcttcgacatccccaacgaggggaacatggccgacgtgggcgcggcgggcgacacggcgcaggccaaggccgttgccgcgcgcatcggcggctacctgagcgacctcggcttcaacctcgacttcgcgcccgactccgacgtctgcggcgacccctccacggacgtcatggcgctgcgctcgttcgggaccgaccccgcgatcgttggcagcatggtgtccgcgcaggtggagggctttgcggaggcgggcgtgctctgcagcgccaagcacttccccggcatcggcggcgtgatgggagacagccacgagggcgccatcgtcagcgagaagacgctcgacgagctgcgcgattgggagctcgcgcccttcaaggccgccatcgacgccggcgtgccgatggtcatggtgggccacctcaccgccccgaacgcgttcggcagcgacgtgcccgcctcgctcaaccccgcggccgtcaccgacctcctgcgcggggagctgggctttcaaggcctcgtcatcgccgactcgctctccatgggcgcggtcggcgacttctgcacccccaaccaggcgggcgtcgcggcgctcgaggccggcgcggacctcgtgctcatgccggaggacttcgccgccgcctaccagggcgtgctcgacgccgtgagcgagggctccctctccgaggaacgcatcgaccagtcggttttgcgcatcgtgaaggccaagctcgcgctggccggcgagtgaggcaagggaagcgtgcggtgattctctcgttctcgcacgctccgggggtcgcagcctgctgggaaatgagacaataaccccgtcccttcgtttcacccacctgaaaggaagcaccatgatcgtcaccaccacccccgccgtcgacggctaccgcgtgagcggctactacggcatcgtgttcggcgaagtcatcaccggcgtcaacttcctgcgcgacttcggcgcgggcatccgcaacatcgtgggcggtcgcagcgagggctacgagcaggagctcacgcaggcgcgctccgaggcgctcgccgagctggagcagcgcgccgccgccctgggcgcgcacgccgtggtgggcgtggacatcgactacgaggtgctcggccagggcaacatgctcatggtgacggcgtccggtaccgccgtcacgctcgagcaggcctaggcgcccgcttcgggagcctccaaggcagacgcgggggcgggagctccgcttgccgcccccgcctccgccggcaagccgcgcttgagcacgcgcctcgtgagcgccgcgatgacgagcgcggccgcgaccgtgcccagcgccaccggcaccaggttgccccgaagcgcgtcgaacagccccccgtacaccagctgccccaccggctgcgcgcagttcgccaaggacatggccagcgcgatcaccttccccaccaggtgcgcgggcgtttccagctggatgaacgagatgccctggatgctgaacatggtagcgcaggccatgcagacgaacaggcttgccaccagcaccccgtaggcgacgagcgggtccaacggagcgcccagcaccacggcgatgggcaggagcgcaacggccgccacgaacaggaacacgggcgcttggcgcaaggtcaggcgcttcgccagcacgccaaccaggatgccgccggtcaggccgccaagcgcgagcgcgccttccgcgaagcccatgaactggttcggcagcccgagtatctgcgtcacggtgaccggcgcgccgatgatgatgaacgccgacagcgtcaggttgatgcccgccaccagcaggatggtcttgaggatgaccggccgctcgccgcgcaggaaggcgaagctctcggcgatgtcgcccgccaccatgcgcaggacgccttggctgcgctcggcgcgctggaaggggatgcgcaccacgcacacgatgagcacggccgacacggcgaaggccgctcccgccaccgccaccaccggctcgatgccgaacagcccgaacacgagcccgcctatcacggggcccaccaaacccgacagcgcgctgatctggctcacgatggccgtggcgcgcacgatgccctcgcgcggcgccacgaagggaaccgccgcctgcaccgtgggctggtacacgctctgcgcggcgtacagcacgatgagcgcgcaaatgcacaggcccacgaggtccacggtgccgtcgagcgcgaggaacgccgcgcacgtgagcgccagcagcgtgtcgagcgcggccatgatgcgccgcttgttcacgcggtcggccgccacgcccccgatgggcgtgagcacgaggtacggcagccatgccgccgccgacaccgcccccatgagcgccgcggagcccgtcacgttcagcacgtagagcggcagcgcgaaccgcagcaccgcgtcgccgaacagcgaggctatctgcacgatcacgatcgagacgaacgaccggttcaaaagcttgtccacaggttctttcctttctttcataccttcggttggtatgtatcttggttaaaaaagatgctgagtcgaggcagcgatccagcgatgacgagaaacgcgcggcagcgtaccacggtatgcagcggcgcgcagcggccgcggggagccctctccattctgcacctgctttttcagtacaaatgtttcacgtgaaacatcgagcagcggacgaggtgcaaccgcagtcgggcgacaaggcgctacccaagcagagacgcacgacgcaaccgcagccgaaaaaacagagcaccccaaccaccacggccgatccagcactcaaacaatcatgcgcgctcccctttctcctgcaaattgcgctcgtagccgtcgcggaactcctcgagcatgccggcgatgcggccgggctgcacgtcgaggcccatgaggtgcagcagctccacgtagtagtccatgcggcggcgcatctgctcggcgtcggtcaggcggaacgcggggctcacccacaggttcgccagcatgaggatgacctcggccatctcctgcggatactccgtgcggatggtgccgtcggccatgccctcgcggatgatgggctccacgaattgcggagccacctcgttgatgatcgactggtactgcatgcccaaaaagcgactgttgcgcaccgggtcgggcgcgatagccacctcggcgctcaggggcagctgcgggccctccatcgaggcctcgaacagcgcctgcatcttctcgaggccggtcatgcgcggatcgtcgcggatctccaccagcagccgcatgagcggctcgctctcgcggtcgatggcggcgttgaggatgtcctccttcgatttgaagtggtggtacaccgcccccttcgtcacgtcgagctgatcgacgatgtcttggatggtggtgtgctcgaagcccttctcgcggaacaggcacatggccgcatcgaggatgcggctcaccgtctcctcagggtacttgttgcgcgccatgaatatctcctcttcgatagaacgaacggatgttcaatgtgaagcatccgagtggaacccgcgccgcatcgctcccttcgtgccgaaaaccaatgcgtcgttttcctaaaacataccgacggtatgtatcttacgacactggagcctagggagcaagggcgaacttcgcagcgatgtgagatactgggaggcggctttggacaagcggcgaaggaaggcagggggcgtgacggcaaagcgaagcgaacggaagcgtcagtggggagcgaaggcgcttgccatcgtgctgttcatggcggccggcgccgtgggcggctacctcatcgggcacgccatgagcagcggcgagggcgatccgctcggcaccgtcgcctggctcgtcgcggccgtcgcgctcttggtcgttgcctgcattttgcaggtcgtcgtccacgaggcggggcacctcgtgctcgggctggcgaccggctaccggttccgctcgtttcgcgtgggcagcctcatgctggtcgagcaagacggacggctgtgcctcaagcggctctccattcaagggacaggcgggcaatgcctcatggggccgcccgacctcgttgacgggcgcatcccctaccggctctacaacctgggcggcgtgctggcgaacaccctggtctccttggtagcggcagccctcgccttcgcactgccgcagaggctcgcggcgatcttcttcgcgttcctcgccctcgtcggcttcgtgttcgcgttgacgaacggcctgccgctcaccgtcggcggcgtgaacaacgacggcaagaacctgcgctcggcaggcgaatcgccggatgcgctgcgggcgttctggaccatcctcaaggtgggcgaggcccaggcggacgacctgcgcgtgaaggacatgcccgccgcctggttcgccgtgccagccgatgccgagcgcctacgcaaccccctcatcgcgtccgtggcggtgctcgcctgcaaccggctgctggacgagggccgcacctccgagtccgcagacgccattcgcgacctgctaaaacgcaagacaggcatgctcggcctgcatcgctcgctgttgaaggtggacctcgcgtactgcgagctcatgggcgagagccgcgcagaggaagccgagcgcgtcctcgacgccgacgcccgcaagctcatgaaggccatgagcagcttcccctccgtgttgcgcacgcgctacgcccaagcgctcctcgccaactgcgacgaggaagcggcgcggcgcattcgcgaggagttcgaccgcgcagcggcgcgctacccctacccgagcgagatcgagggcgagcgcgagctgatggacgcggccgacgtccgctttcgcgagcgagccgcgcacgcaaccgacgtaaccgaggaaggagcgcaacgatgaccgcgcacgaatggctggacgcctacctgctgggcctgcccggcgcgacgacggactacaaggtggaatgggaatggcagcgctatcaggtgggcggcaagatgttcgccgccaccatgcagccgggcccgcagcaccatgaatacgccggccgccgcctcgtgtcgcttaagtgcgaccccgcctgggccgagcagctgcgcgccgagcatcccgacgacatcctccccggcttctacgccgacaagcgtcattggatctccgtcgacctcgacggcgacgtgcccgaagaccttctgcgcgagctgtgcggccactcctacaacctcgtgttcgccaagctgacgaagaagatgcagcgagagatagctgaaggacagtcctaacccggcagcgccagctccacgaccagcacgtttccgtccaggcgcgcggacaggcgcatgctcatggctgcggcgaggctggcggacacggccaggccgaggccgctcccgacctcgctgcgggcggcgtcggcccggtagaagcgctcgaacaggcgctcgggatcgaaggcggcggggtcgggaacctcgttcgcgaatgccacgcaggctccgcgctgctccaccgcaagcggccccgaaccgtggcgcagcgcgttgcccacgaggttctcgaagatgcgcgcgagggcctcggcatcggcatccacggaaagcccctcgtcctcgaagtccacgcgcggctcccatccgcgccgctcgaacgcggggaactgccccaccagcacatcggccagcgccggcagcacggccatgggacgcaggtcgagcgcgaggtcggggtcgttcgcctgcgcgtaggcgaacagctggtcgaggagcgcgcccatgtcgtcgagccgcgcctcggcggcggccaaccggcgggcgcgcccggcgtcgtcgccctcgtcctgcgcgaggcgcaggtaccccttcgcgcccatgagcggcgtgcggatgtcgtgcgagaggctggacaggtcgcgctggaactcctgctggcggcgctgcccctcgagccgctcccgctgcgcggcgtccaactgggcgttcaccgcctcggccagctcggcgaacgcccgcccgggcgcctccaccgtcatgcgcgcgttgctgcgcgcgtcgcgcccgcgcaggaagcgcgccatgcggcgcagctcccggcggaagaggagcgccgccgcgcccgccccgacggccaagcacgcaagccccaccagcacatacgccatccgaacgccctccttgccctacacgtccctgcgccggcacgccgtgagcgacagcgccgcgcacacggctgcgatcgctccgaacacgataagcgcctgcgccgccgcgggaagcccggccacggcggacgcgcccgcctcgaacaggcccgtgcctcccgccgccagccgctgctgcacggacaacggcagccattgcaccgcgtcgcccaccagcggcatggccggcgcgagcaccgcggccgcccccaataccatcgattcgaggaagcccgtgggcacgagcgccgcgaacacgacgccgaccgtcttgctgcgcgtcgcccacgcgatgagcgcgccgaggaacgcgtacgccgtcaggacgagccacgacagcaccgcccagctccaatactcgcccaccgtctccgtgcgctcgtaggagaacccgaggaccgcgtacaccgcatccgacaggagcatgcccgccaacaggaaaaccccgcacaagaccgcgatcagcacgagcttctccgcaaagtacgcccgacggtcgccgcgccccgcgagcacgttcttcgcgaatcccgtgtcgaagtcggacgaggccagcagcgccgccagcaccgcgaggatcagcccgaggaatcccaccatgaacgtgttgccgtacgagtaggtgcggctgccgatgaccttctcattgagcatccgcacttcggctgcgtcgaggtcggcgccgttgggcgtggtgagcgtgacggtcgcgccgctctggcgcgcctcctcctgcgcctgctcgttcaccatctgggcgaactcgggcgtggtggcgaaccagacgagcccggctgcccccaccacgacgagcgcgaggaaggccaggcccacccacagcatcttgccgtgcacgagccggtagacatcggatttcaacaggttaaacatggcgcgcaccgccttcctcgcacgacgcggcgcgcgcagccccctgcgcgccgccttccatgagctccacgaagtagtcctcgatatcccggcgcaccgggctcatctccagcaccgtctggtcggcgtcgtggagaaagcgcgacacggccgtcgcgtcgtagtcgcccgcgacggagagggactcatcgggcagtgcgcgcagcgttgcctggggaaacgcctcctccatcaacgcgagcgcgcgggccgggtcggccgtgcgcacgcgcaggctgtcgccgcactcggcctgcacctgctcggcggtcatctcgcgcaccatgcggccttcggcgatgatgccgaagcgcgtggccacgcggtcgagctggtccagcacgtgcgagctgatgaccacggtcacgccgagcgtctggttcagccgcacgatgaggtttcgcatggcgcgcgtgccctcggggtccaggccgttgaacggctcgtcgagcagcagcaggtcgggcgagcccacgagcgcgagcgccaggcccagccgctgcttcatgccgagcgagaagcccttcgccttcttcctgcccacgccctcgaggcccacgagcgcaagcgcctcgcggcagcgcgccgacgcgtcgaccacgcccaaggccagggccttcgccatgaggttctcgtaggccgtcaggttgggggcgatgcccggcgcctcgatgagggcgcccacgcgcgacgttcccgcaggccgcacggcttcgccgcgaacgacggcgccggcgcgcccgccgaacagctcgatctcgccctcggtgggcgctgccagcccgcacaccatcttcatgacggtggacttccccgccccgttcttcccgacgaacccgtagatgtccccctgcgccacatgcaggtcgagccggtcgaccgcgcgcttgccgcggtaggacttcgtcagcccccgcgtctcaacgacgttcatgaacgcccctttcccttcgccttctcaacatgcttccagcttacggaacagggtttcaggaaggatgaaccaacctttaagaaagcttgaagatgcgggacgctcctttccgcgcaggtcatgcgccctcgtcgaccgccagcttgaacccgaggccccacacggtgcggaggtagccgtcggtaccggtgggcttgagcttggcgcggatgttggacacgtgcacgctcaccgtgctgtcctcggcggcgtagggttcgccccaggccagctcgaacagctcctgcttcgtgtacaccttcttcggatgcagcgccagaagctccacgatgttgaactcggtgcgcgtgaggggcacgtccgcgccgtccaccgcgagcgtgcgcgcggcgcggtcgacggcccatgcgcccacgcgcagcacgtcgccgccgggctgcgacgcagggacgcggccgcggtggcgcagctgcacctcgatgcgtgcgagcagctcgtccaggtcgaagggcttggccaggtagtcgtcggcgcccagcttgaggaggtccaccttgtcggtggcgctcgtgcgcgccgatgtcacgacgatgggcgtatgggcgtcggcagagcggatgagccgcacgatgtcctcgccgggaaggccgggcagcatgaggtcgcacaccaccacgtcgaaccgctcgccgcgcgcgtccgccgcctccagcacgagccgcgcctccgttcccgagaacgcctgcgtgcaggcgtaccccgcatgccccaagtggtcggccacgatgccgctgatgtgggcgtcgtcctccactatgagcacggtggcgctggctgtcgcatccgtcatgctcgcctccttctgcaccttttccaaagaagtattcggctattccgcatcttttcccatggtttgagctgcctattcaacgccttttcccctcgcctccacgcccatctcgtcgagcacctcgccaccccatttgcacatggcgttcagcaccggagtgaagctgcggccgcgctcggtgagcgagtactccgtcttgggcggcacctgatggtacagctcgcggtggagcatgccgtcggcttccaactcgcgaagctgctgggtgagcatcttgggcgtggcctggggcatgagccgctgcagctcgccgaagcgcagcacgccgtgcttgctcaggtgccagagtatcagcaccttgtgcttgccgcccacgatgtcgatggtcgcttcgacggggcaatggtaggcatctgggcaggttttcatggcagcgctcctttgcggcgggccttcggcggcaagcccttgctttccttttcggtagtatattccaaaatagtgcctacttgcttgtccggtagcggcttctatcatgaaaggagaaacgaacccgtccgagagaaggagcatcccatgtcgtttaccaaccttgccaagaagcgctgctctatccgcgcctacgatcccgaccccgtggaaccggacaagatcgccgccatcgtggaggcggcccacgtcgcgccgagcgccgcgaatcgccagcccgtgcgcctcatccaggtggaaagcgcggaagggctcgcgaatctcggaaggtacgcgaacctttacggcgcgccgctcgcgttcatcgtgtgcgcagatgccgagcgcgcttggaagcgccccgtcgacggcatggtctccaccgccatcgacgcctccatcacctgcgaccacatgatgatcgaggccacagacctgggcctcggcagcgtgtggatctgcgcgttcgaccccgccggcgtgcgcgaggcgttcaacctgcccgcctcgctcgtgccggtgaacatactggccgtgggccacgccgccgacgaatggaagagccccgaacgtcacgcggtcgagcgcatccccgtgcaagagctggtgacgaaggcgtaggctgcgcgccgtccccgtgccctgcacgtgcgcgacttcctggctggattggcaatttggcggtcatatgcactcgttatcgaacgcgctggatagcgccatcaggcgtttctttcgatgagccggcttcgcaggcttttggaagggctatttcgggtgcatatgcgttccgttttgccacatccccctatctttcccgcagcacaccgcgcgagcgcgaccagcggcgcaggtagacgccgccgatgatcgcgggaatcacgggcgaggccgcctgcgccacgaaaatgcccacgtagccgaagccgagcgcgcccgagagcaaaaacgccaggccgaagcgcacggcgaacgcgtcgatgagcgagttcgccagcacgagccgcggcgagccggccccgagagcgaacgagtcgaagctgtacatggccgcgtagaacaggccgttcacactgcacgtgatgcgcaggtagagcacggcgatgtcgaacggcgcgccctgcgtgaggccgtagagccccacgatggccggcgcgagcagctggatgagcacctggatgcccagcgtgacgccgatgttgaagcgcgctcccagccgcgcgacgtcgcgggcgcgcgcgagctcgccggcgccggcgcactgcgcggacgccgtggtgatggcctggccgatggcccagcagggcagccccgcgatggtgcttatttgcagccccacgcccgccgctgcggcaacgtccacgccatagcggttgagcatgccggtgaccagcgcgtacgacaggttcaccaccgccatctgcacggcggagggcacgccgaccgaaagcaccgcgcgcacgtcggcagcgaagccgcccgcgagaacgttgctcccaagcacgcgccccgccgcgaagcgccgccgcaccagcgcgagcgcgagcagcgccgagagcccctgcgccgccacggtggccaccgccgcgcccggcacgcccaggccggccgggcccacgagcaccaggtcgagcgccacgttcacgaacgtcgccgcacccaccagcagaagcggcgtccacgcgtcgccctgcgctttgaggaacgcggccgcggcgttcatgaggaacggcccgaccgcgccgcaacagagcacggtcgtgtaggccacggccccgtcgagcgccgccgcgggcaccgcgttcgccgtgaacgccggccgcgcgagcagcgtgccggccgcagcgatgcccgcagatgccagcaatgccaccaggagcgtggccgcgtaggcccgtcgctgcgcgcccacgtcgcccgcgcccaccgcgcgcgccaccaccacgccgcctccggccgaaaggccgatgacgaacgcgttcaccaggaacacggcgttcaccgcgttgctcatggacacgagccccacgtcgcccaccacctggccgaccaccgccatgtcgacggcctggtacacgtactgcaagatgttcaccgccatgagcggcaaggcaaacgagagcagctgccggaacagcggcccctcggagaaggaaacggtcgatgaagaaaaagccataggtcacctcggaggatcggaatgcgaaaacggaaggaggcaggggctcgcgacggccgcagccacgcgatgcgcccagcgcatgaaaaagcgccgcggacgaagccatccgcggcgctcaaggttcccggcatcccggcatcgacgacaaggcgtgcccttaggcagcgcgcctcccgatgccgatggtcctgtccgtccctgctccgtgcgatgcttcatcggcgatcacgcacagagcggcagccctgcaaagtatcattggttcccccaacgaggtggttgcaacgccggccagcataccgcgccagccgggtcgcgtcaaccacgtgcgacccccaccccgcgatggaggccgcccaggcgaagaccgtgctgcgcgatatatgaagcatgacaaaaacagcacgatgattgagcgagtttgcagtatgtcggcaagctcctgctgtgtcatgctcttggtggcgcgacacacgtgcatcttgctttcgagcgactacctgcttttcgccacgccgcccccgctcgatttatcgcgaactgtttctttcatttgttgtcatagatacctggcttcgtccaccgcatggaaggagagcgtcgtctccgggcttgaaaagctaacgatcgtttgctaaattgcttccattggctaacgttcgttagctttacgagagaaagagagcaccatgacgacgacggctcggcaggatcgaaggccgcatcccctcgcaagggctcgcgcgggttcgcgctgttcatgaactggttcgacgggatatgctccgtcgtgtgcggagggttcatggcggtaagcgggctcgtcgccatgtccgtcagctggaacgacgtcatgcccatcgagttcctgggcgtcctgcccttgcccgagccgctcatcgccacgtggttgtggccgggagtggcgctcgcactggtgaacggcgcgccgaatatcgtcgcgctcgctttgcgcttccgcgggaagcgggcggcgtcgtataggtggggaatcgcggcaggcgtcctgctcatcgcctggaccgcgttcgagctcgccttcatgccgaacggcatctccgcattctacctggcgctcggcgtgctgcagacggccgcgagctggcacgcgctccgcaccggggaggacatcgcatgacgccccgccgcaacaccaaggaggacatcctgcaggcatcgctgcgcctgttcgcccgcgcggggttcgaggcgaccgggatgcgcgagatcgcagccgccgtcggcatccagccggcgtcggtctacaagcacttcgcctgcaagcaggccatactggacgcgctcgtcaggcgcatggacgagcgatacgagctggcatccgccgccatcgggctcccggagggcagcgtcgacgagcaggtgcgcgactacgcggttaccccggtcgcacagatggcggacctcggcgaggggatgtttcgctactggaccgaggacgagttcgccacgttgttccggcagatgctcaccgtagagcaatatcgcacgcccgagctgggcgcactgtaccgccgctacttcatcgaggcgccgctcgcgtggcaggagacgttgttcgcatccatggtggaatcgggcgctttcgtgcgcgacgacccgaaaatgctggcgcttgagttcttcgcgccgctcatgatgctcatccaagctgccgacggcgcgaccgacgcggccgcccgcgagcgcctggtcgatctcgcacgacagcatgtgatccgcttcggcgaacgccacgcgtgcgccccgaacgcggaagggcccgaataggcggggagcaatcggttcggcaacgggcgcgagacggttgccggcggagggcaggacggcttcgcgcgcgcggcatactggagggcgctgccgtccagaaagctgatcgcccatgccgctcgaaaccctgcttcccgtcctcgccgtcctggccgtgttcaccgtcctgctgggggcgctctggctaatgaagcggcgcggcatcggcttcacgccgcgggtgttcacggcgctgggactaggcatcctgttaggggcgggcatccagctggcgctcggtcgcggcagcgacgccgcctccatggcgctcgactggatggccgtggtgggccaaggctacatcgcgcttttgaagatgctcgtgatgccgctcgtgttcgtggccatcgtgggcgcgttcacccgcaccaaggtgacggagaacctcggccgcatcagcgccgtggtgctggcggtgctcctgggcaccgtggccgtggcggcgctcacggggtgggcggccgtcgtgctctccggcctggcgggcgcgagcttcaccgacgcaggcgccggctcgagcgccgcgagcctcgaggccctgcaggccgaccagcagcaggtggcgaacctcacgctgccgcagatgatcctgtcgttcatccccgtgaacgtgttcgccgacctggccggaagccgcgccacgtccaccatcgccgtggtcatcttcgccgccatcacagggatcgcctacctcaagctgcgcgcccgcggcgagggcgcagccgacgtcccccctgccgccaccgccgccgcgtgcgagcaggccgcgttcttccggcagctcatcgacagcctgtatggcatcgtcatgcgcatcgtgtccatggtgctcgcgctcacgccctacggcgtgctggcgctcatcgcgcacgtcatggccacgagcgactacgcggccatcctcgacctgggcaagttcgtggccgtgtcctacggggcgctcgcgttcatgttcctggtgcactgcctcatcctgctggcgaaccgtgtgagcccgctcgcctacatgcgaaaggcgttccccgtgctcagcttcgcgttcgtggcgcggtcgagcgcaggcgccgtgccgctgaacatcgagacgcagacgcgcgccctgggcgtggacgaggccacggcaaacttcgccgccagcttcggcatgtccatcgggcagaacgggtgcgcgggcatctaccccgccatgctggccaccatcatcgcgcccacggtgggcatcgacgtgttctcgcccacgttcgtcgcggggctcgtggccgtggtggtgatcagctcgctgggcgtggcgggcgtgggcggcggcgcgacgttcgcctcgctcatcgtgctgggcaccatggggctgcccatcgagatcgtgggcctgctggcctcggtcgagccgctcatcgacatgggccgcaccgcgctcaacgtgagcgactccatggtggcgggcgtcaccgcgtcgaacgcggtgggcggcctcgaccgcgccgtgctgcgcgaccccgaggcgcgcgtgagcggcgaggggcatgcggggatgtaggggattgcccccgctttcctccagactgcagaatttggcaagaatatcgaggtagggcacgacgaagttctcgtcgaaaaatccgaactgggattatggcggcgaaggaacccctggcctcatccaaatcgcctgaatctctgccctaggtcaaattttctgccacattcaatcgaacggggatccggcttgcggcactggccgtccaacctggcagcctagcccagcccctccagcacgcggcgcagctcggcctgcacgccgtggtccacgttcgtgccgatgaccttatcggctatctgcttgatggcgtagcgcgcgttacccatggccacgctcgtcccggccatgcgcaggatctcgtagtcgttcatggagtctccgaacgccgtcatctcgtcggcccggataccgtgggcgtccagcacctggctcacgccggtggccttgctcacgccgcgctgcatgacgtcgatccacttgcggccagacggcgcgaacacgaagtcgtcgtccagctcgcgcgtgaggatgtaggccatatccataacgtcctcgtcgcagtacaccgatgccttcaatatgttcacctggggcgacggcaccgcatacacgcgcacggggttcggcaggttcttgtccacctcgcgctcgaagcgcgcctcatcgtccaggaggtagctgcgcgtctcgtcgaacagcgccaggtgcatggtgtcgaacatatccaccacgcgcgccagccgcttcacggccgcatgcgagaatacctcgaggtccaccagctcgccctccacgatgacctgcgcgccgttcgacgccacgaagtccatgcagtccacgatgggctcgaacagctcgcacagcgtgtcgaagcgccgccccgacgtggccgcgaaccgcacgcccctctcccgcaggcgcaggatgagctcgtacgtgccgtcgggcacgcactcgttcgcgtcgagcatggtgccgtccatatcgctggcgatgagcttgagcatgggaacctcctttgttgaggtgcggccatgcgaagggcgaagggttgccgccgcctgagtcggcagtcgccggaacgagccatcgcaggaattcaccgccggaatcccaccactgcccgctgcacatcccgccaccatccaatgaacgccgcgccgcttccgctttctcggccattgtacggcccgcttccgcttggcaccgtttctccaccgagactttgcaggattttgaacaagccgacaactagaaggacaaaagcccctctgcaacatgaggcaccgcaccaaagatcgctcaagcatccttccgcggtgccgttcttatgaaagtgcagctgcgctatccaccgtaaacgaaactcccctttcaaatgaacggccgggggttacccttcgaacgccgtgagctccagaccgcggaaggcggcgtgctgttcggcgagggcgcgcacctgccggccgtcgacggcgtcggaccaccagttcgcctccacctccaggccggcgcccttcttcgtgccggtccacgtacccaccacctcgccgcaatgtacgatagcgcccggattggccaccgtgcgccatatccgacgttgcagcgctttgtccgactgcaggacgacgcggtcgcgctggtcgaggtaggggtcgtgcgcggctagcagcagcagctcgcgctcaagcggctgcggcgcgagcaggcgctcccggtcggcggacagcacgtaagccttcttgcccaaaaacgtgaccggctccatctcgtcggcggccgtcttccatagccgccgcgcctgagcgccagagcatcccagccacgcggccagccggtcggccgtggtcggcccgtagcagtggacgaacttccgcacgagtttgcgggacgcgtccgcgtcgggcgccaagaggcggccgagccaagtgcggtacgacgtgaacgtggggctggccccctcgcgcgcgccgaacaccaccaggcccttgaaggagcagggccgcagcaggaacgacaccgctgcgccgcccaccgtctgcttgtcagggctgccgtacatcgacagctcgttccacaaggagcgtttctgcgcgggcagtagcggctccatccacgcggccagcgtttggtcgagcgatgtcttgccggtcaccgtccgcccgtccagctgtggcatgacctgctccagcaagaccagcagctcgtcgaaccccacgcccagaaagtcgagcgccagcccgatgccccgcgtgtagatccagggttcttcgccctccgccgcaagcgccgacaggaacgcggcgctgtcggccgccgggaacacgacgggcgtgccgcgaaaactccacgcctgtacgagcgagcgctcctccagcagcaggcggtcgcgatcggccgccttgcacgcgggcacgcggttgaagagcgcagcctcccacgcaccgggcggcgtgttctgcatgccgcaggcgccgaccgctgcaagcacgtcggccttagcgtagaacgtgtccagatggtgcgcgtgcagcctgaagttccgcacctgctccacgttcagctccatgctcggctccgactttgccatgcgaccatccctttcgcggctctcttttgccgtccgtttcacgcaccataccaaatagggtacctcctgtggcggcagaatacgtcgccgaactcttgccgccgaacgaaagcgccacgacaagctacgtataaccccaggtcatagcttccgcaacctcagcgtgcgcgaaaaaaagcaaaacgcaccatcaaagtggtggagcgggcggccctgcaaccgcatgatagaagcaccgaaagggagtgcggggggaacgcgggccagccaattttgccacgaggggctggcacattcgcccgcctcgggcagcgtgcgaacgacgaatccaaacgggcccgtcgctcgcacgctgcccgaggcggcgagatcgcgcaccacagcttcgctgccgcaccgttcgggtatgatacctaccaacaacgaaaggaacctaccatgagcttcgccgacaacctcgtctacctgcgccagcattacggcgtgacgcaggagggccttgccgagcagctgggcgtgtcgcgccagaccgtgtccaagtgggaggccggaacgaactaccccgagatggacaagctgctggcgctgtgcgacctgttccacaccagcctcgacgacctcatgcgcggcagcgtgcacgtgaccaaggagaacgacaccgagcgctacgaccgccacatgaaccgcttcgacctgtccatcgcgctcggcgtggcgtgcatcctcgtgggcgtaggggtgcaggtgctcctggatgccctcggatggccgagcaacatatcgaccgtcgcgttcctgtcgttcgtggtggtgggcgtggtcgtcctcatcgtgggcagcctcaaccacggcgagttcaagcgccgcaacccctccatcgagccgcgctacgccgccgacgtgctcgagcgcttcagccgccgcttccccgtgctcatcgccggcggcgtgggactcatcctgctcgacgtgatcatgctcatcggcctctcgcctgaggacagttcgctcgatctcgtgcgcggcgtccgtttggacgaactgatcgtcgcgccgttcatgttcgtccttgccgtcgccgtgggcacgctcatctgggctacgatgcagaagtcgaagtacgagctgtccgagctcacctacatcgcccaccgccagaacctcggcgccgatctgccgcccaccgccgtggtgaagtcgcccgagcaggtgcgcgccgaacgcgtcatgggcgtgatctgcggctgtatcatgctgctcgcgctgatcgtgttcctggtgtggggcttcgtgccgctgttcgaccaggtgggcggctgggacggaatcgacaagcacgcactgaaggacgccatccgcgccggtcagggtgggttcgccatcagctggatcgcgttcgtggttggcggcatcctctgcggcatcgtatggatggtgggcagcgtgctgggcaagtcgcaggacgactggatcgccgaggcgaagcaggaggacgcctggttgaagtacgcgcaggccgacgccaaggaagacccctgggcgcgcggtcccgagcagccggaaggctcccccgaccagcccacgtggaagtaacgcccgccttagaaggcgagcgccgttatggacggaaggaatgcggcgccgtcccgcagcaccgcccgcgcctttccgcctccccctccctagagcggcaggtgcttgcgataggccacgcgcttgtccatgatgcgttggacaaggccgatcgatcggcccatgagcaaggcggacacgaccgtgcccacgttgatgccgaacagcgcgccgccgccgacaaggccgatagcgcaggttgcgagcagcgtcacgacgtcgaaccataccttcacgcgggcgtaaggctggccgatggccgcgcacaggtcgcgcggaaatgtgtcgatgggcatgacgggcagctggcagcgcgtgcagaagtacacggtcacggccacgacggcgaaaccgccgacgaaccacaggcacgacagcgcaagcgactctatcgggaacaggtcgttcatccacgacccgttgaagtcgatgagcgccccgcccacggcgcagaccagaaacgacacgaggtagcgccagtcgagcgttcgcctaacggcgcacaggatggcaacgagccctatctggaatacgacgtaccacacgccgtagctcacctggggcgctatggcgttgagtgcgaacggcagcgcggcggccggcacgaggcccacgtcggcatgcgccatggcagccacgcccagagggatgatcaggaagtagaccgcccacgccagctcggccggaagcacgagcgacggcgaagcggccgcttcgcccgcaggcttgccagccagctcgtcggcggcgcgcacggcttccgagggcatgctactcgcccagcttctcggcggcttcgagccactcttcctcaagggcgtccacttgggattgcaagtcgttgatctgcgcttggaaatcgccgagggcagcgaagtcgctcgggtcggcggcggccatctgggcgcgcacgtcctctatcttgccgttgagcgtctccatcttgcgctcgttcgactgcatgagcttgcgcagcgtgcggatctcgccgccggtgagacggggcccggaggcgccttcgacttcggagtcaccctgatcggcggcgcgatgggggctttggcctgcggcgcggtcggccgcccgagaggaaagggcaccggatgcgcggccgctttgggcaccctgggcggcaccggtcgcgcgctccgtcagccgcaggtactcgtccacgccgccggggaggtggcgcagcttgccgtccagcagggcgaactggtggtcggtcacgcgttccatgaggtagcggtcgtgcgtgaccagcagcagcgtgcccggccagccgtccagcaggtcctccaccgaggccagcatgtcggtgtccaggtcgttgcccggctcgtcgaggatgagcacgttcggctcgtccagcaggatgagcatgagcgccagccggcgcttctggccgcccgacagatcgctcacgggctcgttcaggtcggcgcgcgtgaagcccagcttctccagcagctggcccggcgtcatctccttgccgtcgagcatggtgcggcggctgtagcgacccaccacctgccgcacgcggtcgtcgccgaagcgcgccaggtcgtccaaatgctgcgacagcacggcgaagcgcaccgttttacctatcttcaccaggccggcgctgggcttctgcaaaccttggaccacccgcagaagcgttgttttgcccgcgccgttctcgccgacgatgccgtagcggtcgccggggccgatgatccagtccacgtcgtccagcacggtacggccggagccgtccccgccgtcgaagcgcacggtcacgtgctccaggtccaccacctgcttgcccaggcgcgccatggccatgcgcttgagctccagctcgttgcgcagaggcggaacatcggcgatgagctcctgggccagggccacgtggaacttcggctttgtcgcgcgcgcccgcgccccgcgcgagagccaggccagctcgcggcgcaggtcgttctgacgcttctgctcggccagcgccgccaaacggtcgcgctccacgcgctgcatgatgtaggccgagaagccgccctcgaacgggtcgaccacgcggtcgtgcacctcccacatgcgcgtgcacacctcgtcgaggaaccagcggtcgtgagtcaccaccagcagtgcaccctgccccgcgcgccaacgcgttttcaggtgtccggccagccacgtgatggcgcgcacgtccaggtggttcgtgggctcgtcgagcgccagcacatcccagtcgccgatgagcagccgcgcaaggtccacccggcggcgctgcccgccggacagcgtgcccacgcgcgcgtcccacggaatgtcggaggccagccccgcgatgatgtcgcgaatgcgcgcgtcgcctgcccactggtactccggcaggtcgcccaccacggcgcgctcgacggtgtcgtcgtcggacagcgcgtcggcctgccccagcacgcccacgtgcaccgtgccgttcttcagcacgcgtccgtcgtcgggctccagcgtgccggccagcaagttcagcagcgtggacttcccgtcgccgttgcggcccacaatgccaatgcggtcgtcctcctccacgcccagcgacacgctgtcgaacaccgtcttcgtggggaattccacccgcaccttctcgcaacccagcagaaactccatgtatccatccttcgcattcgcacgttcgctcccatgatagcgaaactgcgcgggtacggcgttcccattcgcaaaactgcacgtacgccggcggcgtcaacgaacggttacgttacaataaaaacgagcccgaacatttatatcagcgcctcgtgcagacggcacgtgccgcgaacccttccatcaccgcaatcgccacctccgtggacaaagcggcggacatcaagcgcgagagcctgcggctcgaactcgaggccatccagtcgaggtacgaggacggatcgttaccccgcgcctcgtacaagcgcttgcgcgagaacgtggccctcatgcagatggatctggaagacaacctgtaggaataccaggcggggaacgccgtcgtcggcgatgagggctttcggcgcttttcgagccaaggcgcctggttcccgcattcgacgcgttgccgccctcaagagcgaggttcaacccgtccgaaaggaccttcctcttccaaccgaccttccgcgcctccttacatcagcatcatcacgaccaccacgaaagccaccgtgagcacgagaccggcaagcatgatagcccagacagcaggacgggcccagttcatggtccaaccgatgccgaagcgctcgggcagaaacaggctggcgtcgtcgggattgtagtagaacacgcccagcttccagtgttcgtcgtcgtcggccagcagcctttcggaagcggccatgcgcgagaacacgcgagagcccccctggccgtaaaccaggctgataacgatggagcccaccactatcaccagcgccaaggccaccacgaacacgcctgcctgccccaaccctatcacgccaatgaacgaaagctccatgacggggcccagcaggctgagagccaggccgcctgccaccagcaagatgctctgggcgcgcgcgaacatgccgtaggccagcgccgaggtggcaggtgcggacgggttcgacggcctcttcgagcgcaggatggtccagtgcgcaaacgccatgcaggccgccacgaacgccacgatgagcgcaggaaccagtatggtgaacggggttttctccatgtactccgtcacctcgccctgaaagttcatgtgctgcgggatcaagtcgggcatctgcgcgtacccgacggcgccgatggccagcgtcacggcaatgacgggcaggtacagcaaattccacttgagcgagaccgcgcgcggcacgggcgcgtcgcccaccacggccaccgactcacgtgcgctggcctgccagccctgctccttcttgtaggactgcaccttcgcccggaaatacagcatgaggccatagcttccgacgcacagcagcagcatgcccacgcacagcacggccaacgccaaaccggcatcgcccgtgaacgccccgaaagcgcctaccgcggtgagcacggcggtaagagcggacatgatcagggcgtagcaccgcttgagccgacgcaggtaggggtcgtgcgccgccgtgtcgggcacggtgacggcgaacacctcgccgcgcctcatgaggaacggcgttacgatggtcatgatgcccgtcaagggcacgagcgcgacggtgaaggcgagcatcgtcgcagcgaactcggttgcgtttccctccattgccgcgtcacgcgtcctttccgcaagcaggggcgaagccggcctcgatggggagcctgccggctccggccgcccgcgcagcctgggtggatggcacggggtcggcatcggcgcgctcgagggcggcataggcgcgggcagcctgggcgctcgcgcattccaggaactcgccgcgcgtgccgccgcgcgcccggtgtgcgagcgcgagctcgaacaggctgtcctccatcttcgccagctcgatctgcgcgcggtcggcccgatcgtcctcgcaggggtcggcgatgtaggcgccgctgcggccgcgcatgagcacgtagccctcgtcgcgcagcacggcgtaagccttgttcaccgtgtgcaggttgattcccaagtcgctggcgagcgaccgcacggatggcagcgcggcgccgggaaccagctcgccgcgcgcgatggccgcgatgatctggctgcgaatctgcaggtacagcggctcctccgccttctggtctatgcggatgatcatacggctccctccttcgctacatcagcatcccgttcaccgcaaggtcgatgaccccgataagcacgccgatgccggccaacagcagtcccagcttctcgcgcgaaacgcccagccacaccgagccgaacagccccaggcccgccgaaagcaggacggggaaccacttcggcgaccaaccgttcacgtctcccgtgatgccgaagtgcgtcgccacctgttcaggcagcagcacccactgggctacggccaacgcgactgccgcgattcccagcgcgattgccgccacgagcccgctgcgtccttcgagcaccgtgccccgattgcgcgtcccgttttcccttgctcccatgataccgcctttcgccctctcttcgatgatgcttccgcctcctgcgccgattcacgcggaaagcccgcgtttcgccgtgctgcggtagagcgcggccgacaccgcagccaccgcgcacgccgccagcagcgatcccgcctggcccaggaacaacgccgccgccatgcccaccgccacgaggcccatgccggcgaagacaaccacgaacaccggcatgccgcgcttcaccggctcgtacacggtggtccagtcgtagcgcggccgacgggcatccatggccaggcccaagctcgtggccagcaggcacgatgccgacggcaccgcgaacagcgcggcgacggacagcgcgtcgagcggcagcgaaaccgccacgagcacggccgacaccagcaaaaacggcaggccgatcgccaggttcaccgccgctttcgaccacagcacggtcgacggcggcacgggcgccgtcagcatgagccagcgcgaagagccctcaagcgacaccgacgcggccgtggtggacgagatgctgcagaagaacgccaggccccacgggagcacgagcccgatgacaggggccagctcgggcggcagcaggtcgagcgaaagcgcgcccgtgagcgtccccgccgccacggcgatggccgccaccagcacgagcacatagccgatgcaggcgttcatgaagtagatgggcgtggccacgagaaggcgcacctccttcgccatgagggcccgcagcggggagcccgccttcgccgccgcagcacccttgccgtcgaaagagaacgtcccgcgagggcgcgacgacatgagcatcgagtttaccggcacgaacaggcgtacgacgagcgcgagcaccgcgcacgccgccacgaggttcacggcggcgaacgccaggaactgctcgagatcgccctccacgatgccggccgtcgcccatgccgccggaggaaatgcggcagcaagctgggccacgagctcggtgccaagcgccgtcatggccgccatgtcgtcggcctgcgacgagaacgccagtgatccgaacaccgcgatgagcgtggccgccagagtaagcacgatcaccacgacgttcgcatgcttgaagtgcgccgacaccgctgcgatgagcaccgccagcacgatggccgcggccagcggaagcagtggcgccagcaccaccgaaagcgccatgcacgcgacgcccgccgcggtcacgcttgcgttcgccgcgtacacggcgaacgccggaaccatcgcaagcagaccgaacgccaagctcatggcgtacagcgacacgatgcgcgagagcaccaccgacgaggtgggcaccggcagcgacatcaccagatcgtagtccttgaagctgaacagcacgccgttcgtcttgaggaacgccgccaccgcgccggcaacggcgcccacgagcaccgcgacaagcgggatggcctcgggcagccccatctgcacgagcgtctgcgcgacgcccgacgagtacgccgcggcgaatagcacgatggccgccacggccaacgcagcgagcgccaaggtgcgcctcgccttagccgggtcggcgtgcagcgtcttgttgatgccgaaaagccccaacagctggattttcagcagaaggatgaacgagcgcatgcttaccgcccccctaccgcgcgccggcggccgaagcggcctcactgcggtcgaccatgtcgaggaacacgtcttccaggctctcatcgcccacgacctcggccgtgcgaccgcacgcccgcaactgcccctgcttgatgatggccaccttgtcgcagagcttctccaccacttccagcacgtggctcgagaagaacacggccgcgcctccgtcggccagctcgcggagcatctccttcacctggaaggacgcctcgggatcgaggccgacgaacggttcgtccagcacaagcagcgtcggctcgtgcacgagtgcgccgatgagcacgagcttctggcgcatgccgtgcgagtacgaggacacaaggtcgcccaatgcggaggtgaggcccaggcgatcggcacactgccgaatgcgggcctcgcgcacgtcggcgggcacctggaagatgtccgagatatagttcaggtactggatgcccgtgaggaactcgtagatgtcggggttgtcgggcacataggccgtgacgcgcttgcaagcgagcgcgtcggtgcgcaccgattgcccggcaatgcggatgtcgccctcgtcgaagcccgtgacgcccacgatggcgcggatgagcgtggttttgcctgcgccgttgtgaccgacgaagccgaagatgtcccccggcatgacgtcgagggtcacgtcgtccaccgcgcgcttcgcaccgaacttcttcaccacatggttgactgacaataccggagatgccatgccgattttccttcccttgcctgcttgttatatttatgctataacagatggaacaaagatgcaagggacgtatttgcgatcgattgcacggaagcaggcgctcgcacgccgggtgcttcacgcgaaatccgtttgcccgaactgatatttcgcgtgaagcacccggcgatgaagagagaagaggagcacgaccatgaggcgcatagcgatttttctggcggtcaccttcgccttgacgtgggcgtacgagttcggggtggtgtacccggcgtcgtcgggggcgctcaccggcatcccgccagtcgcggcgcagttcgtcaccggggcggccatgttcttccccgccatcggtgtgctcgtaacgcgcctcgtcacacgggaggggttcaagaacagcgtcgtcaaaccgcgcgggttcaagaagtcgctaccatggttcgccgtcgcctggttcgggccggccattttgtccgtcatcggcgcagccgtgtacttcctcgtgttcccgcaggatttcgacccctccatgggcgccttcgtcgcctcgacgcagcaacaggcagcggcgaccggcgccgagctgcctgccgacaccgtcaccatgatgctgctcgctcagctgccattcgccatcttcctggcgcccgtgctcaacatcttcacgacgttcggcgaggaatggggatggcgcggctacctcgtgccgaaggtgtccacgcatctgcgcatcgtccccacgctgctggtcacgggcgtcatctgggggctctggcacgcaccgctcaccatcatcgggcataactacggcaccggctatcccacctggcccatcggcggcatagcggccatgtgcctgttctgcatcgtcgtcggcatcttcctcacgtacgtcaccgtgcgcacgggcagctgcctggcggcggccatcggccacggagcaatcaacggcttcgtgagcgcggcgctgttgttctcggtgacgggcggcaaccccttcgtcggccccctgcccgtcggcatcatcggcggcagcgccttcgtcgtcgtggcggccttcatgctgcgcgacctgcatcgtcgcgaaaaggagggcacgctcgacatgccgaaggcgggactgcccgatgacgtgacgaaggccgacctggctcgcgctcctaaggcgtagcccaacggctagcacacgaacggatgttttacgtgaaacatccgaccctggcataacgaaaaacggggcccgatctgccgccagatcgggccccgccctgtccatgcctgctgcaccgccaaacctgccgatctgccgggccgcgttccgtctacaggcgctccaccacgaggtcgcccatggcgacggtgccgaccatcttgtcggccggtgtgtcgggtcccttgatgtcgccggtgcgccagccctcgtcgagcacggcggtcaccgcgcggcggatgtcgtcggcggcctcgcccatgtcgaagctgtagcgcagcatcatctcgacggacaaaatctgcgcgagcgggttcgcgatgcccttccccgcgatgtcgggcgcgctgccgtggctgggctcgtagagcgcggtgccgtcgccgaggctggcgctggccagcatgccgagcgagccggtgatctgcgcggcttcgtcggagaggatgtcgccgaacatgttctcggtcaccaccacgtcgaagtcggccgggcggttgatgagctgcatggccgtgttgtccacgagcaggtcctccaactccacgtcggggtactcctccgcgccgatgcggtgcacgatctcgcgccacatgcggctcgtctccagcacgttcgccttgtcgacgctcgtcaccttgttgcggcgtttgcgcgcggcctcgaaggcttggcgcgcgatgcgctccacctcgtactcgcggtactcgagcgtgtcgtaggcgcgctggccggcggtgccgtccgttccgcagcactcctcgtcgtagaagcgctcgcggcggccgaagtacaacccgccggtcagctcgcgcacgatcatcatgtccacgccgtccacgatctcgggcttgagcgtggatgcatcggccagcgcggcgaagatctgcacggggcgcaggttcgtgtacaggcccagcgccttgcggatgcccagcagaccctgctcaggacgcggcttcgccggatccgtggtgtcccacttcgggccgccgacagccgccagcagcacggcgtcggaggcttcggccgcgcgcagcgtctcgtccggcagcgcggtgcctgtcgcatcgatggcgcacccgcccagcagcgcctcggtgtaggcgaacgccgtatcgtacttcgcgcccaccgcgtcgagcaccttgacgccctcggcgatgatctcggggccgatgccgtcgccgggaagcaggcaaatttggtagttcttggtcatgacatcttctttcggatataggttttcagcaaaagcacctcggtgaccccttagggcatggcaaaggggccgcgattgcacaaaaatcaccagtttgttgcagcttcgagagcatctcgcacaatcagcttgtagcgacctgcgaaaatgctctcatctttggcgagtggctgagaagaaacaccgtcagatgcaaaaatgtgcaacaatctggtgatttctgctcaaatatccgccattctccttacgcaaagcaaagcgaacgggcattgcatgcgaatctacttccccagcttcgccttcgtgcggttgatcaggccgccggcttcgatgatctcgcggatgaacggggggaacggctgggcctcgaaggtctggcccgtcgtctcgttcacgatgacgcccgcgtcggcgtccacgttcaccacgtcgccctggctgatggcgtccaccgcttcggggcactccatgatggcgaggcccgtgttgatggagttgcggtagaagatgcgcgcgaagctcttggcgatgaccacgtcgacgccggccgccttgatggcgatgggcgcgtgctcgcgcgacgagccgcagccgaagttctcgtcggccacgatgatgtcgccgggttgcacgcgctcgatgaacgacgtgtcgaggtcctcgaggcagtgcttcgcgagctcggccggatcggacgtggtcagatagcgagcagggatgatgacgtcggtgtcgatgtcgcgcccatagcggtgcgcggttcctttgaattgcatggtcgcagtccctcctagtccaaatcttccggcaggccgatgtggccgagcaccgcgctcgccgcagcgatggccggcgaggacaggtagacctcgctcgtgggatcgcccatgcggccgacgaagttgcggttcgtcgtggcgatggcacgctcgccggcggcgaggatgcccatgtagccgcccaagcaggggccgcacgtgggcgtggacacggcgcagttcgcgtcgaggaacacgtccatgaggccttcctccatgcactggcggtacacggcctgcgtggcggggatcacgatgcagcgcacgtcgggatggacggtgcgcccgcgcagcacatcggcggcctggcgcatgtcgacgatgcggccgttcgtgcagctgccgatgacggcctggtcgatacgtacgtcgcgcgcctcggcggccgggcgcgtgttcgacggcaggtgcgggaacgacacggtgggcacgatggaggcggcgtcgatctcatacaccttcgcgtatgtggcgtcggcgtcggagtggtactcggtgtaggggcgctcggtgcggccgtccatataggcgcgcgtcacgtcgtcgacctcgatgagaccggccttgccgcccgcttcgatggccatgttcgagatgctcatgcgctcgtccatgcccatgttccgaatggcgctgccggtgaactccatggcctggtagagcgcgccgtccacgccgatcatgccgatgatgtgcaggatgacgtccttgccggtgacgccgggggccagctcgccctcgatcttgaacagcagcgactcgggcaccttgaaccacgccttgccggtggcgtagcccacgccggcgtcggtggagcccacgcccgtggcgaacgcacccagcgcgccgtacgtgcaggtgtggctgtcggcgccgatgatgaggtcgcccgcgccgacgacgccctgctcgggaagcagcgcatgctcgacgcccatgcagcccacctcgtagtagtgggtgatgccctgctcgcgcgcgaagtcgcgcacgatcttggcctgctcggcgctcttgatgtccttgttggggacgtaatggtcgggcacgagcgcgatcttcgtgggatcgaacaccttctcaacgccaatcttgcggaattctttgacggcgatgggggcggtaacgtcgttggacagcacgaggtcgagatcgcattcgatcagctgacccggctccacttcgtcgagccccgcatgggcggcgaggatcttctccgccatggtcatgggacgtggcatgggttgctccttggtttgcggtgggccgtgcgagcccgcgcggggcgggcaggtggaaaacgcccaccattgtagcactcgctttagcgtgcaaaagagaagagccccgaagggcccttcgttgtgaagcgattttccatgtttcgccggaacgacgccctttcaggccggcttaccaggagccgtggtagccgtagtcgtagccgtaggaaccggccgagcccatggcccccgcaaccagcgccgtgatcatgccgccgatcgccaagctgatgaggatgcccagcacgatccacaccacgaagccgatgatggtccacttcagggcctcgctctttacctgcggcagcttgtccacgttcacgagccacgagatgacgatgcccgggatgcccatgagggcgcccaccacgaaccagccgaacttcatgccaccggtaagctgcatgagcggcgccggcatgtacatcggctgcggctgtggctgatacccgggctgcggagcctggtagggctgctgcggcggcatctgctggcccatcggcggctgctgcggctgcgcgggaggaacgggttgggacggggcatccggggcgtcgcacgagggaggcgtggggatgccctgctcggtgttgttcgtatcgtcggccataatgaacctgctttcatcgaagttgcttgccagcaagtataaaaggcccctagcgcacccccacttcgaccggcaaatccgtcatcgaactgacacgttggctactccatctggtgtaggagcgcgcgaaagcactgccgagccggtcgaggagttccggcggccggcaggccgacggaacctacgagagcgcggagcagagggcgtcgagcagggtgatggcgaagtgctgggcggaacggccctcgccggcgtcctcccacatggtgccgggcagctccacggcgatgcgcgacggggcggcggcgtcggccacgccgatggccgtctccaagcgcaggggcagcgtggcctcgtcgtcgaagctcacgcgcggcacggcctcggccgtggcctcctcggccagcacgatgtgcacgagcagcatctcctggtcgggcctcaccagcagcgagtcggcgctcacgatcctggacgcggggctggtggccagcgcgaggttcgacatgcgcgacgccacgctgcgcgtgaactcgtgcgtgccgaacaggcacagagcgttgccctccagcacgtcggccgcgcgcgcgaagcccaggtgcacggcctcgtgcacggcttccttgccctcccaggaatggtggaggttgcgtatggccgcgtacgtgtacgcgccggcgatgccgtcggacggcaagcccaggttcagctggaacttgcgcagcgcgagctccgtgtacgcgccgaagatgccgtcgttcgccccgcaagcgaacccgagcgcgccgagcgcctgctgcagctcctccacgtcgtggccgtggaagtggggcatgcgcaggtacagcgttcggtcgcccaggaagtacgaggcgtccacgagcgtcgaccacaccttgccggtcacgtcctcgcccgcgggcaggcccgcctggatgcagaacgcccgcacggcggcggcggtctgctcgccgaacgagccgtcgacggcggcctggtcgagcaggccgatggtggccaggcgctgctgcacgtcctcgacggcagcacccgtgtcatgtcgcttgatggtttccatgggggtcatggtaccgcaggccgccctccccccggcatccacgctgggggtttcaccaaaggaacagagcggcacgcaagcgacggcatccacccccaagttgaccgggcgggagcgaagcgacccgcccatgcgcccggagggcgcataacggccgcgcaggttggcgtagtaagtcagcgagaagccccctggtgcccgagattggcgggatcgcggaggtgaagcgtacttcggtacgcgaacctccgggatcgcggcaagatcgggtgccagggggcttcgcagcgtcgagtcgttccggcggccggcaggccgacggaaccctaaagtgcgatccggtagatttccctcgcgtcgtccatggtgagcttcttgaagctgccgaagggctcgcccttgttctccttgagggtggggatcatgcgctcgatgtcgtcctcgcccacgcccagctcgtcgagcgtcaccggcatgccgagcgaggcgaagaagccgcgcgtctcgtcgatggccgacagcgcgtcggcctccaggtcgcccgtgggcgccaggccgaacacctcgcggccgtaataggcgaagcgcgccgggttcgcgtcgtagacgaactccatccacgccgggaacatcacggccaggcccgcgccgtgcgtgatgcccgggttcagggcggacagctcgtgctccaggccgtgcgtggcccagtcctcgtggcggccgacgcccgcgaggccctggtggcacagcatgcccgcccacatgacgttcgcgcgcgcatcgtagttatcgggctccaccatgacgcgcggcgcctcggcgcgcaccgtcttcatgagcgagaggcacaggttgtccgtcacgggcacggcgcccacatcgtcgaagaaccgctccagcaggtggcagaacatgtcggtgaggccggccgccgtctggtactccggcaaggtgaacgtgagctcggggttcatgaacgcgagtttcgggcgctgcgcgttgttcggatagcccgacttcaggcccagctcgtcgttgctcatcaccgtgttcttcgacgcctcgctgccggcggccgggatggtgagcaccaccgcgatgggcagcacgtcgtccgtctgctgcttcgtctcgaagaagtcccacacgtcgccgtcgtagtgcgcgcccacggcgatggccttcgccgagtcgatgaccgagccgccgcccacggccagcacccagtcgatgccgtgctccttgcaaagcgcaatgccctcgcgcgacaggccgatctccgggttcggccgcacgccgcccagctccacgtgctcgatgccggccgcgtcgagcgacgccttcacgcggtcgatgaggccgctggcaaccgcgctctgcccgccgaagtgcacgagcgccttgcgcgcgccgcgcccggccagcttcgggcccacctgctcttccgccccgcggccgaacacgaaatgcgtgggcgatacgaactcgaaatcctccatggcagcagtcctttccgcaagccttcgtcgttggccaaccagtataccgctcccccgccccggcatgcgccgcgttcgccggaagcagggccggacgacggcaggcaagcggaaacggtgaaaatacgatgggagcgtgctgaaacgtcgtaagatccccgcaaggttcgcacggccggaatgcgatgaacgcgcaaggtcggcgcggttccgcaacggtcgaattacggtcgggcggcaaggttgcggagctaagatggccacacggattcgtccaggcggggaggaccgacacccctcacacccatttccgattttggaaggggggtgaccctctatggatgatatgctgcttgcccttaccggagtgatcttgcaggttctcgggctgcacgttgcgctgttgaacgtgctgctcggggcggccgggcttgtcgtcaagctcgtgtcgaaagatttgccccggtcgtccgacaaggacgatccggggcacagcacatagcatccgaaccgccaaggcgatccgagagccgtggggagttagcagctccctgcggctcgcctgcattatagcaaacgaaaacgctgcgcggaaggagccgatgccgcttatagcggttctccacaagagcgccgacgaggtgttgccgagagccgccggaacaccgccggggctttcgccgaaatgcgccggggtcggctgcacctccccgccggagtgcagtcaagcggcaggcccgcctaccccagcgccacatccagcaccatcatgaccaaaaaccccgccatgacgcccagcgtgcccacgttcgaatgctcgcccaggtgcgcctcggggatcagctcctccaccaccacgtacatcatggcgccggccgagaacgccagcatccacggcatgtacggcgatatgaggcctgcgaacagcaccaccaggatgccgaacacaggctcggccagacccgacaacgcccccagcccgaacgctttcggcgcgctcataccctcctgcagcatgggcagcgccacggcggcgccctcggggatattctggatgccgatgccgatggccagcgccaccgccatgccgaacatggccgggtcgccgccgttctgcgctgccatggcgaacagcaggcccacgctcatgccctcgggaatgttgtgcagcgtcacggccgtgaacagcagcgtgggccggtcccacttgctcggcaggccctcgggcttgctctcgcccggatgcaggtgaggcagcagctggtgcagcaccatgaggaacgccacgccgataacgaacccgcccgccgcgggaatccaacccacctggcccgcctcctcggcccgctcgatggcgggtatgagcagcgaccacaccgatgccgcgatcatgacgccggccgcgaaccccagaaacgcccgctggatagccatgctgttgcgcttgcggaacaggaacaccgaggccgcgcccagcgtggtcatcaggaacgtgaacccggtgcccgacgcagcccagagaagcgcggtttgcatgagcgccctcctatcgtatcgctcgcccgccgcaggagcgcagcggcaggcgccttcatcttcgaagcatcaagtgtaagccttttcgtcggcttaagcgtccgcattttcccagcgttaccgagctgccccgcacgttgtgcgcctcttggtggggggggcggggcttgctccttgaggcctccgcgggcatcgcgaatgaattggccgtggcgagttcgagcgccgcaggtgagcagcccgacgcaaacgcaggcgctgcgagcggctggccgccggtgagcacaatgaggccgggggaaccccggcctcatcgaaaggaatgccgacagcgtgcttggcgtatcctcaacgtagctcacccacaagccctgccgctctgcggcgccgcaatcatcacgagactgtacttggcgaagatagtcttttccgcttaccattgcgtttggttctactgtcggacaagccggattataggctcttttccctgcaaactgaaccctttcggcttcttttgtgcacgtgagcaatgaaaccgttacgatcgtcaaccgcccgtttagtccccccgcgacccgcctttcgccccgcccggccgagggcgcttcgccccgccgcccttcggcgcccaatcgcgcaggccgggaacggcgccgccggcgatctcccacaggtagaggctcgccacggagccgtacggcgagtagcggcggcggtacttcgcgaacagctcgggcgtgatacggcgatggtggtgcagcatgcgcaggccgcgcagaatggccaggtcgccgtagctcatgatgtcgggccgttgcatcgagaacgtcatgagcatctcggccgtccacacgccgatgcccggaagcgccgacagccggcggcacacctcttcgtccggcaggtcggccagccccttcagatccagctcgccggctaccacgcgctcggcggcgcccttgatgtagcccaccttccgaaacgacaggccgaaccgctgcaattcgtcgtcagggcaggcggccatggcctcgggcgtgatgtcgccgaacgcaccggtcaggcgcttccagatggtgacctgcgcctttgtagatatctgctggcccacgatgcagttgaccagcgccgcgaacaagtcgggcgtcacttcgcggcgcaccggcccgatagcgtcgatggcctcggccagccgctcgtcgcgcgccttcaggtaggcgatcgcctgctcgtcgtactcgaaataacgctgctctcccatgggggctcctctccgccgggaacggcgcaccggcgccgaggacgcgcgggccccgcacggccccgccttcggcaccagtataaccggccctggcgcgcaaggcgcccgcgaaagcggacgcaggacgttggcaggacccgaccgatacgcaggggcaacggtcgccggacaaaacgccgcaccggccatagccagacggcgccgaaaggggtaccatcggacacgcagcgcagcgggcccgcaaggccgctgcgccgacagcagcaaaggcagagaggtgtatgagggggaaaccatgaaggaccatccggttcgcaactcgatctacaacgtgtacttcagcccgacgaaggcgactcagaaaatcgcctacgaggtggccgacgccatcgcggccgaccgcgacctcacgagcatcgccatcaacctgacgaagccgaagagccgtcccgtgcgcgccggcggccaggagaacgacgtgttcctgttcgccttccccgtgtacagcgggcgcgtccccgccgtgctcatggactgcatcgaccagttcgagggcgacggagcgaaggccgtggtcgtgggcgtgtacggcaaccgccactacgatgacgcgctgctggaggccgccgacctgctggccgagcgcggcttcaaggtcatcgccgccggcgcgttcatcggcgagcactccatggcgccgcgcgtgggcgccggccgtcccgatgccgctgacctggccgtagccgcgcagttcggtcacgacgtggccgccctcatcgagcagggcgcaaccgaaacgcccgccatcaagggcaaccgcccctaccgcgacggcatgcccgacacgggcgcgcgccccgccaccacggacgcctgtacgaagtgcggcatctgcgtgaagctgtgccccatgggcatcatcgacgccgacgaccctgccaaagtggcggacggctgcctgcagtgcaacgcctgcgtcaaggggtgcccgcagggcgcgaagcgcttcgagggcgagcaggcggcggccatcgtggccatgctcgagggcaactgcatggagcgcaaggagccggagctgttcctgtaaggaagctaggtggacaggagggacggggacggggcaaggcaaccttcccctcgtccctcctgtccctgcccgctagtccaggatggcctcgcccagcacggagtcgaagcgcacggacgtgccgtcggcgtaggccacgttccagatgcggtagtcgagcgaacggggcacgtcctcgtcggagagcgcgcagccctcgcctgacgtgtccacctcggtatcgtcgccgccttgcctgctggagaccgcgtcgccaccgtgcgcgggctcgtcggtgacgaccgaggccggcggcgcgctctcctcggcatccaccgccgcatcctcggccgatgcgtcggccgggtcgtcgccacggcgcagcgccgcctcggcctcggccagggcgtcgtccagctcggcgcgcgtaggctcctcggtctcgcgcgcagaaccctcccacgcgttctcgccatcggggtcggcagcggtccagccgctttgcgcctcgtcgtcgatgccggcggcctccgtcacggccgcgatgatgtccgaggccgaggacgagccacgctcctccttgccgattgcgcgcacggccgccgtcgtgcccgcaccgtcggcagcggcgcccgcccctgcgtcgccctgcgccgcaccggcgccctgccgctgggccgcgatgctcgcgcaggcgggaatgcggatcacctcgatgggatccgcgcccagggcacccgctcgcagcagggtgcgtgcccgccccacgtagccggcggccgcctccggtatggacgattccaccatgcgcacggcgattgccgggcccgtgccgaagcgcacctcggcccacgagaagggcagctcggggtcgccgttgttgcggcgggcatcgttctcgcgcgccaccagggccgacgtctcggcgaactcctcgtcgagccacgtggtgagcgcgccttcccacagcgggtcctccgcatcctcgtccaccgcgttcatccctacgtcgaactcgatgacgttcgcacgctgcgagcccttctcggcccgaacgacctccgtaggtgcgacagccgtgaagcgacgctcgatctcggcgtcggcgtcgccctggaagctctcctcgtcgagcacgatgttcagtttcagttcggggtggatcgatgcgggcatggcggttcctttcgtcgaccgcggacgggcgcgcccgcgggatggttcggtatccgctgcattgtcgccccggccgtaggccgccgagcggttgggtcgcgagcgtgacgcaatcgttgcactcccatcacccgcaggcaaaccgtcgaacggggtgcgcggcagtcggccgctataagcgtcaacgtattcagcaggttacatatcggctatactggaacggttggcacactacggcgtcggcgatccttggggagcgtcggcgagggacgggggattcccatgcacgacggcgaggagaacatcaccatcggagcgctcatggagggcgtgtacgccctcttccgctcgcgcgacgactacgagtccgtgtcggagacggagcacgatctggtcgcccgcatccagtacgcctcggcggtggtgcaggccgagaaggtcacgccgcccggcgggtgggatccatacggtcgctaggtcgtgcaaaaaagggccgccgatcgggagggagaggatcggcggcccggaaaaggagcggcgagcgggcacgacgcccgctcgcctgccccatggctagaggtcgaggctcgggatctcctcgtcggcgttgccgcccgcggcgttgatgcccgcgatgcggccgaacgtcacgcagcgtccgtggccgatgcccggcacgtaggtgggatagtctcccgcgccgaagaactcgccggcggcagagccgcacacgtacaggccctcgatgggctggtcctcggcgtcgagcacctgggcgtccaggttcgtgcgcaggccgccgcacatggtgagcatgctggcaaccagcttgccggcgtagaacggcgggtcgacgaccttgcccatgacctcggggcgcttgccgaagtccaggtcacggcccagatcgcacagctcgttgtagcggtcgaccgtggccaccaggttctcgggcggcacgcccatcttctccgccagctcctcgagcgtgttcgcctcgaccgtctggccgctctccagctcgccttccagcaccttcttctgcgcctccaggttgtactcgccgcccacgggctgggtgagctggccccactgcaaaccgccgcccaagccggcatccatctgggccttcacctgctccaggccgtgggaatcgtagatggtccaggcgtccttcttcgtctgcagggccttcgtcacgctcttggactgggtgttcacgtcctcgttcttgaagcgcttgccctcccagttcacatggaggaagccgtagctggccgcgccgaagtccaggtgcatgaccgccgcgtgcggctcggacttctgcatggcgccgccggcccagatggcctgcttgtgcatgtcgccggtgtcgcagtcgggcgggttgtagaagcggccgtccatggcgtaggccgtcatgggcgagtagtactggaacatctcgttgtcggccgcgtagtcgccggaggcgatgatgaccgacttggcgttgatctgcgtgtactcgtccttgccagtggaaacgacagcgcccgtcacggggccgtcgccgtcgcgcacgagctgctcgctcttcgtctcccaacggatctcgccgcccatgtcggcgatggtctcgtacagcgccggcaccagcaccgcgttgccgtacacgtcgcccacgcccgagccctggtagaacgtgaagttcacggtctcctcgtacttgtcggcctggtagaagatgtgcgtgaccgggtactcggtgtagtcggggcccttgtagtagccgtcccacaacagcgcctcgaggcccttcttcgtggccaggtcgtacagccagtcgaagcacgcgccgctcttgtgcgcgaactcccacagcagcggctccttcacgcggccctgcgcccagttgatccagcggcgaacgacgttgttgtagtcgggctcctccacgaggccctcgccggccagcttctgctggaccttggtgtggaagccggcgatgtgcacgccgcgcgccaccacggtctcggggttcttgtcgatggtgatgaccttcgcgcccttctcgagcgccgagatggaggcgcagcagcccgcgaggcccgcgcctatgacgagcacgtcgcactcctccgtgcccttgatcttgtccttggcgatgggctcgggcgctatctcccagctgtgcttgccggccacgtcggggccggccgaggcgccgctctccgccaccgggatgccgccctcgccgcccgcggcggcgtcggccttggcgtcggacttcgactggggcgcgcagccggccatgccggccatggccgcaccggcgagcgccgtgccgcccaggcccaagaacgcgcgacgcgacaggcccttcttccccatgcccttctcttcctccatgagaatccctccttgattcgactcgcgaacccggcgcgccccttttgcgcaccggagcgcagcgttgccgctgcccgcaggctcaccttaaagccgacactgcccgtcatcaacccgcaggcagggggaaatgcctccccacgtgcatttccccctgccggggggatgcccgcacgcgtccggtcaggctaccctgcgcgcggcgggcgctgcgcgctcgcgaggcccggaacaacgccacgggccagaggcatacaagccggacggtcagcctgcgagcagggcgcggcacgcgacctaggcgctataatgagcacggggagatcagccgcgccgcgctccggcgcttcgcggcccgctacgggagggagcggcgatgccgtcgttcaaggacgagctgtggcgcacgcccgatctgctggggttcgcggcgcattggatctggatatggtgcgtgttctggagctcgctgttctacggcgagggaacgctgctcgacgtcttcagcggccttgccggcccgctcgcgctcgagccgctgtgggtggtctcgctgctggcgaacgtcgtgaccatcgcgtttctgctcatgctgtcgtacttccgcaacccgctggccgatgtgcgctggctgccccacgcgggtggcgcgctcaccgccatcggcacgctcgccctctcgcacccggtgctcgtagcaaccggcggggccgccgcgccggtctatctggcaggcgcgctggtcacgggagtgggcagcgccatcgtggtgatgctgtgggccgagctgttcgcctcgctcggatcgaagcgcaccgtgaactactccgtggtcgccctgctcatcgccgccgtcgcgtacttcgccatccggctgctgcccgtcgacgcagcgcagctggccgtagccctactgccggcggcgagcatgggctgcttcctgcactacaagcgcagcgtgccccgcctgccgcggcgcgagcgcaacgtgcgggtgaaggcgcgcccaccgctgcggctcgtgaccgtggcgctgtttttcggcgtgtcgttcggcgcgatgaaaggcctcatggcgccggtggagagcgattggctggccgtgcgcgacctgctgaacatcgcggccatcgtcggcgggtccgtggccatcttcgcaaccatgagctgggcgaagatggacttcgaccacctgacgtaccaggtggccctgccgctcatggcggcgggtttcctgttcctgccgctgcacgaaccgtggaacgtcatcggcacggcggtgcaccaggcgggctaccagtacttctacatcgtgctgtgggcgctctggcccgtgctggcctcgcgcggcgtgccggcgggctggatagcgggttggggccttctttccatccagctcggccagttcgccgggtcgatcgccgcggcgctggccgtgagcgtggtgaacaccgacctggggatggccatgctctcggcgggaatcatcttcgccatcctcatcatcgcgctgttcgcgctgggcagcgggcaggccagcacgggctggggctacgtgaagcccatggaggaggccgatgccgccaccgacttcgagaaggccggcacgcgcatcgcccggcgctgccgcctgtcgccgcgcgagatagaggtgctcttcctgctggcgaagggccgtaaccgcgcctacatcagcgaggagctggtcatcggcgacgagacggtgaagagccacgtgaaaagcatttaccgcaaggtggacgtgcactcccagcagagcctcatcgacctgatagaggccgaagcgcgcaacgcctgagcgacgccgcgccggaacctgccggacacagccacctcgacctgcacgctcatgggcgcgcgatgcgcatcatccgccccgtaaccgtccgcccatcgggttatggtatcgtgggtgcctgcaagctggacacggccggcgcggcgcgcgccggcatgggcacgagaggtaccgatgatgcacaaccaccgcgacgagcgaagcaacgccgagacggatgccgagctcgaagccgagatagaggcgctgacgtcccaggaagccgaggcggcggcaacgctcaagaagaagattcccctgccgctcaaagtgttcgccatcctgtgcatcgtggcgggcgtcgccatcctgcccatgatcgggttcgtcatcgtggccatggtgatcgcgttccgcgagggcgcgctcgcagacgactcgacggcgtccacggtgctgttcttcgcgctgctagccatcctggccctgctcaccgtggcgttcatcgtgttcggcatccgcctgctgcgcgacaagcgacgctttgcggcgcagaccgccgagctgctcaccggcctcatggtggccggcatcctgtgcgacatcatgctgttcggcctggacggcaccgtgctgttcttcgtggccttcatcgtgttcctcgtggtgctgaccagctacctggacccgtcgctcgccgacgagcgcgagctccagcgcaagctacgcgacatggagacgcgcgaggacgccgaggacggcacgctcggacgcgacgagacgggcaaggggttcatcgcgctcaacttcttcaacctgttctggattttcacggtgtgctgcgtgctggggctgatcatcgagacggtgtaccacttcgccgtggtcgatcccggccactaccaggaccgcgccggcttgctattcgggccgttctcgcccatctacggattcggcgccgtgctcatgaccgtggcgctgaaccgcttccacgacaagaacgtcatcctcatcttcctggtgagcgccgtcatcggcggggcgttcgagtatctgaccagctggttcatgcagttcgcgttcggcatcgtggcctgggactactcgggcacgttcctgtccatcgacgggcgcaccaacggcatgttcatggccatgtggggcgtgctgggcgtggtgtggatcaagctgtgcctgccctggatgctgaagctggtgaacctcataccctggaactggcgctacgccctcaccacggtgtgcgcggcactcatgatcgtggacggcgccatgaccttgctgtcgctggactgctggtaccagcgcatggccggcaagccctccgagaccgccatggcccagttcttcgaccgcaacttcgacaacgagtacatgcaggagcgcttccagagcatgtcgatagacccctccaacgccacgcgcgcgaactaggccggatctctcgggaagggggcgtgattccgcccccttcccctcccctacgagcccagcatgatcctgatgatctcgtcgttggtggcgcgcatgccgtcgcggccgaggcgggcgatgctgtcgatggtgttctccacgcccttcttcacgatgccgtcgccgccgtagaactgctggccgtcgcggtacatcacgtagccgaggatgccggcgttcaccgagaaggctatcttgccggcgcacgagggcttcgcgccgtcgcacaccatgcccgccacgatggacagcgcgttcaccacggcgtggcaggcctccttgtagccgccgccgtccagatacgcgatgccggcgcccgccgccgcgcccgcgcacaccgcgccgcagaacgccgacagccggccgatgcccgtcttctgatggatggccacgaggttcgagagcaccagcgcacggtagagctgctcgtcgctcgaccccagctcgcgcgcgtacacgatgagcggcaccgacacggtgatgccctggttgccgctgcccgagttgatgaccaccggcagctcgcagccgctcatgcgcgcgtcggacgccgctgcggcgcacgcgcaggcgcgcaccttcacgtcgtcgccgtaggcgcccagcatgacgctgccgatgttcgcgccccagtcgccggccagcccctcgtcggccacggcgccgttgcaggcgatctgccggtcgagcagctcgcgcacgtcgtccacgtccacggtcatggcgaagtcccagataccggccatcgaaagcaggccgcggtcggtcatgccctcggccgcgccgccctccgacgcaggcgcggcatcgcgcagcacctcgccgtcgcgctcctcgcgcacgatgttcgtgtggaagtcggcgatgcgcacgagcgcgctgcgcgccggaccgcccgccgcggccccggcgcccgcgccgccgcccgcggccccggcgccgtcggcagcctccgcggcgaacgcgcgcacgacgatgtcgaagtcgaggcccgagtcggcgcgctccaccgcgatgggcgtgcgccccagataggcgacgacctcctccacgtcggccggcgacacgtcggcgatcacctccaggctgcggccggcctcccccgccacgatgccggctgccgccgcggcctcgatgcccttcaagccgcccgtatggggcaccaccacgctcttcgcgttcttgatgatgctgccgctggccgccacgtgcacgcgggtcggctcggctcccagcagctcgcgcgccctcgccgccgccagcgcgatggcgataggctccgtgcaccccatcgccgcgataagctcttcttccaaaatggaaacgtaggcgccgtagcgctcgtcggtccgctccatgatccgccttcccgccggttacgattcccccatgatagcacgcgacccccgctgggcgcttaacgtcaaattgatgccggcaacaccgggagccgtcgctataatatgatgcaattgcgctcgcgcgctgaacaacaaggaggtccgcttgaagaagcggagtaggctgggcaaggggtttatcgtcatcgccttctgggtgctgggcgtagccatactcatgttcaccctcgcgcaggtgcgcgacttcgccggcatcatcaacgactcgggcgtcgtgcgcggcggcacgcagcgcgtggtgaagatggagctggccggccggccggcgccgtccaccgagcagcgcgtgacctcgctgctggagaaactggccgagaacgaggaaaaccgcctgtacaagggccccgaaacctacgagttcatggacaacctggccgccgtcgactcgcaatggaagctcatcgaggacgagatcgatgccctgcaccgcggggagggatccgccgagcggctgctggacctgagcgagacgcacttcaccctggccgacgccatggtgctctccgcccagaagcgcgccgagcgagacttcctcgtgacgggcgccatctgcaccgtgctgttcctcaccgccgccaccatcatgctgttcatgcgcaacgaccgcatctcgaagctcaagaccgcctacttcaccgacccgctcacgaagcgcaagaacatgctggccttcgaggagcaggggcagcagctcgtgtccagcgcccccgggggcacgtacctggtggcgtacacgaacgtgctgaacttccgctacatcaacgagacgtacggctacgagtccggcgacaagctcatcctgacgttggcccgcctgctggacaatgcctgccggcgcgacgagctggcgacgcacggcaacgcggaccacttcgtgctgctgctgcgcaacgacccgcagcgcatcgagaagctgcacgggcacatcgaggcgaagctgcgcgccacccccgaccttcacttcacgggcatcctctctttcggctgcggcgtgtgcgaggtcgagcagcccagcgacagcatcccgctcctggtgagcaacgccatagccgtgatgaaggagtcgcccgacaaggagggcatctcgcgctacgaccaggtgttccgcaacgccgtggagcttaagaaccgcatcgagcagcacgaggacgaggcgctggcgaaccgcgagttccagctgtacctgcagccgaagaaccatctggccgacggcgcgctcgccggggcggaggcgcttgtgcgctggaattcgcccaagctgggcttcctcccgcccgactcgttcatccccctcttcgagaagaacgggttcatcgtgcagctcgacttctacatgctcaagcgcgtgtgccaaacctatccgatgaccgtacccggcaccggcgaagcgctcgtggtgtccgtgaacttctcccgtgtcaccatcatgcgcgagggcttcatcgagcgcctgctgcacgtggtggacagcgcccgcatcccccacgaggccatcgaggtcgaagtcaccgaaagcgcgttcgtcatggacgaggacgcggtcatcaacaagctcgagacgctcaaggccatgggcttccgcctggccatggacgacttcggtaccggctactcgtcgctcaacctgctgcgcaaactgcccatcgacgtgctcaagatcgaccgcggcttcctctccgagaacaccgacccgagccgatcgcgctccgtgctgaagggcgtgctggacatggccggcgacctcgggctggtcaccgtgtgcgaaggcgtggaaacggaggagcaggcctccatgctgagagagctgggctgcccggtggcccagggctacgtgttctccaagcccctgccggagggggagttccgcacccgctacggactttgagggccgaaccgcgcgttgaccgggcacggcgatacccgactattttcatagccatgcaccttttctcaggcgacgcaccgtacaaccggatacaatgggagctgttctccccgcagcacccagtccggcttcgggagatcggccacctcggttaggagcaggtacatgggcgacgacgcttcggggaacccttcgacgcaccggcacacgtacgtcatcgaccgcgaccatcgcgtcgtgtacatggaccaggcagcgcaccgtgccttcccccgcggccaggtgggctccatctgctacgaggcgttccgcggcgcaagcgagccctgcgatgactgcccctggcacgggcacgagagcaacagcggggacgccacccagaccgtcatcttcagcgcgcggcgcgataggtggtacgagatcacgtgcctcgaggttgactggttcgaccgcggcccctgcgtgctgttctcgggccggcccgttgacgaccggagccgcagcctgttctccacgctgagggagccgtcgtcctacgacgagctgttcgagatcaacgtgacgggcgacacgtacaaggtgctgtaccacgagcccggcaagtacgccatgccgccgctctcgggagagctcggcgccatgttcgacgacgtgttgaggaacatgatcaatcccgaggaccgcgagcggttccagcggttctgggacttcgacaccctgctcgagcgtatcgaggaggaggacggcgcgctgcgcggcgagttccgcaagctgcggtgcaacggcagctgggggtgggtggcgcagaccgtcgtgccggtgaagcgcggcgagggcggcgagaccgtggtcatgtgcttcatcgccgacatcgacgccgaggtgcgcgcccgcgaggagcacgccgagaacgcccagataaggcagcttcgcgaacgtgaccagctcaccggcatctacaacgccgccacgttctacgcgaaggccagcgcgctgctcgaagcgcaccccgagcgctgccacgaggcgatctacctggacatcgagcacttcaagctgttcaacgagtggcacggtcgcgaggccggcgacgagatgctgcgcgccatagccaatcgcctctccaacctggccgagcgctacgagggcgtggcgggctacctgggcggcgacgacttcgcgctcgtgctgccccacggcaccataaccgaggacgccgtcgaccgccagctgaagctgccgcccttcgactccgaggacgccatcgggttccgccccgccatcggcgtgtgctccgtcgaggaagcgggacgctccatcagcaccgcctgcgaccacgccatgctggccatggccaccgtcaagaacacgtacgccaagcgcgtggcctggtacgaggaatccatgtccgaagagctgaagaacgaggcgaagctgctgctggaggtgaagcaggcgctgaagaaccgcgagttcgtgccgtactggcagccccagtgcagcacccgcacggggcgcatcgtgggcctcgaggcgctcgtgcgctggcagcacccggagcgcggggtggtcatgccgggagccttcatccccgtgctcgagcgcagcgggttcatagccagcctcgacctgtacgtatgggacgaggtgtgtcggcacctgcgctcgtggatcgaccgcggctgccggcccatccccgtgtccgtgaacatctcgagggccgacctgtacgccatcgacgtggtggacacgcttgagggcctggtgggcacgtacggcctcgaccacagcctgctggagctggagatcaccgaaagcgcctatgccgaggaccgaaagatggccgaggcggtgagcaggctgaaagcgctcggcttcaccatcctcatggacgacttcggcagcggctactcatcgctcaacatgctgaaggacatcaccgtcgacatactcaagatcgacatgggcttcctgaaccgcaacgacaacacgcgacgcagcgagagcatcctcgaggccgtcgtgtccatggcccgcctcatggacctgcgcatcatcgccgaaggcgccgagacgaaggaacaggtgggttttctgcaggacatcggctgcgactacgcccagggctactacttccaccgccccatggacaccgagcatcttgaggccctgctcgcccagcccgacgccgtggacttccgcggcgtgctcgcgcccatgatggagcttatcgacatggacgccctgctgaacgagaacgagacgagcagaaccctcgtcgacaacctcatcggcggcatggccgtgtacgccgtctaccccgaccgcttcgagctgctgcaggtgaacaactcgtactatcgcgtgaccggttgcaacgccgtcgacctgcacgagcgccagcggtacatcttccgccaggtgcaccccgacgaccggggcctcgtcatgagcctgttcgagcaggccgagcagcaccccgtgtcgggctccgagggaacgatccgccgctaccgcctgtgcggggacctcatgtggctgcacatgaaggtgttcttcctcagacgcgagcaggaccgcagcatcttcttcgcctcgctttcggacgtgacgggccagaaggagcaggagctggagctgcgctcttcgcaaaccgcgctgaacgacgtgctgggcctgccgtccgccgaaagggcgctcgacgacatgtcgtccgaaaatcgccaggtggcagcccagatattcctggaaaacgtgccgggcggcctcatagggggctactgcgaggagggcttccccatcctgttcgccaacgaggagatagcccgcatggcgggctacgacacgtcggcggagctcatcgaggcgctcgacggcaaggtgggcaactccatccatcccgacgacctgccgcacgtcatggaggacatcgggccggactactacgagggcctcgactacaccacccagtaccgcatgccccgcaaggacgggtcctggttctgggtggccgaccacggaagggtcgtccgaacgaagaacggtcgcctggccatcgccagcgtctgcctcgacatcgacgactccgtgcgcatgcagcaggaactggccctggacgacgagatgctgcaccgtatcatcctccaggccagcctgaacgtgtggatatacgacgtggagcacgaccgcctgacgttccagaacctctcgtccgacgggttggcggcgctgctggcctccgcggaccgctttgcccccgagcagggcgctgcgaccgccgaccgggcgggacgcatgctcaggcgcctggcgcgcgaggccctgcacgacggcgtgcccgtccgcgagatagaggcgctggccgaggacggcgacccaacccggctgcgcgtaacctgcgaggccgtgcccgacggcaccggcaggcccgtgcgcgtgatcggctatatcgagaacgtcgcccagagcggccccgacacggaaagcgatttgttcgagatgctgaagggccgggccgtggaccactggtgcgtcaacctgcgcacgcacagcttcctggacgcgtcggaccgccgggcgtggaggcgggcggtgggcgccgtgctggaggactggacggacaccacgccggccgagcgcatcgggcgcacggtgcgcaccgtgaaggacgcggaggcggtcaagtcgttcctcgacttcgatgccatgctcgcacgcttcgaagacggggtgctgttcgactcgctggagtaccgccaggaggacgagcggggcgagcgctggatggagctgggctaccgccttatccgcatcgaggcgggcggcgacgtgtacgcctacctttccgtgaccgacatcgaccggcgcaagcgccgtgagctcgatctggaggacaaggctcgccacgatgcgctcacggggctgctgaaccgccagaccggcgcggcgctgctgccggaagccctggcgaagacgctgcgcaagggcaccgcgggcgcgttcgtcatcatcgacttggacgacttcaagctggtcaacgaccgccacggtcacctgtccggcgacacggcgctggccgacgtgggccggcacctgcgcagcgcgttccgaaagaacgacctggtgtgccgttggggcggcgacgagttcatcgtgtactgcgacgacatcacgcgggccagcctggcgcggcgcgtgggcacgctgtgcggcaagccgtggacgaccaaggtgaggggcggcaccaccatcgaggtgtccgcctcggccggcgtcgtgctcgtgcccaagcagggcacggagttcaaaacggtgtacgaccgcgccgacgcggcgctgtaccgggcgaagtcgatgggcaaggcgcacttctgcttctacgagcccggcatcccgtcgcccctcgccgattgagcctgggcctacacgcccagccccaccgtcaggtgcatcatgtagaacgcgaagcgcatgacgaagatgccggccagcacgagcacgcacgccgcgctggcgcggccgacgcccagggagcgccggccctcgagcgcgcggtttagcaagacctgcgcgtcaaggccgatgcccgcgagcgccagcacgccgaacgcggcgatcatgagaccgtagtacggcacgaggtccgaggcggcgaggaacgcgttcgcaatgcgcggcaagtcggcgctctgcagcccgaacgacacgaggttcgcggcaagggccgccgccgacagcgccagcagcgtgcgcccgaaacggccgcacgccggctcccaacgcgcggcgcgcaggcccacgagcgcaagaaccggaccgcccaccagcgcgttcagccacaggttcagcggcacgtacaccgtgtaccacgacacgatggtctcggcgctgtaggcgaaggccacggacgtgacgaacacgatgcccgccgccatggccagcgccatccaggggcgctgcagcccgacgcgcggctgctcggcgaacgagtagagccagtaaacccctgccagagccaagaacaccacggcgcagaacacctcggtggaaagcgggctgcggcccactcccaggaacacgtagagagcgttcgccggattgcccaagtgggtggccgaggccacgagccccaccatggtggtgaccagcggtatgcttagaaactggttgatgcgctgccgcgcgtcggccggcatgcccgtccgaagaagcggcaggcccatgaggatgaacgcgacgacgcccgacggtgcgagcgtcgtgaacaggacgagcgttatctcgcccagcgccgtgcccatccccgacagcatggccccctcctagcggtagaaccgcgggtaggccacgtcgagggcgcgctcggactggatgccctcgaggctcgccttcgccaggcgcgctagtccctcgtagaacggctgctccgcggcctcggccagctcgtccaggaagtgcgacgaccacggcagcaggtgcaggcgcaggaagtcgtccaacgcctcgggacggttgcgggctatccacgccatgagcacgagcatgaggccgatgtggtcctcgggggtcttgtcgtccacgagccgctcgataccctgcgcgcgcatccaggcgcgcagcgcgagcgtgctctcgccgaacacgacgcactcgcggtcggtgtacaccgaaccccacggcggtgccggcttcggcgccgggcccacgaacaggcggcggtactcccacaccaggtcgtcgtcctcgacaccgcgcgcaagcccctctttcatgagcgccaggtcgccatgcgcctcggcctcttccgcgaacggccactccgcggcggctgcatccacgtcgagcgctgccagcgcctggaacgctgcgccggcctcgcccgtcttcgggtcctgcaggaagaacggccccagcgtctcgcccacgaaggcgatgccctcgagcatgtcccggccgtcctgcatgttctcgtccatagttcgtcccctccgtcgaaaccagcaaggtacgccacattgtagcgtaccttgcctccgtcaaagtattcgtttcggaaccgtgccggcgcgccttccctagaagctcaggcccacggaaagctgcacggcatagaacacgaggcgggcgacgaagatgccgatcacggccatgaccgctccgaaaccggccatcgccaccgggctcttgcccagaagcgctgccacggtgcccgccgccgccagcacgaggctggcggcggccaccgcaaggtagatggtgacgtctgccacgaggtcggcaccggacacgagggcgttctccatgccgcccacgcccatgacctggacgcagaacccgccgatggcgagcaccgcgccggctgcggccaccacgatgccggccgtcttgaacgagcccttaagcgcatcggggagcgcgccggcaaggcccagcaccagcgtgcccagcggcataccgcccagcagggcgaagcccagcagctgcaccaccacgagcggcgagttccacgaggcgatggtctccatcatgtaggccatgccggtgaagcaggcgaacacggcggcggccacggccaccacggccacgaagcccttgcgcgcgccgccggagagcttgccggccagtgccaggatcacgtacaccagggccagcaccacgaacagcgagcccacgaggatctcgttcgacagcggcgaggagccgatgccggcgaacacgcccgccgcgtgcagcggagaggccaggtggaagaacgaggcggcaaagcccacgagcaccacgacgaacgggatgagcgtcatgcggtcgatcttcttcacctggtcgtcggtgaacgtcgtggtgaagaaggccagcgcgagcgcgatgaaggcgccggcgcccatcggggccagggtcgtgaacagcgccagaggcagttcggcgaatgcggcctccatgctacatcacctccagggggttgacgaccttgccgtcggcgctgccggcaggcttggcgtccgcggaaggcttgatgtacaggttcgggttcgtgtagtgcggctcgggcagcggcgcgatgttgccgcgctcgcccaccttggacatctcctccaccgtgccgaagtcgagcgcgcgggccgggcaggcctccacgcacaccggcttctcgccggccgccacgcgctcggcgcagccgtcgcacttcacggagtggcccttggagcggtccaccttcggcgcgttgtacgggcaggccatgtggcagtagccgcagcccacgcacttgtcggcgtccacggacacgaggcccgtctccgcatccttgtgcatggcgcccgtggggcacaccttcgtgcacgccgggtcgtcgcagtggttgcacgacagcgacagcgggtagctcgtgcacgtggaggtgaagcagccgttggcgtccctcaccgtctcgccgctcgtcacctcgtacactttgcggtacgcgacgcccaggtcaagatccttgtaatccttgcaggccatctcgcaggtcttgcaaccggtgcagcgagtgccgtcgaaagaaaatgcgtaatgcgtcatgatctatcctctcctttcctcgccgctatgccttcacgacttcgcagatgttcgtgtgctgcgggttgcccttcgacaggggcgagggacgctgggtcgtgagcgtgttgatgctgccgcccttgtccacgcggtcgcccgccatgtcggcgtcgtgccacgcaccctgggaaaccgccaccgtgccgggaaccacgcggggcgtgaccttggccaacagctcgatctcgccgaactcgttcttcacgcgcaccgtgtcgccctgctcgatgccgcggggctccgcatccaccgggttgatccaggcttcctgcgggttgacctccttgagctcgggcatgaagccccacgagctgtggatgcggccgcggtagtggaagccggacagcgcgagcgggtactcgtcggtcgtgttctccacgccgtaccactcgggcatatacacggggatcggcggcatggtgtccagaccgggcagcgtgtcgtcggcctcgagctcccagccctcggtgaacttgagcagcttctcggagaagatctcgatcttgccggacggcgtgtccagcttgttcgccaccgggtcgtcgcggaacttcttcatggacaccaccggcgcgtgctcctcgatatacacgcccatctccacagcctcatcccaggtggggagcttcgggctcttctcgcgcgccttctcgtactgctccttgatgcgctcttcctcggtcttgccctcggtgaactcgtcggccacgccgaacttctcggccatgagcgtggccatctcgtaggcggtcttgcgctcgaacttgggcgacgtgcaggccgtgcccgtgatcatgtagcccgtgtcggagccggtggagatctgcgaggtctgctcgaagcggaacaggtcgggcaggatgacgtcggagtacttcagcgagtcgcacatgaccgtgtcgatgcccaggatgaactcgcatttgctctcgtcggccaggacgtcgtgcgccttgttgatgtcggagtgctggttggtcaggcagttgccggcgtagttgatcatgtacttgatgttcaccttgagcgcgtcggcgttcttcacgccggcgttcttcgacgtcatctcggtaccatggtcgatggcatcggtgaacaggaagcacgggatggacgtcttcaccgggttcttgccggcatccatggacacgctcgccgggctcgtgcggtcctcgcgggtgccgttgttcgtgccgggcaggccgatctggcccaccaggcagggcagcgccatgatggcccaggccgtccactcgccgttgctgcggcgctgcgggccccagccctggttcacgtagaggggcttcgtcgtgccgatctcctcggccagctcctcgatgcgctcggccgggatgccggtgatcttggcggcccactcgggcgtcttctccaccatgtcgtagccctcgcccatgatgtaggcgtagtaggacatgttcttgccccgataggcctcgggcatggtctcctcgtcgtagccctggcagtacgtgtgcaggaagtccaggtccaccaggtcgttcttgataaggtagtgggcgatgccggccacgagcgccgcatcggtgcccgggttgatgggcagccactgcgcggaatggcccgagatggagtcgttcatgcggtagtcgatcatgtagatcttcgcgcccgtgcgctcgcgcaggtgcacccagtcgtagtgcgtggtcaggccgccctggcgcgtctcggtggggctggagccgaagataagcacgagcttggcgtcctcggccgtcttgaacgagctgccgccgttgcccttggagccgtacatatacggcgtgatgcaggagatctgcgccgtggagtagctgttatagaagttcagatagccgcccacgaggttcaggaagcggttgaacggacgcgacgtggtggccgacacgccggtggcgtagggcacgtacacagcctcgttgccgtacttctcgatgacttccttgagcttcgtggccgcaaggtcgatggcctcgtcccagctgatctgctcgtatttgccctcgccgcgcttccccacgcgcttcatggggtagttgatgcggtcggggctggcgagccagcggcggtagctgcgaccgcggaggcaggcgcgcggctgcgggtcgtcgaaacccgcatccttgctcgtgtaggtgtccacccacaccacttcgtcatcctgcacgtggaacttcaggctgcaacggcccgggcagttgatggcgcaatggccccacgtgacggtctcctcggcggcggcatgcgcttgcggcacgcccgccccgaagagcgtgttcgtggcggcgacgctgccgcccacggctgccagcgcgccgagcgcaccggtcgtcttcatgaacgtacggcggctcagactcggcatgttgtctgacatgacactcccccttcgatagtcctcgatgcgccctgcgcctcccgcgccggacgccctgccggttccgccttccgggttccccccaagacggcaacggctccataacggggcctaccatacccttatcggagaaaacgcgtgtcacataaaatgtgggaactttgagtattcgcaggtcaaatgcctgcatgtgaggggtgtatgtgacaagttcgcaccgccgcccctaagcctcaacgcagtgcgctcagcagcgccggcggcgccgtgagcacgaggctgggatacgtggcgtcggcgggtggcagcggggggatgctcgcaagctcgccataggcggcttggaggtcgcctatctcgccgaaatggagcgcgtcttcgggacaggcttccacgcaggcgggctgcctgcccgcctctatgacggcggcgcaggcatcgcagatgacggccacaccgtggcgcgggtcgatcttcaccacgccgtaggggcacgcctgggcgcagtcgccgcatccggtgcagagcgcggacaccacgcgcatgaggccggtccccggctgcttgcgcaacgcctcctccgtgcatacggccatgcaggccgggcgggcgcagtgcaggcagcttaccgagatgaagtacgcgaacaaggtgagcgagcaggtgccgtcgggcgcctcctcccaaacgccgccttcgtacgaggtcacggtgcggcaggatagctcgtccggcacgcggcactgcgcgcagcaggcatccacgcaggcgcggcatccgatgcagcgcacggcgtcgacgtgaaatccataggacacgttgttcctttcatcatccccctccgctccacaacccatcacgtcatggtatcggccgccgcttccgcaacaatgccggccgccagagcattcaacgaaccgtgggcgcaccgttgccccggtgtaacacgtgcaacggcccttcggcaggcacgggcgagcccaatcggctatactgcactcctgtctctcgtcgcatggccaatgaaaccgggggagccctttgcagccagcagccatcatccgcatattgaaaccgaacgtcacgtcgctcggctatgcgctgtttctggccatcaacgccgccggcgtatggggaggcgtgttccctttcctgcccttggagttccagacgcccgagatcgtgttctggttcttcctggcgcagtcgctcgtgttctcggcgagctacttcgccagcgccttcggcgtgtacttcctgcccaaacccacacggcgcttcatggtcatgctggccgccgcgccatacttcttgggttggtgctgcctcattgccgccatctacctggacgcatgggctttgccgctcgtggtgataggaggtggcctgctcgggctcggctcggcggggttcttcatgctatggcagcgcctgttcgccagcttcgacgccgaccacggcaaccgcgacctcatcgtgggcacggcctatgcggccatcatgtacttcgcgctgtacctcataccgcaggcggtcacagcctacctcatcccgctcgtgttcctgccgctgttcggcctggccatcgttttgaaaagccgcgagatcgaccgcgaccagcccatgttcgaggacgtgccgcgcgaccatccgcacgtgtaccgcaccgtggtgcgcgactactggcgcagcgcgttctgcgtgggggcactcggattctgcacgggcatcatgcgctccttggccatcggggagccgcaggtgggagcgctggtgaacgtgctgtccatggccggctcgctcgtggcggcggcgacggtgctggtgctgtggcagttcaagaacctgcgcatgaacgtggtgggcgcctaccgcgtggtgttcccgttcgtcatcacgtcgtttctgctgctgccgttcctcatggtggcgtatgcgcagtggctcgcggccatcctgtacgctgtgtacagcgtggcaatcgtgctcatgatgatacagtgcgcgcaggcatcgcgcgaccgcggcatcaaccccgtgttcgtgtacgggttcttcggcggcgtggtgtacgcattgcacgacgtggggttcatcggcgggtcgttcgccgagcagatcatggtgacggggatcgagccggtggccgtggtggcattggtggccgtgtacctgctggggctcatgtacttcgtggggcaaggcgggttccgccggatattcagccgcagcagcgacgcggagagcatcgagctggtggcgctgcggcccgccggagaggcggcgcggcccgccgcgaaggccgccccctctgcaaaggcagaccccgctgcgaagggcaagcgcgcccagcgcgcccctgtcgcaagcgagcccttctaccaggaccgcatctcgaagcaggccgagctgctgcgccagcactaccgcttgagcgcgcgcgagaccgaggtcatggagctcatcgcccgcggcaacaccgtcgcccgcatcgccgaggacctcgtggtgtccgagaacaccatccgcacgcattccaagcgcatctataccaagctggacatccataagaaacaggagcttttggacctcatcgactcgttcgacccaagcgagctggaaggctagggctgttcgcagggcgcatgcgccgaccgtacagcctgctacgcagaagcttcttccctcgcctactttcggctcgcggccgcgtcgctccagccagatgcgcccggggacagtcttcgctcttcccttctacggaatttcgacccctccgagtcaccgttttggccgctttgaagctcgctcggattcgatgagggcaatccgtttacgccgaactgggcaaacacaatctaaagccttggaacgccacgggagcaggtccccaacccaataaaaacgcttcagagcgatcgaaacggtgactcgggagagcgcttttctcgtgtattggggcagcgtgctttgacactgccctccataaggaaccgccccgcgagcagcggggcggtctcattcgtctttcacggattgaacgaaggcagagcctgtgcggaaccctagcgagcccaagcgagcctcgatctcgcgactttcggcacggtcccgacgaacgctgcgcctttagaactgcatggcgtagaacagcacgcgggcggcaacgagcgcagccagcaccgccacgttgcccaggaccaggtagggaacggccttggtcgcatcggtcgcagcctgcctgcgatagcgcgcctcgaggtccgggaccacgttgccctcggccgccgggctggcagctaccgaatcgacgctgttccacggcatggccgcagcgcccgcagtgctgccgaggggcgccgcggagcggccagagagcggcccgctcaacgctccgcgcatgcaggcgagcgccactacgaaaccggcgatggacacgataaggtacacccatgcgcctggcaaggcatcggcgccggggaagatcgcagccaccgtggcttgggcgttcatgagctgtaccgtgacggagaagatggacaccaccgcgcccacgagcgccgtgacgagcgctgccgtgccgaagcgcgtctcgcgcgcctcgggaagggccctcgaagcagcgagcacgagcattcccagcggcacaccgcttgccaggctgaagccggcgaacccgaggggcacgatgaccgaggcccacagcgggacgtccgacatcatgtaggccacgccgatggccaccgagtacaccaccgccagcacggccaccaccgtggcgaacgccttgcgcgcgccgtcggacagccggccgaccatggccacgacccagtacaccaacgccacgacggcgaacgccacggccatgaacaccgcgaacccgaacgccccgggatctatcccttggataaccagaagcgcgctttgcggcgtgttcatgaacgcgacggccgcgatcacacccactgccaggatgaccaggggaaaaagcgtccagcggtcgatgcgccgcaaggtctccgccgagaagcgcgtcgtgaggaatgcaatggccaagccgatgaacgcgcccgaggccatgggcgcggccgccgtgaagaacacgagcggcagttgcagatacaccagatccatagaaccaacctccttgaagcgctaggctccttcgaatgccgtcattatccgcggctatcgtaggcgccccggcggaggtggctccgaggtccccgccgattcctctaaggcgttgccgggccgaagcgctcccgcgatgcgagccttcgcggctcccatttgaagaagcggttcagcgcatgcgggcgccccggagaggggcgccaaaggatcttccggttttcaagaggcatttagcgcagcccgaagacgtcctggatagagtagacgccggcgggcttgccgtcgaggaactgggcgcaatcgacggcgccgcgggcgaagcagtcgtcgctgtaggagtagtgcgtgatctccaggcgctcgcccaggccgccgaagtacaccttgtggtcgctcgtgatgtcgccggcgcgcagcgagtggaagcccacgccgccgggcttgcgcgcgccgtggccgccgcggccgtattcggccagatcgtccagcgtggtgcccttgagctcggcgatcatggtgccgatgatgacggcggtgccgctgggcgcgtccagcttgtcgcggtcgtgctggtcgatgatctcgatgtcgcactcgtccgcaagagcgcgcgcggccgtctccacgagcgcgagcatgacgttcaccatcttggaggtgttgcatttgaagatgacggggatacgcgcgcccgccgcctcgaagcgctcgaactgctcgggcgtgaagccggtgctggcggtgacgagagccttcccgtgctcgacggccaggtcgagcgtttcaagacattgctccacgctggacacgtcgatgagcgcgtcgcactcgccgatgatcgacgcgaggtcgtccaccacggggatacccaagtcgcgcccgaggcctgccacctggccgaggtcgcggccgatgtagtcgcgccctgcgggccccacgccgccaacgagctccatgccctcgcgctcgtccacgaaccggcagatgggctggcccatctgcccatggcatccgacgacgatcaccttcataccgcgctccttccaaccgcgtggccgcatcgccaattggcacgctgcccattttcgcaagtataagcggtgcgagcggcaaatgacctatggcgagtcaacaaaggttgggtccggtcgccttccggtgcacactaatcaccgattattgcaaaatttgggcgctacccgctttccgcagtttcgccatcaggtactttcccgacccattccttaaagctcgccctatctcctgccttgagaccggaaaacggtataaaactggtgaatagtgtgcaccggaaggacttttagcgaccaacgagcacagccatcgggaattggccccgcgcgattgccacggtgccgccccgaacagcgactgccctatcgccccgagctgcggccctatcgccccaggcttcggccctatcgccgccgggtcaagcccgtccctgcggccctattccccggcgctttcctcgccgaacagcacgtcgaacaggcagcgcgtgatggtggcgcggcgcaccacgccgatgagcttgccgtcctcgtcgatgaccggcaccttcttgaacttctttttcgccagcacgtcggcgatctcgcctacggcctggtcggccgtggcgcacagcaccttctgcacggccagctccatgacgttgcgatgcttgagcgcgcgggccttctcctcgaaggactcgttgtcgtacagcaccatgttggcgtagccgccgccgaagatggagcgcgtcttctgcgcggccaccgccttcatgatgtcgccgtcgctgatgaaccccaccacgtgccggtcctcgtcgatgacggcgaggccgctcgtgcccaggtcgttgaacagggccacgatctcgccgaggttctggtcgtagcggcacgtgtacacgtcccgctccatgatgtcgcctatcgtgcggttcatcgtcccgccccttccgtcgcttcctccatgcacgcggccgcaacggcgaccgtcgccttcacaggcgcctcgacctccgtcttcccggacgccccaacttgcggcgccggcgcggtagcggtgcgcttcttcacgttgcgcaccttcaagatggcgatgatcagcgcgaccgccgccaccgccgcggagatgccgtatgccacgtcgatgcccgccgccgtggacgccacggggccggcctcggcgtttgccgcggtcaccatggtcatcaccgtcacgatgagcgccgtgctcaccgcgccgcccacctggcgacccgtgttgctgatggcgttgccgtgcgcgatcatgtcgttcggcagcgcgttgatgccccaggtggtcaccggcatgttcgccagcgtcagccccgaagattggatgacgtagaacaccacgaggtacgcaaccgtcgtcttgtcgtcgacgaaggacagcgccgccagcgagccggcgagccccgtcaggcccacgatggcgatgacgcgcgggccgaacctgtcgaacagcatgccgctgatagggctgaggaaaatggtggccacggcgccgggcgtcatgaggatgccggtttcgaacgccgtcagccccaaaacgttctgcaggtagatgggcaggatgacgctgcccacggccagcgccgagttgaccaccgtcacgatgacggccgagtacgcgaacgtgggcgtcttgagggcgcgcagttgcagcagcggctcgtcgatgtgcagctggcgatggatgaaccacgcgagcgcgaccacgcccaccgcgatgctgccgatgaccacggcgttgctccaacccagcgtactggcgctggagaagccgtacagcaggccgccgaacgcgaacgtggacaggatgatggacggcacgtcgaggtgcgggcgcttgagctcgcctacgttcgtgagcaggaagaagctcaccaccagcacgaggatggccagtgggatcatcgcccagaacatcatgcgccaaccccacgcgtcgatgatgccgccggccagcacggggccggccgccggcgcgcagctcatcacgataccggccatgcccatggccgtgccgcgcttctcgggcgggaagatgagcatgggcaccacgcccacgagcggaagctgcacgcctgcgccggccgcctgcagcacgcggcccacgatgaggagctcgaatgagggggtcgctgcgcacagcgccgtgcccacgatgaacgagacgagcgagacgaagaacagcttgcgcgtggagaaacggtcgatgaggaacccggtgataggcaccatgatgccgttgaccagcatgtagatggacgtcacccactgcgcagtgccggccgagatggaaaacgcgtccatcagcttcggcaacgcgggcgacaggacggtctggttcaggatggcaaggaacgcaccggccagcacgatgccgatgacggtgatctccttgcgggtcaccttatgctgctgggctatcaattgttgctcgttcaagagcgcatcaacttcctttgcgaacgcgtcgaagaccaagccgcgccgaagcggcggtcgatcgtcgagtatgggatttcgaggggaatgaaagctgccggggacgcgtcagcggacgcgcatcacccgagggggctcgttcagcgccaaccctgccacacgccgtagtccacttcgccatgcgcgcggaacgcggccgtgcgcgagcggcgccgcgaaagctgggcgaggctggcgtagcgttcgtataggttcagaagcgatttcatagcgggcaagtataccggaagccgaaacccccgtatcttcgagaaagcggcccgcttcaagcgatttccacaagatcggacaagtggtgtccgaggcatctgatcggaaaacgcatcaaagaacttcgaacatctggcgagatcgacgcggatagcattaagacgcaccgaggaatgccgccatgtaccccggacagtacactactccactgtcgaggattttgcagaccggagaatggatggtttcagggattttgcaaaccggaaattgggcagttttttatatttcgcaaaccatgtgcataactatcatgtacctattaacgccggtcgttgtcgagcggttccgggagacatcgcggcaagcgaagcggtcggtacataagctagcgcgttcgggcgacctgcctccggggcggcagggttcaagggatgccgccgcatttcccttgcactctgttccgaatcgacgttcttcgggttttgggcaccttcgagtcaccgttttgcccgctgtgaagctcatcgagccgtcacgaggcaagctgacgtctcgcgacctgcgcaaacgtgcgcgcatctcgcggaaagccgccggaaagcgtcgtcgtcggcatcaaatcgcttcacagcgggcaaaacggtgcatttcaaccgctcaaaaggcgaaggaccggcgatcgccatcgtcggcagcgtgggggcgcgaggggggttcgctcccgcgcccgcacgccttctacgctttccgcacttccacccagaggtcgaattgggccgcgccgccgccgatggggtcgcagaggccgccgcctccggcgagcgtgggatcgtcgggcagaagctcgttcatgcggaagccccggccgcggcctccggcgaagcccgtcttctgcttgccgggctcatcgccgtcgaggacgccctcctcttccaggtaatcgggcgcgggacccacctgctggccgtcgacggtcaccgctcgcgcgccgtagcccttgtgcccgaacgagtagttcgagcccaccacgccaggacggatgccctcggtcacgcgcacatggccggccatcgccccgaccgatccttcgatctccacggcgtcgccattggccaggctgcgcgcctcggcgtcggaagggtgcatccacacgaagttctcggtggtcgtctcgcgcagccagggcgcggcgatggtgcgatgcgagccgttcgtgcgggccttccagttgatgaaggcgagcgggcgctcgggcgggtgctccatcggcgtgccgtcggcgaacgccaccggggcggggtgcgctagcccgtcgaagttctctccggtcagagcgttcttgagcgaggcggtcttcggatcgtagaattggcacagcccgccgtagcgcgccttgatgagctcgccctcgtagccgtcgcccttcgccggatcggccgaggcgaacctcccgccgcggttgagcacgtacaccaccttcggccattcctcattggtgacggccgccttccacgccgccaggtcgaacgcctcgcccagcgcgcgcgtccgggcgcgctcgaacagcgcgagctcctcggagtcggcgtcgggcacgggctccttgcccgtgtaggcgatgttcgcggccatcttcagccagtagtcgtactcgttcgacagcgccgccgtgccacccgcgccgtccttgcccaccggcaccgcgccctcgcccacgcccggcaggttgaggcgcgccatgaggtccaggtacacgtcctccaccgagcgcgggccctcgtacgcccgcacggccggctgccccagctggatgagctggtagggctggttgggatagatgctctcctggctgaaccgctcgaggtacaccttgtcgggcagcacgaagtcggcgtagcgcgacgtgtcgcctatctccacgtcgaacgacacgagcaggttgatcttggcctggtcgcccagcacgtcgaccaggcggtcgccgcccggcgtggagtccacgagcgaatggcggtggatgaacagcgcgcccaggtggtcgtacacgtagccggcgcgcagcgcgggcacgatctcgtgcgagaggttgcccggcagcgggtaccacggccgcggcgcgggatagccggcctgcttgaagtagctggtcttctcgtactccaccttctggcgcgtgatggggatgccccagcccgcgtgcgcgtcgggcaccttcttcaaatcgtagcggccctcaaacggggcgaacttcgcgcccgccgccaggtgcccgcccttccagtcgtggttgccgatgaggaagttgaggtagcccgccgcccgcacggcgtcgaagccgttggcgtgcatggccgggccgcggtagctcatgacgcaggcgcgcttgccgtgcgaggtgaactcgcgggccacgtcggccaccacggcggggtcgatgtcggcctcggcggcgtactcctccatcgtgcgctcgcccacgcgctccttgagcagcgagaacacgcttcgcacgcgcgcgggcttgcccttgatctcgatctcggcgtccacctcgaggtcagccagacccgccacggcgtcggcggccaccagctcgccgtccgcgaacacgaagcgcgcgtcgcccttgagcgcctcgccgtccgacccggcctcgccggcgcgcccgagcaacttcgccgtgaccaccggtgcgttcggcaaatcgactgccacgaggtgcgtcgcgtcactccaggtgggctcgccgatgaccgctgcggcggccttgcccggcgcgcgcaggtacgcctcgtcgtagcgcccgttgtcgatgatccacgccatcatggcgaacgcgagctcggcatccttgccgggcaccacgggcagccacacgtcggccttcgacgcgctgcggccctggcgcgggtccaccacgtacagcttcatgccgcgctcgcgcgcgacggacaggcgcggtgccagccacgacggccccttgttggccgtcatgggctcggtgccccagatgatgaggcattcgcagtggtcgatgtcggcgtacatgcgcttgtggttcgtcgtggggtgcgtgcgcacgttggccatgacgccggtcatgccgcatacgccgccgtggttgaagttgttgaccgagccgaacccctgctgcgtgaggcggtcgccgatgaggaacatgcgatcgccgccggccgagcagaacaggttggacttcgggcccaggtcggggtgcgacgtgtcgatgaggatgtcggcccacttcacgtcgaacgcgtcctgggtcatctcgccggactccacaagcgcgacttcggcctccacctgcttcttcggcgcccaggcgtaccattccgcaataccgggcgtgccgagggtcggcgagccgtgcacgatctcgtcgagcgccgtgtcccagtccactgtttcccactcgtcgcttccgcgcgcgcccacacggcgcaacggacgggtgatgcggaaccgatcgtgcacgagctggacgcccgactggcctttgaggcagatcatgccgccattggtcgcgcggccctcgcgcgccatgccgtcgccgggagcgagcgcctcctcgggccgcgtgccataaggcacgggcgcgtagggctgcgagttgagcggcgagtacgggttgcccgcgatcttgcgcacgagcgccgtggccccctcgttggcctgcgggccgtcggccgcatcgcacacgcgcaccttgatggtgcagtacgtgttgcagttgttgcacatcgacaggatcacgtcgtcggccgcgtacgcgccggtggcggtgcctcgtccatgtggtgtgtcagtcataggatcgtcgcttgccatataagcccccaatccggttcctgccgccaaagcgcctaacgccaccgcgcagcccgcacccacaaccgcgcgccgcgacggcgtgccgaacacgcttgcggaattcggctcgatcataccgctcgcacaagagcacgcagacggcgttgctaccgttggcgcgtattccgcgccgacaccgcatgtttccttcgaccggccgtcgttacgctgcgcttccatcgcgcacctccttagccctcgagccttcgccgcacgatgacgcatccgcatcgggcaccgcctttgtatacgcgctctccagccaaacttctccctcactcgcacccatgcgctcgagcggcagcaaccttactgccaagccgtagcaacccacagccagccccagcacaaacagcgccaccatcacctcgccgaggctcggcacatagaccggcgtgggcataccagccaagagcggcaccgaaaacccggccaccaccagcacatagcgcaacgccagcacgcccgccagagccgccagcgcggcagccacggcccacgcgccgccagcactgccgcgatcggccccaacggcgccgccatcacgagcgccgcgcgagcgcgccgcgcccaccgccagcagcaccgctggcgccacgaggcccagcccgatctcacccagccagaacagcggcgccaaaggacctgccaccattgcctgtacgggggcagccaccgccgggtctcccgacagcagcgccggcgccacttggaagaatatgcagaacgccagcgcaaacaacgacgcggccagcacgcggttcaaccccacgagcacgccgccgtccggctgcgccccgcgcaagcgtgccagcaaccggtacgcaacgaccagaaacgcggccgccgtcacgatagccatgacgtagaacagcaccgacgtgatgccgccctcccacagcccgcgggttttcaccgcggcaaagaacatgcccgtgccgcccggaggccccacaaacgaggtggccacgcccacgccggccaacacgcggatggccaagttcacgttgccccgccgcctgagcacgtcggggctcgtcgcgcccgccgccgatgctttcacacccgacaactccgcacctaacgctcccgcgcccggcgcgtccgcgaccccgtcgccgcccgccgcagcctcggccgtgcgcttgtcgttcagcagcaccaacgcgaactgcacgatggcgatcaccatgaagaacacgtacgccttgatctcccaagccagcggcgacgaccagtggaagaacagcagcgtgcccagcgagtgccggatggcgcccaagtcgatgccgatgaagatcatcgacaccacaagcgacaccatgctcaagcccagcgacaggcgcgcgatgggcgcgaagcgcggcagcctcagcaggtacaccaaagccgacagcaggtacaaaccgcccgccagccccgagaaccagatgtacaccaccacccacaaaccccagggcacggcgttcgtggccccggccatgcccaggccgttcgccagccggtcgaacatgaagtacgcgcccgctgccaacagcacgcccacgataacggcccaacctaccgtcgcgcggcgcgagaacgccgccggcaacgcgtaagcctgcaaccgcggctcgcgtgaaccccgcgcttttcgcgcctttcgctcagcgctcgatgtcatagctcttcacctcgatcatttcaggtagtagacggacgggttcgtacccagctcttcgcgcaggcggaacgcccgcggagaggccgccagctgcgccaccttcgacgccgggtcgttcaagtcgccgaagtaccgcgcgtcgccgatgcacgtctcgcagcacgcaggcgcctcgccctcggcgatacggtgcgcacagaacgtgcatttgcgcaccgtgccgtacgtaccgcgatacttcccgcgcgccccacgatccacgccgtactcgggcgcggtcacctggtcggccgcctgcatctcgacggcgtacgacgagccttcgtcggccgaccgtgcgccgtaggggcaggcggcgatacagtacttgcagccgatgcagcgatcggcgtcgatgaccacgatgccgtcctcaccgcggtacgtggcctgcacgggacacaccgacacgcacgccgggttctcgcactgcatgcacgggcgcggcaccgcctgtatgcgcacgttggggaacgtccccgtctcctgctcgagcaccacgttgtacgtaacgccgggcggcgtgcggttctcggccttgcacgccacggtgcacgagtcgcacccgacgcatttcgccagatcgatgaccatgccccaatgcgggcgggaggaatcttccatgcggcacctactttcctaacggggagcaccacgacccgagagggccgcggtgctccaaaggagaacaggcggtcccagggggaaggagaccgcctgcggtaacggccatcggctgccgaggggaatgcgggccgaggccgagaaaggtcagaggaacagcaccggcaacgccgccaagatgaccagcaggcgcagaaggaaaccgcccacgagcacgcccgcctcaccgatgaggctcaccaccagcgacgtggtagacgtttccacccgcttcgcaatgaacaccggatagccctcgatgcagaacggcgccaccaagcccaagacgacgataccgccccagaacgccggagcatactgccccgctatcagggagtgcaccgatgccgcaccctcgaagctgccggcgctcacgatgacgagcatggtgaacaacaccaccatctcaatagccgagaggatgacgtgcgacttcttgatgagccacatgtgctcgaagcgctcgcgatcggtgacgaggcccacaagcgacgtggccgcgaggcccgccgacagcgccgacaccacgaacaggatgggcaggatggcgttgttccacaacgggtacgccttcacaacgcccagcaggaagccggtgtaggccgccacagcgaacgcgaacacgatgccgatccacgtgagccacttcggcaccttcttcttcagtatctcgagcacggccgccgccaaggctaccggcatatagacgcagatgaagtacacgcccagcgtcatgacggagccggggttcgacacgagccagaagaagcgcagcgggttgtgcaggccggcttcggcgtcgatcatgagcatgagcaggccgagccctaagaacacgggcgcgatgatacgaccggcgatgcgcatcttgttgctgtcgggatacttggcctctacgaacgcggccgtcagaaacgctccggccgaggcgccggccagaaacagataccatgcgatcaaaggtccccaaaccatggtttcatcacctcacgtagtagatcttggaagcggtcaggttgcttgcgagcggttgcgcatggtactgcgcgatagcctgcgagatgtcgctctcggggtcgtccaggtcgccgaacacgcgcgccccggatatgcacgtccccacgcaggcgggcgggttgcccggctcaccgttttcccagcagaagcggcacttctccaccacgccggtcgactcctgcacgatgcgggcctggtacgggcacgcggccatgcagtacttgcagccgatgcacttctccgggtccaccagcaccacgccggagtccgtgacgtacgtggcatgcgtggggcacacggccgcgcagggcgcgtcctcgcagtgctggcactgggtgggcacgatctcgttgtacacgttcgggtacgtgccggtctccagctcgtggaacttgatgaacgactctccgggctccagatggttcttggcctggcaggccaggcggcaggcgtagcagcccacgcacttcttcgtgttgataagcattccgtagcgtgccatgttatgcctccaccttcttcaccgtaaccgcaacctcctggctcatcatggagcccacgcccggttccatgtcgaacgggatgaaatccgtgagcgcgatgccgtagcggtacgcgcgcgtctgggccggcgagtcgccgccgtagtgcgtgggcaggaacaccacgccgggcttgaggcgctgcgtcacacgggcctccacctggcccacgtgctcgctcgatgccacttccacggtgtcgcccgtctgcacgcccaaatcctcggcgtcctgggcggatatccacaggcgctccatgtggtactcgcgcgagatggcgttcaggcaggcgatgttctgcgtcatggtatgggagtggatgccctgcttgccgcccacgatggcgaactcgccatccttcggcgtaaccttgcgcgggatccacccgatgaccgggttcaggcccgcagcgcccacggcctcggaggagaactcgaacttgcccgacggcgtcttgaacttcggcgtgccgtactggaagttggggtcgggcagctccaccacgccctcccgcttcatggtgtcgaggtccacgcccacggtggccagctgggcggcggccaggtcctcggctgtgaactggaagtactcgcccacgccgcaggcctcggccaggccgttgaatatctcgtcgcaggtcttggcgtctggcagcaccttgtcgatggccacggtgcgcatgcccacgaagtgcttcttgccgccgatccactcgggcagctccaggcgctccaggtacgtgacctcgggcagcacgtagtcggactgcagcgccgtctcggacatctgcacgtcgatggtcacggcgagctcggctttctgcagcgcctccgtccacatcttcggctgcgcgtagcccttcgcggcgttggagttgtagaagaagaggcccttgatggttccgtcgagcgccgccttgagggcggccaggttcgtgccggcgctgtcgagggcgagcgggtactccttgttgcccacgcgcttggcctggggcttcggcgggtcggcgaagcgggcgtcagccagcttgccggccgccggcgacgacgtgagcagcgcgccgcccttggcgccgtaggagcccaggagcgcgttcacggccgaggcggcacgggccgtctcgaaagagttctggtacgagcagccgatgacggcgcgccagcccgcctcgatggaggcggcgggggcggccttcgccatggcgcgcgccaactcccggatgcgctcggcgggcacgtcggtgatcttggcggcccactcgggcgtgtagttcctggcctgggcggcgaactcgtcgaagcccgcggtgctctgctccacgaagccgtggtcgtagaggtcctcctcgatgagcacgttgcagagcgccaggatgaacgccaggtcggtgcccgggttgatgggtacccagtcgctcgagaagatgccggagttgttgaggcgcgggtcaacgctcacgatgcgcgtaccggcttccttggccgatgcgaggctctgcacggacgaggggcggatgccgtcgccgtagctgcggccgatgaacatgaccatcttcgcgttggcgaagtcggtggagtagttcgacgcgcccatggtctgctggtaggcgctctccttcgacaggttgcacgacgaggagtgcgcgtacacgttcggactgcccagcgcgttcatgaagcgcttggagtagtacttgcccgacgggcgcggatcctggatgatggcgagggactcggggccgtccttggcgatgatggcctgcaccttctcgccgatctcacggaaggccgtgtcccagtcgatgggctcgaactcgccgccctccttgcggcgcaggggctgcgtgacgcgctcgtccgagtacgccaactgggccaagccatggccgcggccgcagatgcggcccttcgagtaggggtgcacctcgctgcccttgagcgtgtacagcctgccgcccaccgtggtagccacgaggccgcatttgctggagcaaccgttgcagagcgacggcgccgtcttcacctcgccggacgccgcgccatccgcctcggcggcctgcgcctcggcgcgccaggcgccgagcgagagcgaccccgcggcggcgagggcggccgtggcggccgtccccttcagaaacgttcgccttgaaacgtcttcgaacatcccattcctccctttcgtcttttcatgctgatcggttttggtgaggcagggggcgggatgacgccctatccacgacggagcatcatcccgtccccctgcctcaccctgcacctgtcttcgtcgcagcccgcccggccagcgcgacgagggcgcgcaggtgggcgatgccctccgcgagcgccgcacggcgggcgttgtcgagccgctcggagcgggcggccccatcggcgctgcggcacagcgcggcgtcgtagtcgtccagccagtccaggtggtcgcgggcgacgtcggacgccgcctgggcattgccgttctgcaaaaacagggccagcaggtcgagcgtgagcgccagatggtcgggcgtggcggcgaaatgcgcgggaacctctatctggagcgtcgcgtacacgctttgcaggtggcgcgccgcatcgcccaggtacaggccgcgctgggcgccgaaggcgttgcccggtgcggacgaccacggcttgtagagcgattccaccggcagcgccgccagcggcatgccgggcaggagcacctcgttctgcagcgttgagcgcacctcccacgaaggcagcgcgaaaggatgcgggaagagggcgcctccggctccgcctgggaacgccgcgtcgggaaacgggctcgatgcatcgtcctcggccgcgcacactgctttccggcccgccccatcgaggagcatcgttgccgcatcgtgcgcctccggctgcatggcgattttggatacgtcgccgtattccgcttcggtgagaacggaaaacaaaggcgcaatgagcgataatacggtgactacgttcgaagtcgcgtccacggcgggtatcctttcctcgatgcccccatcgtaggcgcgaggcgggaaacggttgtcatcaataattgatgatttgcccctttcccctgctaaacgctttgttgaaagcaacgtgccgaaacgggcgaagcgaaggcgttacgcgctcgtcacctctacggcaccatacgagataggggaaccggtgtccgtcgcacgcgatcggcgcagcatgcgcatggtgtggaagacgatgcgcctgcgccatgtgggcatgggtttcttctgggcctgcagcatgctcacgttccgcagctccatcctgttgtcgggctccgccaacacgccggaatacgagtcgctggtggtcatcgtgtcgttcgttgctaacatgaccaccatgctggcggtggccgcctgggtcgagaacgaccccgtgcgcatcgaccgcctgcccatctggcccctgcccgtgctcgtggtcgccggcctgctgctggtgttcgccgccgggcgcgcaggaggcggcgcgctgctgccgctgctgttgggaggggccgtggtggcgggtgttggctacggcctgttctggggaagctgggccgactgctacgggcgcatgcatccggcgcgcacgtcgttctacctgccggtgacgttcctgctcaccgctgcgctgttcctggccgtgtcgctcttgagcgagaacctgggcgtgcccgccatcgtgctcatgctgccgctgcccttggcttcgtacgcatgcctgctgcgatgccgagcggagcagccggacggtcgcgccgcgccctcgggcgggacgcgccgctcgcttgccgcgctgggctcgctgctggggttgatagtggccagcctggtactctcgtgcctgttcggcttcgtatgggagctcaccgtgttctcggtggggtcggtgaacgaggcgcacctcagccctctcgtggccaaccttgcggtggctgcggcgctcgtgggcctcgtgctgtacgcgcgcacgcgcatcaacctggacctggcttaccgcatcatcgtgccggtgatcgtggtgctgttcgccgtgctgccgttcttctgggagacgaaccccgtggcgctcaacatcatcatgagcgccagctacggcttgttcgacgtcatcatctggtcgctcgtggcggcctgttcctacgacttcgccgtgtcgggctacatcgtgggcggcatcgtgcgctcgctgtccgtgctgctgcgcctggtgggcatgggcatcgggttcctcatcacgctcgtgccgggcaagccgtcggcgctcatcgtgggcgtgtccatcggcgcgctgtacgtgctggtcatgttggggctgttcaacgcgctgcgccgcaagcgccgcctggcggcaggcgacggcaagaaccgggacgatgcgtacttggacggagtggcagtcccgccgcaggtcggaggggcgcccgcgcccgtcgccactcccgcagatgctgcggccgtcttcgcacctgcggtgcccgccaccgcggccgcgcacgcgcccgccatgccagccgcgaccgcttccgcagcaccggaaccggcaccgtcacctgccgcacccgaagcccctaccccgacggccgccgacgatgccgagcaggtcctctacaccgccatcgcagaagactacggcctcacccgccgcgaggccgaggtgctgcccttcctggctcgcggccgctccgccaaggtgatcgccgaggccctcttcgtgtccgagagcaccgtgcgcacccacatccgccgcatattggaaaagaccgaccttcattcgaagcagcaggtcatcgacctgatcgagcggtacgggtagcaaggcgccagcacgggcgcgcatcgcgcccgctgcatgcccgccccgtcacccttcggttccctcccgcttcccggccggccgcagtagatccatgaactcctgctgagaatgtactccgcatttggcgtagatattgcgcgcatgcgcatgcacggtgttcaaggaaatgatgagctcatcgcgaatgtaaggccgactccttccggccagcagcagctctgccacctccgtctccctgttcgacaggccataggtcgcccgcagctcctccgcctgctgcgcgaacaaggcgctgatgtcgtcggcagtggacgtactgtcagcagccccgccctccgccttatcatcgcggcccgaccagcgcggactcatgcggaagaacgaccagcgcggattgaagcccaccaccatggcaaccagcagcacagccacgaagaacagcagcgactcgttcatcacgttcgcagcggtaacgccgtcgataacggccagtccgtaccatgtgccgacgaatatccccaccccttcggcagcgaacaacgcgccgaacagcaggtaagcaggaacattggaacgccgaacgaacttcggggcggcaatccagaaactgaactgcacgccgaacatgccgatgaagttcaccgtatacgccacgatccgctgcaccgggtcgtcgtagtcgtagtacagcagcgcatagctgagcagcaggagcggcagcccccagcgaaacatgagcgtgaagttaagctggcgcgacagcttgatgcacgacagcagggcgatgatggagagcacggacgagcacgagaacggcacgaggtagtgcaggaaccgatcgcctaccacatcaggcgtcgagagcagccgaaaatacgcgaactggaaccagagcatcgcgaacagcaggctcaacgttgcgactcccgccagagcggaagcaagctcgcgtccatctatcagccgatctactttgacgcccacatccgccccacccgtggacaaatcggcagcacgaaaggcgaagtacatggaaagcagggggagcaaggcgttcactgccatcgatgcgggccctttaagggcaaggaggatgaagtaaaggaaaaacgacaggataaacgaagccggcgcagagaattctatggcagcctcgttgtagcggctcatccggtctccccagaccaacgccatcatagcgaagccgacgccggcaaccatgccgccaacggcagataccgtctggtacgtcgactcgtagaagaagctcgtccagataaccacggtccccaccgaggcgaaaagggccgccactaccccgaacgatttcttgcccgcaagccgcgttcgcgaggaggcaaccatgagcacaagggacgccacggcaatgagcaggcccgcccaaacccaaacacgctcgctgctgcgcaccacgcggataacgggaaccagcccgcacgagaagaaggaaaagtagttccacgccaagaagaaagcgaaccctatcgcctgcttccggtaccccttcatgtgccctgcaagatactgaaccatgccgttgtcccccctcaaggcagatctccgaggttcggcgcacgacctcttccccatccaatagtagcgcaaactggcaagaatgtcggtggcgtggcaactgcccacctgggacgatgcgaaaatagtcacatcatgattaggcctgcgaggccttctgcgccaagcattacggcaatgcggtgatgcgcgcgggctccctgccgtggatgatgacagggtcggatgcaagcgcaaccgacgcactcaacagaggagaaggagggagtatggcaaggaccaacctagatcgcaggagctttctgaaagctgctggcggcctcggcgccctgtcgatcgctggcgtggggatcgccggccaggtgcctaaggcacaagcagaggaaaccgcgtttcccgaacagcagaacggtcagcccctcgaggcaaccgtcgataccgtgacgggcaagcttgaggtcaacgaggacgtgatcgtgcgctacagcgcatgcctcggctgctatagctcgtgcggcaaccgtctcaagctggaccggcaaacgggtcgcctcatctcggtgggcggaaacccttatcacccgagctgcgcatacccgttcttgaacttcgacgagccgctcagcgaggcctaccaggccatggggttcgcacccggcaagggaaacctcacccgcggcaccgtgtgcggccgggggcaggcaacccaggacgtatacgcgcaacccgaccgcattaccgcgccgctcaagcgcgccggcaagcgcggcgaaggcaaatggaaggcaatcacctgggacgaccttatcaaggaggtcaccgagggcggcaagctgttcgccgacgcgggcgaggatcgcgaggtcgagggcttcaaagctctccatgataccgtgacgcctttgaaccccgactaccccgacctgggaccggtgtcgaaccagttcgtcatgctgggcggacgaggcgacggccgcaccaccatcggaacccgtttcaccaactgcttcggctcgctaaaccagtatggccacggctccacttgaggcggctcccaaacagcgcgtgcgctggcagagaccgcttcgaacaacacccaacccgacctggaggagggcgagtacgtcttattcataggagcattccccggagcaaacggcaagagcttccagggaatcgccaagcgaaccctcgatcgcctgaaaaccggcaaatgcaccatcgacgtggtggacccggtgctgggcaacggctgcgtgacccccaccgtcgagggtatcacctggatacccatcaaaacggcaacgaacgcagcattcgcactcggcatcatccagaagatactcgatgacaagacctacaacgccacgttcctatcctacccgaactaccagagcgcgttcgcaggcggtttcgcctcgtacacgaacgcgagccacctcgtcatcgtagacgaggaccacccgaactaccgcaagctcatgcgcgccgccgacgcggggctcgaggagccggcacccgacccgaaagccaccgcgcccgtccaacattatgtcgtcatcgaccaggccacggggcaacccgccctgcacacccaatgcgacgccgcaaccatcgagtacgagggcgaggtaaacggcgtgaaggtgcgcagcagcttcctcttcttgaaagacaacgcctacgagcacacgatggatgagtacgcccagatcacaggcacgtcagtcgccaccatggaacgtatagcgaaagagttcaccgcacatgggaccagggcgtcggcgcgcctcgggttcggcgggacagccactgccaacggcacccagggcgtgctggcctatccggcgctcaacgggctcatcggctccgaccagatgaccggcggatgcaactgctaccgcataggcgtgaagaccacggccgacggggcccgttacaagctggccaccgtcaagggcaagccagccgtttccaccaagaacgccacgtacctttgccgcacccagaagctgttctcgcagaccgacgagtacaaggcgcgcgtagcggcgggcgagaaggacccgaagcccaagcttccttggctcaacgttccctccacctcggataaccaggcgctcgtctccatcgtgaacgagtacccctaccgcgcgaagatactcgtctcctggatgacgaacacgctgcaggccacctcgggcgccctgcgcgacagcgtcatcgagaagctcaaggaccccgatgtggtgccgctccacattgcctgcgacgcattcatcggcgagcatgcgcaattggcagactatatcgtgcccgacaccacgccgttcgagagcttcggcgtagtcacgcaagagggctactggcgcggccagggcaacacggtgcggtggcaagcgaaaccgccaagcaccgtcgagcttgccgacggccgcttcgcaagcttcgaggccttctgcgtcgacgttgcacgtgcctgcaaccttcccggcttcggcgagaacgctatcgagagcgcagacggcaccttctatccattgaacgatgcagccgacttcttcttgaaggccgtggccaacctggcctacgccatcgagccggtggccgatgtgagcgacgaggacgtgcggttgcaggcgctcgatgaactccccgcctcatggcaagacgcggtcacggccgaggagtggccgaaggtcctgaacgtgctatcccgcggcgggcgcttctggcccatcgagaccagccaaaaggacggccgcagcgcgtacgccaaggagtacctggtgcagtactacagcgagaagaaggccttgaacaagaacccctattcaggtgcctatcctgacgcggccctgcgctacgtgcccgaggatttctgcgaccgaacccccatcgccgacgtgtacgacgaaaaggaatggccgttccgatccacgaattacaaaccccgattccgctcgatatccatgcaggcgaacagcccgctcatgcgcgacctgtgcgagaagaactacctggaactcaacctggaggacgcggcggcgctgggcatcggggacggcgacatcgtgcgtatcgcgaaccccacgggcgacataatggaaggcgaggccatggtacgcgccggcattgcgcgcggcacgttcggcgtggctttcggctacgggcatcgcgcttatggaacccaggatcgcgaggtcgacggcacgctggcgaagggcgaccccgccatcggcgccggcatccatctgcagacgatgctcgacccgacgctcgaggagggggtcatctacccccacgtcgacagcgatgccggctcgcccggccgcagcggcggaatgtaccggatcgagaaggcataggagggagtgatcatgagcacctcaacgaagcgtttcggcatgctgatcgacctatccctctgcatcggctgcaacgcgtgcgccgtcgcctgcaagcaggagaacggcgtgccgctcacgaagttcaacacctgggtggaaagctgggacgtgggaaccggcgagcaggctcgccgcgccaaccaaccgaagctgtgcaaccattgcgccgatgccccttgcgtgaaggtgtgcccgacaggcgccagctaccgcacggaggacggcgtggtgctggttgacgccgagaagtgcatcggctgcaagtactgcatggccgcctgtccttaccaggcgcgatgggtcgatgacgacacgggcgaggtgggcaagtgcacattctgccaccaccgtaccgcacacggcctgctgcctgcctgcgtgtccacctgcgtaacccgcgcacgttacttcggcgacctggacgacccgtcgagcgatatagcgaaaaaggtcgcggacgtcgggggcgaagcgctcttcgccgacctcggattgaacccgtcggttctctacgtgggactttcgcaggttgagggcctgcccgcaacatccgccatccaccgtggcggcaacgtcgtcaagccgtacgaggggtgatcagcatggtatgggatggaatcatcgcaacgtacctgtttctggcaggattgggcgccggcgcgttcgcgctcgccgcgctcgcgggcttcgtgagacccgatgccgtgaagctgcgcaccatcggctacgtcatcgcgcccatcgcggtgggcgtgggcacggtgctgctcatggtggatgccaaggcggggctcatgaacccgctgcgcttcttcgggctgctgggcaacttctcgtccatcatggcgtggggcgtggtcatcctcgtcgcgttcatggcggtgagcgcgatcgcgttggtggtcatgctcgtgaagaaggccacgcccaaggcgctggacgtcgtgggcctcgtgtgcgccgtagccgtggccgtgtacaccggcatgctgctgggcgacgcccccggcttcccgctgtggaaccccatcgtgctgccgctgctgttcctggtctcggcgacgtcgaccggcttcgcggccgtactcctggtcgcgcacctcatgaaggcggagggcttggaatccctcggttttttgaggaaggcggggctcgtgcttcccgttgtcgaggccgtgctgatcgccgcgcttctgggcgtcgtgtccggcacgggcggcagcgcggcgcttgccgcagcggcctcggttgccagcttggcgttcggcgcgtacgccgtgccgttctggctgggattggttctggtggggctggcgctgcccttctgcctggagctgctccaagcgtccaaggccaagaaggctgcgaatgacggctcgggttcgaccggccttgccgtcaccggcgaggttggcgtgctggtgggcggcttcctgctgcgctacctggttatcatggccgccgtgccggtggtgctgttctagcaccccgatctggcgagcttttcgctcgacacgtccgcagccgccggcttctccctcccgcggcggctgcggatgctgtctttggggcacctggcgcgctagtccgtcacgtcgcccgactggttcaggctgatgggatcgcccacgaacgtcgagggggccttgaacaacgtcttgaagaagtccttcgtgcgcgcggggatctcgcgcaggtcgtactgggcctgcttgctgtaggcgtggtagtcgctcggcacgcccagggcctcgacgcccagaccctgggcggagtagagggcccggtacagatggtaggtctgcgtggccaccacgatgcgctcggcaccgaacacgtgcttggcgcggtacatgctctcgtaagtggagaagcccgcatggtcgcagaagatatcctcgctggggacgccttgggcgatggcgtagtccttcatggccttcacctcgttgtacgacaccgtggagttgtcgccgctcatgatcatcttgggcgcggcgcccgcacggtacagcgcgatgccgtcgtccaggcggtcctggaggatgcccgacggcgtgccgtcggcgaacacggaggcgcccagcaccacgatggcatcggcaccgaaagccgcggccgtctcggtgtcgacgatggcgtccttcgtcgtggtaaccgtggcgaggttcgttcccgccacgaccaacgccgcaacgaccgcgcacccgaccacgaacccgaccatacgcctcaaccatccatgtttcttgttacgtgtcataaggtttgatgatagcaaacgcacgcaagcggcaggctgccgcaacacggccgccatcgaatctcacggacttgtccacaaacaacggttgaaccgatgcctcgatgccggcaagaacgctctgcggcgcccggccgctcctcgcgcagccagctagcgcagcacgcaccggtggcccggcgtggcgctgcagccgttgcatgagacacagcgcgaaaccgcctgcgggtcggccgcccagcggttcggcaggtcgggctcgcagatgaggggacggcacaggccgaacccggcaataccctcgtcggccaagcgctccatcgcgtcgacgcggcggttgccgcccgtgaggatcaccggcaccggcacggcccgcgccagccgccgcgcgtaggcggcgaagaacggctcgccggcgaaatcgcgcgcgcggcaggcacgccacggaccgctcacctcgatggccgaaacgccggcttccaccagcagctgcgccgcctccaggctgtcgtcctcggtcaggccgccctccacgccgtccgagctgttcagcttcacgagcacgggatattccgcgcctgcctcccgccgaatggccgcgagcgcctccacgacgatgcgcgcgcggttctcaacagggccgccgtactcgtccgtcctacggttgagcagcgggttcaggaactggctcagcaggtagccgtgggcggcatgcagctccaccccgtcgaaccccgcgtcgcgcgcacgacgggctgccgcggcgaacgactccacgagcaggcggatgtcgcccctcgaggcctcgacggggacgatgcccgtcttggggttgggcaccgccgacggacccaggatgcgcgcgctcgggggatcgagcttcgttgcggagcctccgtacacgatctgcgagacaacgcgcgcgccgtaggaatggaggcgttctaccagctcgcggtactccggcacgaacgagtcgtcgtagattcccagcatgcgcgggttcggctgctcgtcgggcgtcacgtacgcgtaccccaagatgacggtgcccgccccgccggccgccagatcctcgcaaaccgccgccagctccggcgtgaggtgcccgtcgtcggtggccaacccctcgtaggtcgccgcccgcaccaaccggttcctcgcccgcaggctcccgatgcacatctcctcgaacagcgtgcccatgatgccctcgctctcctcgtgcccgttttcagcggattaatgcaatgattctagcagttcgccgcgcaaggcggcatgtaatcgggagccacgtacgtcaagacaccgcctatgccgggcttcaagaactgccacttgctcccgagggcggttcatggtgcaagctcccctgcctgaagaggaagagggcatcccgaacacgcccgggatgccctctgcagccagaatacgaaacaggatgcccgctacttcgccacgatgttcaccaggcggccggggacgaggacgaccttcttcacgtccttgcctgcgagcgccgcctccacggcggcgaggccggcggccttcacgtcgtcctccgcagcatcggcggccaccgtgatcttggccttcaccttgccgttcacctgcacggccagctccacctcgtcggccttggcctgctcggggtcaaactcgggccacggctgcgtgtgcacggagccctcgcggcccagcaccgcgctccacagctcctcggcccagtgcggggcgatgggggccatgagcttcacgatgacctcggccacctccgggtcgatggcgcgggagccctcgcaggccgcacgctcctcgggcgagcacttgcgcaggtagtcggccgccgcgttgcacagctccatgatggcggcgatggcggtgttgaagttgttgcggtcgaagtcgtcgaccaccttgcccgccacgcggtgccgctcgcgcacgagggtcttgagcgcctcgacgccctcggcctcgctcgcgcccggctggtagagcgtctcgtcgcccgcttggcccaccaggtcgcacacgatgcgccacgcgcggttcatgaacttgtagatgccggccaagccgccctcgtcccacagcagatccttgtcgggcggggccatgaacaggatgtaggcgcgcacggcgtccgcgccgtactcggcgatcatgtcctcgggagcgatgacgttgcccttcgacttgctcatggtctcgccgtgctcgtccttcaccatgccctggcacagaaggttcgcgaacggctcgtcgaagtcgaccattcccaggtcgcgcagcaccttcgtaaagaagcggctgtacagcaagtgcaggatggcgtgctcgatgccgcctatgtactggtccaccggcagccagcggttcgccttctcgggcgcgaacggcagctcgtcgttgtgcgggtcggtgtagcgcaggtagtaccagctggagcacgtgaacgtgtccatggtgtccgtctcgcgcttggccgggccgccgcacacggggcacgtggtgttcacgaacgcctcgtgcgtggccagcgtctcgccggcggcgaggtcgatatcctcgggcaggcgcaccggcaggtcgctttccggcacgggtaccaggccgcactccgggcagtggacggccggaatgggattgccccagtagcgctggcggctgatgagccagtcgcgcaggcggaactccaccttcgtgcggccgaggccctgcgcctcgaggtcggcgatgatggcgtccacggccgggctgtgcttgccgcctgtcatgccggtgtacttgccggactgcacgaggacgccctcggcgtcgtaggcgtgatcccagtcaacgctcgtcacgcgacgctcctgcacgccgtcgagctcgggaaacagcggatcgtcctcgcccaagatgatggggatgatgggcaggtcgtacttgcgcgcgaattcgaagtcgcgctggtcgccgcagggcacggccatgaccgcgccggtgccgtagtcgctcacgatgtagtcggccacccacacgggcactttctcgccgttgacggggttcaccatgtagcgcccggtgaacgcgccgtgcttctcgcggtcgccctgggcgcgctccacggcgctcaccttggcggcctgctccaccacctcgcgcacgccggcctcgtactcggtgccggccacgaggtccatgaggcccttgtactcgggcgccaacaggaagaacgagcagccgaacagcgtgtcggggcgcgtggtgaacacggtgatgaggtcgtcctcggtcggctccgccggcgcctcgccgtccgggccgcacagcgtgaaggtgacctccgcgccctcggagcggccgatccagttggcctgcatctgcttgacgcgctcaggccagccgtccagctggtccaggtcgtccaagagctcttgggcgtagtcggtgatcttgaggtaccactgcgtgaggtcgcgcttctccaccgcgccatggcagcgccagcactggccctccgtcacctgctcgttcgcgaggacggtctcgcagttggggcaccagttcacggggctgttgcggcgctccaccaggcccttcttccacatctgcaggaagatccactggccccagcggtagtactcggggtcgcacgccaccacggtgcggtcccagtcgtagctgaagcccatgcgcttgaacgacgccttctgcgtgtcgatgttctcataggtccacttcgccggatggctgtggtgcttgatggccgcgttctccgccggcaggccgaacgcgtcccagcccatggggtgcagcacgtcgaagccgcgcatcttggagtagcgcgcgatgacgtcgccgatggtgtagttgcgcacgtgccccatgtggatgtcgcccgaggggtacgggaacatctcgagcacgtagcgcttcggcttggaggggtcctcggtcactttgtacaggtcggcgtcggcccacgccttctgccagcggggctcgatctcatgcgggttgtaaggtttcatggctgctttcctcgtcaggtctcgccctgtcggacgggagcgccacggcaaggcgatgccgcccgcgcgcgtccgcgcagggggctcgattcgcgaatgctcccattatagtgattttcccctgcaccgggggttctccacgcaaattcgagccgatcaggcggggcaaagtccccgggttccgagtagattggggatcgcaggaaccttgatcagcgccgcgcgtggcgatcatcggcgagcagggctccgaaccagtacgaagatgcaccggccagcacaaggtggtcgccgaactcgagctcgaacggctcggcaccgtcgcgggcgctgtcgtacacaacgcggccctcgcgcagaacgcggctcccatggaccgagccttggtcctccagaagccatcttccaccctcccctacgatacgacaatgccgacgcgaaacgcagggatccgtctcaatgatgtcgcaatcggtgtaacggccgatggagaacgggcggtcggatgcgactgtccaccagttgcccaaggcatcaggctcgtcgctcgcgtacttgacgaggcaggcacagccttcgcgccggacggctcgatccggatcgttgcccttgccatctgggatggtgagaggcgtctcatcggccagctcgcacacgaagcgctcgtccaaatggccgaacgtcatgaggtggaagtacgaggatgcgagcacaaccagcatatcttcgctacgcacagcaggctgctgctcgcaccaaacgaacagcgagttcatctcgttcgcgatgcgatcgagacgcagctccacacgcccgtcctcgcgctcatgctccaacccgcgctgcacgtcggtccacaagggaccgcagaagtaaatgacaaggtccccgacagtgcaatcggggccattgcagagatcggcgctcagcagccgcgccgcatcgtcgaacacctgcgggtttctctcgtagctggcacggaagtcctccacatagcgtcgcgagtggacgagtcgcgacagcaccgccgcagtgcgcttcctgatggtgggattgtcatggttgatgtagtggccgttcgtcccaaggtaggaatagaggaccttgtggttcacccggccgcgcgagagcgatcggatatgctcggcaaaatagtacaacgccgtgtgccatccccgatcctcgcccgacacgtcgaatgaccgtgcctgttcggtgttcgtcgtcagccgcaccttgtcccctttatctcaactgctttgtcaagcatacgtttgcaccggtaaatcgttattaggttattcgtcttggcgaggtcggcctattgcgcaacactattgcttggctcatcgggcggtaaatcaagcaggggaaaggcagtcgacgctggcgtaggaagcggtgcggcggcagcggcaagggggcaagacgcgccggaaccagcataaagagccgccaaccgacccacctgctcgatcagttcggacgagctcggacgcaggcccggatcgagcgcaacgcacgaccgaaccagttggcgcacatcatcgggcaggcagggatcgacgcgcggaacgcctcccccgcggaagtacgccgaccagaaagagaagtcgtcacgcaggcgcggcggaaagggatacggccagcgacccgtgagcacttcgtgcgccacaatgccgaaagagaacacgtccaggttctcgttttcccatccgggcgtgcgcatgataccctccggagccgtgtagccatatgagccgcagggcacggcgtccgtcggctcgcccagaaagaaggccgtatcgagatcgatgacggtagctcgctcgacgggagaaggcgatacgatgatgttcgagggcttgagatcttgatggatgagggcggcgccggagcccccgcagcgtcccagatcgtgcaggtcggtcgccactgcgagcagcagcgacaacgagtccgccagaagaagcggccgacgctcgcgagcacgctgcgtaataatacgagaaagaggagcgccttcagcccaggcagaaaccaagtagagccacttcccgtgcgaagggcgcaagcgcgagtcgcgaagcaccccggtcgcagcgaagcgtgcaccgaatgccgtcactcctctttcttcggtgtcgccgctagcagtttctccgttcgccgcgcgcctgctcgctaccgcaccagctcctctctcctctgacgcggctttacgcgaccccgcaaccaaccgcgcgagaaggcttctctgatgctccaagtagcggccgtccgctcgcagtgttttcaggcagtaggcgcggctctgaagcatgtccgagaagcggcatacatgcacgcttgaacggctgcttctcgacacgagctcgatcgacaggaaaggctggggcacggcgggggtatcgagatgatgcgcagaatggacatgcatacccaccctccatttcgccgacgcgccatcagccgtcaagacgcgtgctccgtacagggcccttacgcaggctcgtctctagcaaggggcgctaacgcaggcggtcgcacgtgaaccgctttaggttgctctggagttatggtcgaccatgcgggccgtttggttttcgggagccttcctttatcgcactatagcctgttgaggcgcctgtacgggttgcgcaactttacggagcgtcggtgctaacgccgacgaaggattcaaatggaatcgcgcggagacactttccggcgaaatgaagttcgctgggaacagcctagcgaagccaaggaagagccccgcaagctcaaccttgcacgaacacgaaacagtcgtcggtggagcgggccccgtcgtagacgtggccgagctgatcgaaggcgcgcaggtcctcggggcattggacgttgcgctcggcgcaccagcgcaccatcgagccgcgagcggccttggcggcggtggcacgctgcttgaggcggccttgcgtgtcgacggtgccgaacaggcaggtcacgatgcgcggcgcccgcgcgcccgcgattttggcgtgcgggaggacggccttggcgtattcgacggatgcgaggttcacgatgatgtcggcctcgtcggcaagcgcgcgatagagacggtcgccccagaaggcgtagaggtcaggcgcgccgcctgcagctagcttcgcctgcatttccaggcggtacggcaccacgccgtcaagggggtgcagcatcccgtagaagcccgagaggatgcgcaggtgctcctgcacgtaggccagctgcgcctcgttcatgacgcgcggcgctaggtgctggtactggatgccctcgtaggcgaccaccgccggtgtcagcgcgccctcggcccgcaggtccatggtgcgcacccgctcgaagttgagctccgccagcatatcgctgcatccccagagcgccttcgcctcgccgtacgacagcgagcgcaacgcttcgagcaactgctccgcatcgtcgataaaccgaggcagaccgtgccacgcaaaggcgtcgtctaccacgttcatcttcttggccggcgaaacgatgaagcgcatggctcctccctttcgttgtttccgctgcacgattcgggcgtcagtcgcgccactccctccgcatgacctcccacttcgcgtcgcgggcggcttcgacggcggccatctcgtcgtccgaaagcgcgcggaaacggccttggcggcgcaggtaggcctcgacgctggcgaactgcttggggtcgcggttcaggcggaagcggcctccgggctggccggacacctgctctccctcgtattcggcgaggtaccagagccccgtgtccacgatatccttcgcgatgtccgccatctcgtccacgccgcagccccagccggtggggcacggggcaatcacgtggatgtagcgggtgccgcggatgtcgcgcgcccgctccaccttgcggatgaagtcgttcaggtagccgacgcttgccgtggcagcgtaggggatgccgtgcgccgccacgatctcgaacaggttcttcttctgcgtgaggcatccgtgcacgttcgagccggccggcgtggtggtggtcttggcgccgaacggggtgagcgagctcttctggatgcccgtgttcatgtacgcctcgttgtcgtagcagatatagagcacgtcgtcgttgcggtcgatggcgcccgagagcgcctgcagcccgatgtcggccgtgccgccgtcgccggcgaagcccaccaccgtgcagtcgtcgggcttcttgccctgcgcgcgcaggccagcctcgatgccggtgagcacgctggccgtggcggcgaagggcgtgatcatcgcgttgttggcgaaggcgagctgcgggaaattgaacccgacggcgctcatgcagcccgcgggcagcgcggccacggcgttcggccccagcactttgagcgccgcgcgcagggcgagcgagccgccgcagcccgcgcacgccttgtgcccgaagaacagctcgtcgtcggtcatgttcttggcagtgacggccatggctatcggcctccttccgagacggcatccgccggcgagtcgatccccaagaacgacacatgcggcaggtcggccgtgccctcggccgcctgcgcgagggcgcggaacattccttcaacctgggcttccgagatgtcgtcgccgcccaggccgccgatgaagttgtacgagggaacgcgcgctcccgcctgctgcagcgccgagttcacgttggtgtacaccgtgccctcagcgccgaacgagacgtccttctccagcacgcccacggccttcgcgccggcgagcgcggtggcaatgagcacgctcggcatggggcgcaggtagcggatgcgcagcatgccggcgcgcacgccctgggcccgcagcttggcaaccacgccgcgcacgaggcccgccaccgacccgagcgtcaccaacaccacgtcggcgtcgtcgcagtccacgcactcgatcatgccggtgtagcgccgcccgaacacctcggcgaagcgcgcctccgcttccttgatggcgcgcggcgcggcctcccgcatgtcgcgatgctcccagtacttgaagtaacggtcgtagtccggccccgccgagaagccgatgctcaccgggttctcgaagtcgaaccggttgcccgccccgtcgtagggcggcaggaacgcgtcggcctgctcgggcgtgggcacgtccaccgtctcgtaggtgtgcgtgagcgcgaaaccgtccaggttcaccatcaccggcgtgcgcacggcagggtcctcggccacggcgtaggccatgagggccaggtcgagcgcctcctggttgttctcggcatacacttggatccagccgtggtccagaagcgagagcgagtcgcgctggtcgccgtagatgttccagggcagggcggtcgcgcggttcgcgttcatcatgacgatggggaaccggccgcccgacgcgtaggtcaggcactcggccatatatagcaagccctggctcgacgtggccgtgaacgtgcgcgcgcccgtggccgacgcgccgatggcgcacgagagcgccgaatgctcgctttccacgtgcacgtactcggcggcgagcgagccgtcctccaccatctcgctcaagcgctccaccaccaccgtctgcggcgtgatgggatacgcgctgatcacctgcgggcgcgccagccgcacgccctcggcaagggcctcgtcgccggaaaggaaccgcttcatcgggcatccgcctcgctttcggggatcatcgtgatggcgccgaaccggcacgccttcgcgcacacgccgcagcccttgcagaagtcgtagtcgatggcgacgggggcgccgccgggagcggggtcgggcactttgaagaccgtgccgtcaggacagtagaggtagcactggaggcagcccgtgcaggcggccgggtcgatcacgggtcggatgttgcgccagcccgcgttcttcaccgtgagatagccgccttcgaagcacgtggaatgcgcgaactcggcgggatcgagcgcgtcggagcgcagcgtggggatggcggatacggggcgcaggggccggtcgccttccactggcaccgtagcggattcttcggctcgctccgcccgctcaggttgacaagccggcccgccttcttcgcggcgggacaccgcctcgctcgcagcccgcacgatctcgatgttcttcgcatgcagcttcgcgggcatgtactggcggatggccccctcgacgtcggccagctcaaccctctcgcacagcgccgccaacgcgcccaagaacaccgtgttgggaatgggcctgcccagaaccgcgctcgagatgccgtcggcgtcgagagccacgatgcgcgggtcgtcgaacgtgcgcgtgctgttcgccaacaccagcccgccgggcttgagctcgcgctcccacccgtcgccgagcagcgtgtcgtccaggtacaccacgtagtcggcctgcgcgatggcgctgcggtcgccgatgggcgcgtcggccatcttggtgaacgcccgcatgggcgcgccgcgccgctcggggccgaacgaggggaacgcgagcgcgtgccttccgtccgccatcgacgccgccgcgcccagaagccgcgccgccgtgaacgcgccctgcccgccgcggccgtgccacaatacctcgatcatgcagtctcccgttctcttgcatttgatcgtgccagtatcaatctataaggaaataaaagcaaatcgaaaaacaggatatatgcgaacccaccaaaggaaaaagctatgacccgtcgatttttcagtataatcatctaggccccgttaacgatggggtcttttttttgctttcgttttcgattaattttttagttccgttcccaccattctgtactaaagtagctggccttgtcgcggggcgcctgtcctcgagcagtattctacggagcctgtcggcatcaatcttatcggcgatggacgggcgccgctggaaccggtggcatgattagttaggctctcgaagagcaatatatatacgccagtgtccggctccagcgacgaccagcggacgagccatgcatagcacgtccggttcattattataggcaacaatcgtgccaatttgccgaggagcgaaaaggtttcaggctttttcatccaggattagggtgtgcaaaattaacccccccatgctctataatgtggggagcgcaaaggacctgcttccggaaaagggctaggctgttgcgcgatgcgacggctcgtagaaggtgccgttagccaagagggcgtagatgaggtctacgcgccttcgcgccagggctcggagcgcctgcttgtgctgcaagccctcggcgcgtttcctgtcgtaataggccttgcagcgcgggtcgtaccgtttcgctttctgcgccgactcgatgaacgcattcttgagcttccggttgccgttcttccttttcttgttcttcttgacgctcgtgcccgactcttccttcacgggcgcgatgcccccgtaggaagccaggtggttcgcgtctgggaagcggttgatgtcgccgatctcggcggcgatcgtcgccccgtagacgcgcccgatgcctgggacgctctttaggatcgccgtctcgggcaccgcatcggcgcgctcctcgatggcggcgtccagctccgattcctcctggtcgagctcgaggatgcgcttggctagcttcttgatctgaatctcgatgacctcggttgccgggagttcaaccgtcatggtgccgagcgcctcgaacacctcctcaaccttcttaggcccacgggttttctgatacttgaggcttcccgcccacttggagacgcgggccttgccagcgcgtttgagccctcgggggccgccgtagcgctcgaatatttttatggccagatcggaatggaggctatcgccctcgaaaagctgctcgaggggcggggacacctgcagcaggaggtcgtgcagtcggttgtagtagcgcgtgcgctctttgacgatgtccacccgccgcgagttgaggactttgatttctgcgaccgcgtcgtcgcgcgtgccgacagttcggatcagcctcggggtgctgagggacacgtcggcgatgatgaaggcgtccttggcgtccgacttgccttccttgtaggtctcggcgatgttcttgaagtccttaggggtgatatgggcgacgtcgatccccatatccttggcgacggccaccacgagccgtccgatgttgccgaactggtcgacggttacgagcaccttgccatgcccgctcgcctcttccaacaactcgcggatactcgcctcatcttgatcgaagggccgggacagcaaccgttcgcccgtcgccccgtcgagcgccaccgcatggtgcttggtctttcctacgtctacaccgacgtacacgtcgtaatccatctccgcccgctccatagttccccttcctcgatgaatggaagctggccttgtcgcggggcgcctgtcctcgagcagtattctacggagcctgtcggcatcaatcttatcggcgatggacgggcgccgctggatccggtggcatgatactgggagctataggtagcattagcactgcgccggtgtccggttccagcgacgaccagctgcggaagccatgcatggcttccgcaagagaattataagcaaaactacctagtagaatagcgctgcggccgtgccgagacggcggcgcggcggccggcctgcccgcattcttcagcaaatgggcagcgatccgcccatcatgccagcccgcctcgtcgcgctgtcctttgccggaagggatgcatttctcgcccggatgacgctttcccggccgatactgccgagaaaaggccggtttggcaatccgagcgctggaagctccccgacaggccgaggcgcgatcaggcgatatgtcgccatcggcgtcgcacgccgcacaacagcccaaaaaacaggcgcccacgattgccaaaccagccctttcttggcacttcccggcgaaaagcgcttcagcccatatccgccccccttccaccccctcctcgaccgcctttcaacgccgcaagcccgccctcaactcgctgtttgctgctgctatgaatcttcggggcgcggccgtgcacgaactatataatgctcggagagagaaccgacgagaaggcaccgcgaaggagttggcgagcaccgtgatggaccgccccacgtttggcaagaagcgcccggcgacgcatcgggaacctgcaggttccggcgaggtcgaaacgcgcgtcctgccgaccgccaacaacgccgagcaggcgccctcgggcgagggcgcgcagagccctcgcggcaagcatggccgacgcactcccgggcccagcgcgcaggaagggcacgtcgaaacacccggcgacgtgctgcgcggcgaaagcgaccgcgaccaagcaggacggggagcccgcgacgccaaggcacgcaagccccgcaagcccaacttcgtcacgcgcacggtgaaccactggtgcaaccggctgctcggcgccgtgtcggagcgctcgctggccgcccaggaagagcagtacgccgcgcatcgcaccacgcgcgactacgtatggaactccctgggcatcggcgcgtggggcatggtgttccccgtgctcaccgtggtggtcacgcagctcgtgggcgtggagcaggccggcatgttctccatggcgttcgtcacgggcatgctgctcatgttcctggccaactacggcgtgcgcacctaccaggtgtcggacctggacgaggcgcactccttctcggactaccagctgaaccgctggataacctgcgccctcatggtggcagtgggcgtggcgtactgctcgatacgcgggtacgcgcaggacatgttcaccatcagcctaggtgtgtacgtgtacaagatggtggacggcctggccgacgtatacgaggggcggctgcagcaggtggacaagctgtacctggccggcgcctcacaggcgttccgctcggtagtggtgctcgtggcgttctcgttgtgcctgctcatcactcgcaacctgccggtggcctgcatcgtcatggccgtggccgcagccctgtcgttcgtggtgctcacgttcccgctggccctgttcgaaacgccgaagtcgcgccgcgtaagtccttccagcgtcgcgcggctgttcaagcagtgcttcccgctgttcctggcgctgttcctgtacgcgctcatcgacaacatgccgaagttcgtcatggagggcgtgctctcctacgacaaccagctgtatttcaatgcgctgtacttcccggcgcagggcatcctgctgaccatcgggctcatctacaagccactgctcgtgcgcatggcggaggcgtggagcgaccccgagaagcggcgaaagttcgacctgatcatcgtccttatcatggtgatcattgtggcgtacacgggagcgacggcccttgtcatgggatggatcggcatccccgtcatgagcttcctgtacgggctggacttcgagcagttccgcggcctcctgttcatcatgatcgccgcgggcggcgtgacggcggccatcgattttctgtaccaggtgatcaccgtgctgaggcggcagcgcgccgtgacgaagctctacgtcatcacgttcggattctcgctgttcgtgccgcttctgctggtgaacttcacggggctgccgggcgcggtcatcggctacctcattgtgatgtgcatcctgctggtgctgctggtgagcgagtacgtgagcatccgcctgggcttctccaaggagacggaaaccgaggccagcgccatagcccccagcccgagcgcgcacggacgctccacgaccgcacgcgccgccgcccacgagaaggcccgcgtgcgcgcgatcgaggccgagctggaagccgagggcgagaccgcacgcggcatgtcccccgcccgcgcagccgcccacgcgaaggcgcgggcgcgcgccgaggagggagctgcggcggatgtcctcggagcggccggcacccccgacgacgagagcccactgccgcagtaggcgaggatcgattttcagtcggcgtgcagcaaaccccttccgcgcgaacctcggcggtgatgacttggcggaaccctagaaccgtgcgtacctctccaggttcttcttcagggtgtccacgaagcgctggcccacttcgcccagctgcccacccttgcgcacgacgtagcccaaatgcagccgcacgtcggtttcaaggggcacggtgttcaagccggcgccatcggagatgcccacgaggatgccgctcgtcaccgtgtagccgttcagggccacgatcagctcggagagcgaggcgcggtcggtgcaggcgatggacttggcgcgcggcacgccggccagcgcctcctcggcgaaggcgaccggggagtcctcgtcctgctcgaagtagaggtacgggtagtcctccatgtcctcgagcgtgaggctcgcggcgttcaccatggggtggctcgccggcagcgcgacgcgcggcgccgactggatgagctccacgaactcgaggcccgccgcgtcgagcgcggcgttcacctcgtcggccgtggccgaggtctcgaacagcacgcccagctcgctcttcccgctggcgacgtcgtcgatgacgccctgggtcgtgcggtcgcgcagcgcataggcgaaggagtcgccgcccaacgccaacacggtgtgggcgaacgtctgcacgttgaacaggtagtgctggccggagacggcgaacgtggtttcggtggtggtcataggtggaatcctttcaacaagatttccttctcgcgggtccaaaatcagtcagcgagggtgcccgtggtgccggagattcgtgggttggcgaaggtgaaacgtacttcggtacgtgaggcttcgccaacgcgcgaagattcggtgccacgggcagccgcagcgtcggcccgttccgacggctgacaagccgtcggaacctactggcagccgcgttcgtcgatgaagcgcgacgccttgtgctcggacgacgtgcccagcttgcccgcatcatacacgataaccttctgcgggcgcacccccacgtgggccttgatggcggccatggtgcgcttcgccacctcgtcgtagggctcgtcgctgcccagcgcgcgctccacggacacctcgtacttgcaggtgaagtccttctcgtacacgcggatggaatactcgccggtcaggccctccagcccgcgcaccacaaactcgatgtcggtggggaacacgttcacggcgctcacgatgaacatctcgtccttgcgcccggtcacgtggatgcgcgccagcgtgcgcccgcactcgcacgtgtcggtggacacgtagccgatgtcgcccgtgcggaagcggatcatgggacgcgccttcttcatgagcgtggtgtacaccagctcgcccgtctcgcccggatccagcacctcgccggtcgtcgggtccaccgtctccacgagtatctggtcctccacgatatgcaggccgtcgtgcgcttcgcacgcggcggcgcaggcgccgtagatgtcggacaggccgtagaagtccacgaccttcgcgccccagaggttctcgatgctctcgcgcgtagacgggatggagccgcccgcctcgccggccacgatgatggtgtggatgttgaaatcggtgcgcgggtcgtagcccttctccttcgccacctcgcccaggtgccacgcgtaggacggcgacgtccagatgacggtgggctggtactgcttcagcacgaacagcaggcggtccgagggcacggcgcccacccagatggccagcgcgcccaggcgctgcgcgccgatgacgtcggggccgcccacgtacagcgcgaagttgagcgcatgcacgtagcggtcgttcgggcgcatgccggcctgccagaacaggcgcgcctcggtatcctgccacaggtcgaagtcctcctgcgtgaaggggctcaccgtggggacgcccgtggagccggacgaggtggccatgaagatgacctcctcctcgggtacggagcacatctcgccgaagaagctgcccacgtgctgcgtctcgcgctccgtcttcttgtcgatgaacgggaacttggcgatatcgtcgagcgtttcgatatcgcccggcgccacgccggcctcgtcgaacgcgcggcggtagtacgccgtgttctcgtatgcgtaggccaccatgtccttcaggcgctgcagctgcagcgcctcgagctcgggccgcggcatgcattcgatctccggatcgtagtatttctgggatacggggatgtccttcgccatggttgctccttgatcggttctcgtttcctccgctgcttgcacgcccgcggcggacaacgcctgcacgaccgaacgccgagcgcccgcttggggtttccgcgcctgcctgcccgcgccgaacgtttcacatgtaacattcgttcgctatctgggctctcgcaggtaaaagcagcacattgcatgaaaccactaacgggcggcgaatacaaccttctaagccattcgatgttctgatgctttgctatcgctaaaacagatagcttagcaagatgcggaagtgaacgtatctaatcgcccgcgctcgcttcgcacaagctacttcgcgcccagcgcctcctccgctgccgcagcgtctgcgccgacctgcgggcgcgatccacctgcccaccgcgcccgcaggtcggcgtcccatttcttcgagaacggcagcacgtccaccagcgctaccaccgagagcacgcccaggatggtgaacacggccagcgggctgtccacgccgccggccagcgcctgcgcggccatgctgagcaacgagccgtagatgatggacgtgttgataacggacaggttgagcgggtacttcgccgacccgtagcgctggcgggcgaaggccgacgccaccaccggctcgccgccgtaggcgaagccgcagcacagcgcgccggcgatgtagagcgccggggtgcccgtggcgaacgcgccgatgatgcaggcgcaggccagagctgccaccgcgccgtccacgaacatggtgaccttcacgttcgtgcggtcgtagatcatgcccaccaccacgcgcgccaggccgttgcaggtggacaccaggcccacgagcagcgtggcgaaggcggcgtcgatgcccacgagctgcgcgttggccgcacagttgccgatagtggccaagccgatggccaccacgataacggcccagatccagaacaggtacaggatgggcgtcttgagcaggaacggctcgtcggcgccatccccgcccgccgcaccgccggctgccgcctgctcgggcgccatgagcgccacgatgttctcgggcggacggcgcagcataagcgccgcagctgccgccaccacgccgccggccgcgcccacgcccacgaacacagggcccaggccgaacagcggcacgaggttcaccgagagcgtccccaggatgagcgaccccaggccgaaccccatcatgagcacacccgacgagaaccccaccttgtcagggaaccacagattcgtcgtggacacgatggtgttgtaccccatgcccacgcccaaaccgcccagcgtgccgtaacataggtataccaccgcaatgctccccttcgcgaacagcccggtgcccgcgaatccgacgaagaacagcacggccgcgatgacgatggtccccttcacgccgatccgccgctccacttgggagcctatcacggcgccgatgcagaacgctatcatcatgatgttgaacgtgaggccgacagcccccttctccagttcgaacgcggcgcccatgggcgctgcgaacatggagaacgcgtagatgagccctaagaacagcaaggcgaacgtcgagcacgccagcgtgcgcatgcgctcggacttgacccgggcaaccgtcgtttcggacatagtgctccccctccgtgcgagttgacgccgccccttgcaggccccctttgccccgaccgcgacgaaaaacgtcgaacggccgcggagcggcaatccttccctcgcattgtcaccgaattctccgccgagccatatggcgttcagagtgagaaaccgcgctttcatacaggggtagctagagagcacacagaataaaaaagcgagccaaagccgtggcctgatggagcgcccacgccacggcgatcgccgccgccaggccgatcgccaagccgcgcgcctcgtatctcgcgcactcacagccagtgaaaccgtacggcataagcgcccacttcacgtgagctccccctaagttaccgtaaaaaccctcaatcccgctaccgcttcatcagataacaagctagaataaaaagactctcgcaggttgaccccctcacctccagcgcaagcagctgaacccccgtttctgcagcattccttcaggttgaaggcgactcgggggaaggcgtccaccaagcgagttccgcacgagccggacagcccagtgggctgtccgagcgagcaggactgccgagcgactggacgccttcccccgagtcgccaaccgccacaagaaaaggaagcccaccatgacccttcagcagcttcgctacctcatcgccattgccgagtacggctccatcaacgcggcggcacagaacctgtacgcctcgcaatcgaacctgtccacggccatcaaggagctggagcaggagctgggcatcaccgtgttcacgcgcagcaaccgcggcgtcacgctcacgaacgacggcacggagcttctgggctacgcgcatcaggtcatcgagcaggccgacatgctggagcggcgctacgccaccggcacggacaagcacctgcggctggccgtgtccacgcagcactacgcgttcagcgtgcaggcgttcgtgaacgtcgtggagcagtgcgagggagacgactacgagttcatcctgcgcgagagcagcaccggcgagatcatcgacgacgtgcgcacgttccgcagcgaggtgggcgtgctctacaccgacggcttcaaccggcgcgtgctgcagaaggccttcgccgacgccgacgtggcgtacgccccgctgttcgacgcgcacgtgcacgtattcgtaggcgagcaccacccgctggcgggcgcgcagctgctggcgcccgaggacttggagcccttcccgcgctactcgttcgagcagggcacggcgaactcgttctactactcggaggagccgctttcgtacctgccccatgcgcgcaacatccgcatctcggatcgcggcacgctcactaacttactgaccagccataacggctatacgctgtccacgggcgtgctgtcggccgaaatgcagtcgggcatcgccagcatccccctcgacgtggacgagcgcatgcaggtgggctatatcatgcacaacgagcgccgcccgagccccctgctgctgcgctacatcgacgaactgcacgccatcatcaaggcgaacccgagcgtggaggcgcgccctgcgtagaggagcacggcgcctctccggtctgcagctgcaaagcccatgaagcgcgtgtggcccgccgtgttcggtcgggaaccgaggccggcgggccacacgctgttgtgcagaacttcccggaggggggaaggtctcgcctagtggatagagctgctcacatagggcgtcttgtccttgagcaccacgtcgtgggcgccgccctcgacgatggacgtggacgacaccacggtgagcttcgccttctgctgcagctcgggaatggtcagcgcgccgcagttgcacatggtggacttcaccttcgacagcgtgaggtccacgttgtccttgagcgtgccggcgtagggcacgtagctgtccacgccctcctcgaacgacatgcccttcttgtcgccgcccaggtcgtagcgctgccagttgcgggcacgcgcggagccttcgccccagtactccttcatgtaggagccgttgatgttcaccttgttcgtggggctctcgtcgaaacgggcgaagtagcggcccagcatgacgaagtcggcgcccatggccagggccagggtcaggtgatggtcgtacacgatgccgccgtcagagcagatgggaatgtagacgcccgtctcctcgaagtactcgtcgcgggccttcgccacctcgatggtggccgtggcctggccgcggccgatgcccttctgctcgcgcgtgatgcagatggagccgccgccgatgccgatcttgatgaagtcggcacccgcgtcggccaggaagcggaagccctcggcgtccaccacgttgcccgcgcccaccttcacggagtcgccgtaatgctcgcgaatccattccagcgtgaacttctgccaatccgagtagccctccgacgagtcgatgcacagcacgtcggcaccggcctccaccagcgccggcacgcgctcggcgtagtcgcgcgtgttgatgcccgcgcccacctggtagcgcttgtgcgcgtccagcatctcgttgggattggacttgtgcgagtcgtagtccttgcggaacaccaggtacatcaagtggtcctcgtcatccaccacgggcagcgagttcagcttgttgtcccagatgatgtcgttggcaaccttcaggctggtatccatgggcgccacgatcatgttctcgcgcggcgtcatgaagctggccaccttctcgtccatggacatacgcgacagacggtagtcgcggtccgtcaccacgcccaccagcttgccgtgcgccgtaccgtcctcggtcacgggcatggtggagtggccgtgcttgtccttgagggccaccacgtcggcaagcgtcatctcgggcgagaggttcgcgtcgctcgtcacgaagccggccttgtagtccttcacgcgggcgaccatggccgcctggtcctcgatgctctgcgagccgtagatgaacgacaggccgccctcggtggccagcgcgatggccatgccgtcgtcggacacggcctgcatgatggcggacaccatggggatgttcagcgagatggccggctcctcgccacggcggtacttcacgagcggcgtcttcaggctcacatcctgcgggatgcattttgccgacgagtaaccgggtaccagcaggtactcgttgaacgtgcgggacggctcatcgaaatagtaggccatgaactcctccatctgcggtcggcgcggtctgcgcgggcgggttgcggcgcggatgcgatcggcgccgcgcggcacataccgccgacaccccgtcaagcatccgttgcttaggtgttacccgctattatagccacggtcgaacggcaaccgagggcaagagcgccgaatatgaagaaatattcgcgcaggacgagccgcagcgagaggacaagggcccacagggcgacgctcatggcgttgcgagctccccgctgtttgcgtaggccctcacgcgatcggccagctcttggcgcgcaagcaggtgaggcaaagctcctacaccatccccagccacacctgcacgatgggcacgtatcccgccacgaacacggccaggatgagcgccggcagcgcgaagcgcacgtagccgcgggcccagcgggggaagcgcgcgccttcgcccgtgtcggcctcgcgcacaaacgcgtcccagccccagccgcggcgcgtggtgcagaacagcaggaacacgagcgcgcccagcggcagcacgttgttcgacatgaggaagtcctcgatggcctggatgttgccgatgcccggcacctccacgcccgcccacacgttgaagcccagcacgcacggcagcgacagcagcgccagcgccacgccgttcaccaggcacgccttgttgcgcgaccagccccactcgtccatgctgaagctcatgatgttctcgaacaccgcgatgaccgtggagagcgccgcgaagctcatgaacaggaagaacagcgtgccccacagctgcccgaacggcatctgcgagaacacgctcggcagcgtgatgaacacgaggcccgggccgcttcccggctccacgccgaacgcgaagcacgcggggaagatgatgaggccggccatgaacgccacgagcgtgtcgagccccgcgatgcgcagcgcctcgcccgtgaggcggtagcgcttgtcgatatagctgccgaagatggacatggagcccacgcccaccgacacggtgaagaacgcctgccccatggccgcgaacacggcgtcggcgaacgttccccagcctcccgcgaacagcttgccgaaatcgggcatgaggtagaatgcgaggccctcctgcgcgcccggcagcgtgaccgcccgcaccacgagcaccgagagcacggcgaacagcgcgatcatcatcaccttcgtgatgcgctccacgccgttgcgcaggccggcgcgcgtcaccagcacgccgatcagcaccacggccagcatgaacgcgaccatctgcaccgggtcggccagcatgccgtcgaacacgcccgccacgccgcccgcatccaggccctcgaacgtccccgcgccgctgaacagcatgaacgcgatcatccagccagccaccgtggtgtagaacatcatgagcaggtagttgcccgcgagcgccggccacttgaaacggcgccacttcgtgcccgccgactccaactcgtcgaagctgcgcgcgatgcccttctggctggcgcgccccaccgcgaactccatcaccaggatgggcagcgcgaacaccaccaagaacagcaggtacatgagcacgaacgccgccccgccgtactcgccggtgatgtaggggaagcgccacacgttgcccaacccgatcgcacaacccgcgctgatcaggatgaaccccaggcgcgagccgaatttttctcgaaccatgaatcctcgcttatcgaaaagcgcccggcggttccacctcgccgagcgcacgaatgcaaccgggaaagtgtagcggaaaacgcctgccgggccaacgcgcgagccgaggacacagcaaacggcctggcatgcgggcggaagcccgcatgccaggccgccaaacgaacctacgcgttcttcaggaacgcctcgtagcccttgaaggcctcgtagatgtcggccttgctcgtgacctcccacggggcgtgcatcgagaggaccggcacgcccgagtcgatgacgtccatgccgtacttggcagggatgtaggcgatggttccgccgccgcccacgtcgaccttgcccagctcggcggtctggaacgacacgcccgcatcgcccatgacgcggcggatgcgcgcaacgtactcggcgctcgcgtcgttggagccgctcttgccgcgcgagcccgtgtacttgttgaacacgaggccacggcccagatacgcgctgttcttcgcctcgaacgcggcggcgtaagcggggtcgaagcccgcggacacgtcggacgacagcatgctcgacgccaccagcgcgcggcgcagcggcagcgggccgccctcgtcggccagctccatgatctcggcgacggtgttctcgaagaactgcgacgccatgcccgtggcgcccacgctgccgatctcctccttgtccaccagcacgcacatgccggtcttctccagcgcggcgtcggctagcgcaagctgcgctgcgagcgacgtgtaagcgcacacgcggtcgtcctgcccgtagccgatgaccatgctgcggtcgaacccgagatcgcgggcgcgcccggccggcacggcctcgatctcggccgacaggaagtcctcttccgcaatgccgtacttctcggccagcagcttgagcgcgaacgccttcaccggttccttctcggccagcttctcgtacaccggcctgtcggcagcgtcggcctcagtggcagcggggtcggcgcccgcggcggcatctccgtcagcctcgtccttctcgatgaccagcgggcggttccctatcaggatgtccaggtcctcgccttccacgacctcgctcgccttcttgcccatctgcttgcccgccaggtggatgagcaggtcggtcacgcagaacacggggtcgcccgcgtcctcgcccacgttcacctcgaccacggtgccgtccgtcttggcaatcacgccgtgcagcgcaagcggcagcgtgacccactggtagttcttgatgccaccgtaatagtgcgtgtcgaggtgcgccaggccgttgctctccgagaacgggttttgcttgaggtcgaggcgcggggagtcgatgtgcgcgcccaggatgttgaagccctccgcaagcggcgccgagcccaggtgcgccaagatgagcgccttgccgtgcgcctgcgcccacaccttgtcgccggctcgcagcgcgcggccctcgcgtaccgcctcgtcgagcgggcggtagccacgctcctcggccagcgcgattgcggcggcggcgcattcgcgctccgtcttgttgtccgagatgaagtcgatgtactcggacgccagctgctcgagcgcctcgaggtcggcctcgtcgtacttcttccatgccacgtcgtgttccatgctgcttcctttcgcatcgggtgcgccggttttcttcgatcgcgcctattatccgccaaatgcaccgccgaaatgctgattgccatcgtttctttgcagaggaaaggcgccgtctgtttcgcgacgatcgcgtcccgatttgtggtgtatcaagggccatcgccggaaccgccggcacccttgccctccgaatcctacccctggccctcctccgggtcaatcgccgtcgagattatcctgtccgcgacctgcctcgcctcgagcaccgaggcctcgtcgggggccggccgctcctcgcgcctccaggcgtgcgcgagcgagggcttcgagatgacgcagcgcgccgaccactcctcgtccgcctcgatgagcgccgcccccaccaggcgtatcagcgattcgcgcgaggggaagccctgcacgacgcccgtgcgccgcttgatctcgcggttggcccgctcctggacgttgttggtgcggatcttggtcctgtgcgacgccgggaaggcgaggtaggcgagcgcctcctcctccgcctccaggagcacctcgcccgccgtccgggagaccttcatgacctcctcggccgccctctggtagcacgcccgcgccacgatcgggctcttctgggcgaaagcggccctcatcgcctcgcgcgcgagcccctgtccctccttgttgtggatgtggccgacgacgtcgcgcatcaggtgcgtgacgcacctctgccaggccgcgccctggaacgtctccgcgatcgccttgcgcagcccctcgtgggcgtcggagacgacgagctgcacgccgtccttcccggcggccactccgcgggcgcgcaggtcggcgaggaacgccctccaatcggcatgggactccgtgtcgacgcagtccacgcccaagaagcgcttgtggccggtgtcgtccagcccgatggcggtcacgaccgcctgggagaccgagcggccctccacccggcacttcacgtaggtcgcgtcgagccacaggtaggcgaacctcactccgtcgaagcgctgccggcggaacgcccccacctccgcgtccaggcactcgcacaggcgcgacacctgcgacttcgacatcgaggagacgccgagggcgccggccacctcctcgaccttgcgggtggatatccccatgacgtacatctcggccacggcggccacgagcgcgcggtccacccggcagtagcgctcgatgaggtcatcggggaagaaggcgccggtcctcagcttcgggatcctcaccttgaggtcgccgaccgaggtgagcaggcttcgctcgcggtagccgtttcggctgttcgagcgctcggggctgcgctcgccgtaggccgccccgcaggcctcgtcggccttcgccgagatgagcgcgttcaagaggatctccaggcacctgcggccgaacgcctgcaggtccgtgcactcctcgagggcctcgagggcgagccccttcacttccgggtcgttgaatagtacagtgtccatgacggtcatcgcctttccctgaattcgttacttgtggtgagaacgattctagacgatggccgtttttctcgggcaggcttcgcctgccctccaaatccggattgatacaccaacattcgggacgctaccttcgcgacgtaccaagccgcgccatatggcgtttcaaacacagttttcaccggtttttgacatgccaatcgcctgaccatcaaacctgttctctacgaacagggaaaacacctaacgtttatatcccatcgcatgccacagaaccgtttccaacgggctaccggtataaaagctgtcattattgtgccgaaagaaggcaaggagccgcagggcgcctcctcggagcaacctaagcccgcgcccgtttctcctcgcgctccctcctcgcgccacccttccgcacctgcttcctttcgcccgctctcaccacgcccgtcctctcgcgctcacctttccgcacctcctcttgccaccctgcccgcgctcttcctcagggtcaaactgtgaatgttccaaggaggcgcgagcgaattcgattatcctcttgcatcggattctcgtccgcggtatgatgcttattgagattgattctcattaagagaaacaatgagagcacgaacagacgagaaggagaatgcacctatgaaggtacgcgcccagattcccaccgctgacaactgcaataacttcagcatcgccaccggcagcgaaaccgccgtcggcaccacgctcgacaacctgaaggccgccatcggtggcgagaccggcgcctccgccaagtacgccgccttcgccaaggccgccaaggagcagggctacgaccagatcgctcgcctgttcgaggccacgtcggccgccgagcagatccacatcggcctcgagtacgccctcgtgagcgaggtcgagcccgactttgagaagcccgccgcccccgactgctctggcgaggccacggacctgaacctcatctccggcgcctgcggcgagatctacgagacgtccgacatgtacccggcgttcatcaagaaggcccaggaagagggcaatgcgaaggccgtccaggtgttcacccgcgccaagctggccgagtccgtgcatgccgagcgctacctggccgcgtacaacgacctcgacgccgctgacgacgacgcgttctacctctgccccatctgcggctacatccacaagggcgaggatttcgaaaagtgccccatctgcttctgcccgaaggccacgttcaccgcgttctaagccgcgcgagcaaccgcgctcgccttcccgccgagcgcacatttccccgagagcgaccgcctgccggcggtcgctctcgtatgcgcggagttgcaagcgctgctaagcctcgtatctactgggagcaacttgcccgcacaatggcccctccgcaccatcgtcccgatcgcgaggtcgcatccccgaagtcgcaagcaccttttcgggccgtgttccgccgccatctttccagatgtttcacgtgaaacatctgttcttcttttgccgcacggcaaatgggctaccatggaggcgaccgaaaaaacggagggaaggcggcatcatgggccaggaggacggaaccgggagcgggaccatcgacagcgtgctcgcgcacaaccgggcgttcgtggaaggcggcgagttcgcgcgctatgcgaccgacaagtaccccgacaagaagttggccgtggtctcgtgcatggacacgcggctcaccgagcttctggcggcggcgctcgggctgaagaacggcgatgcgaagatcatcaaggtggccggcgccgaggtggcccaccccttcggcagcgtcatgcgctcgctgctgatcgccgtgtgcgagctgggcgtggaggatatcatggtcgtggcgcacacgaattgcggggcacagcatatgagcggggcggccatgatcgacagcatgcgccgcttgggcgtgtcggagcagcgcatcgagttcgcgcgccactgcggcatcgacttcgaccgctggctcgccggcttcggcgacaccgaggagtccgtgcgcaagagcgtcgacctcatccgcaaacaccccgtcatgccgccccacgtgcgcgtagccggcttcgtgatggactccgtcaccggcgagctggtggcagtggcgtagcagacacaagcgaggagcctgggcaaacggcttgtgcgccttccgtatccatctcaccgcgctctccctcggcgtcgcacgcccgctcgcatcccgcccgccggttcgcatcccgcgtgttcgttcgcgtttccctacccttcggcctacggctcgacaagcgcctgctccaacaccaggtcacgcgtgcattcctcgggcgtgaacggcacgtgcacgtcaggcgcgagaccccggccccgcaggccgcgaccctcgtgggcgtcctccgtcttggctatgggatacacgagcgagaatatctcgtcgagcggcgcgaccacgaggttcgcgtagtccaggctgccccgcgtcgcgcggcccacggagcgcaccttgccgcacccctgcgcggcggcgcggcgcgcgatggccgccagccgctcggccggaccgctcgtgcgcacgtcggtgagcagcagcgtcctctgccccgcgggggccggcgggaacagcatgtcctcctcgagctccgcctccttcacgaagccttggcccgcgcaggcggccacgtggtcgatctcggcctgcacccaggccctccccgcctcgtcgctcatatccagcaggcgcgcgagctgacgtgcgcgcagccgcgcgttgcgctcggtgtagcgcgtgtagacgatctgctggcccatgaggtccctcaggttgacctctcggtcgaagaaaagcgccatcaggccgaacgcgttgccgatcatgccctcccccgcatcgcggatgtccacgatcacccggtcggcgcgctggatgtcgtcgaagcggagctgcatcgcctgcagcaccgacgcatccacgaaatggtgagcggcgatgacgaccgcgcgctcgtcgccgcgcggtcctgcgccctcatgcagctcgatggtcggaggccgcaggctcgccgcgagaccagggcgcgggaagcgctccaccggcaggtcctcctcggcgccgtcggcatggcgcaccagcacgcgcatgcaccgcgcgacttcctcgtcccagagctggcgctcgggatcgtcgccgttcacggggttgcccggcaggcttgccaagtgctcgtccggcgtccgaccgtccagcaggcccacggcgtcgccgggcgcgaggcggtcgtcttcgcgcacctcggtcacgtagagtgcgtcgccatggcgacgcaccgagaaaccgcacgtcgtcggtcgaaaatcagcctttgcagacgcctcgaatgccaggcctggatcttggaaccctgccaagtagcgcctcacgccttgcacgaacagctcgtcgtcgagcgcacccgccgcttcggcctccgcgagcgcggccagccacgaccacgctccaccgcacggggcgcactcgggctgtcccgcgtagtccgcctccataatatgagcaaccgtgcgcgcaatcgcgctgtacccttccgccatgccgccgcctctcgttgttgcgtttcgcgctccgccgccacggcccttccatcgtgcggcatgcctttcggagcctattatagcggctccccgccgcccgcctcacgcctccagcagcacctcgcccgttagcgcttccacacgcacgctgttcacgcggccgtcggccacgtcgatcttggcgatgcagcggggaaaaccgccgcgcgggcggaacgcggctccggggcacacgacgtacgtggccggccgtgcctcggggccggtgacgatctcgggcacgtgcgtatgcccgtggacgcacacctggggaatgggatcgcccggcgcgagcgcccccgagcccgcgaagtttatcttcacgtcgcgcgggtagtgggccaccaggaacctcacgccgtcgatgacgggatgcgcgaaacggctgaccgcctgcccgtactcgtcgaagtcgttgttccccagcaccgccgtcacgggcgccagcgtttccagctcgcggaggatgggcgggttgccgatgtcgcccgcgtggatgatgtggtcgctgtcggccaaggccgcatacgccgcctccgacagctgtccgtgcgtatccgagatgatgccgatgacggtcatagcgcactcctttccgacgcgcgcccgctttcggcgcgctcctcctccaccaggtcgatcaaatcctggtgcgtgtggatatccagcttggcgtacacgtgcttgacgtgggccttcacggtgttgcgcgacacgaccagctgttcttggatgtaggcgcggtcgcgcccgcgcgccagcatcatgaatacctccagctcgcgcgggctcaagccgtagcgctcggccagcgtgtggcaacgctccgcgaactcctgctcgggcgacttcgcaaccgcctggtccaccggcgtgacgcccgcgatagtctcggcgaagctgaagtgcttgagcccgatgagcgcatagcccacgaacacgaggatcagcgtgcccgtgacgaaatcgaccgccggagaccttgcgccgaacaggtcgttcgaccacacgcccagcgctgcacccgcggtggaacccagcccggacacaccgcggccccaggcgaacgtggccacggccgcacgcgggttgcgccccgccacggcaatgagcacgagccacgccaccatgtcgaacagcgcgttgccggccgcgagcagcgtcacgcttcccacagccgcgtatgcgccgccggccgacaccaccaggaacccagccaccaccagcagcacagaaacctgcgccagcagatcggccggaaacgttcggcgcgacaacagcacatacagcgccaccgtcgccacgggaacgatacccaggaagtcggataccggcacgccgcccacctcgccgaagcgcaacgagtagccgaacgccacgcggaacaggaacaggcacacgaacaattggctggccagcggcagaaacgtggagggctgggtgacggagaaatcggccggcgcctcgccacactccgtagcttgaagcacgggctgcgccaagcgccacaccagggccaccgtggcgaagggcagcagcgcgaacagcaccgtgcccgcccccgccggaatcacccacaccagggccgtcaccgcgtattccgcgacgaacgccaacgcaatgcaagctcccgcctggcgcacctccaagcgcgaggctgccgcacccaccatcacgatggcccatccacgcccgatggacagcgcgcaagctgcggcggtaagcgccaccgcgctgccggcgtacagccctgccggcagcagtgccgagcccaccgcaagcagcacgaggcaacccgccgtgagcgcccgcatgcgcagaagcggcggcctaaacgtggccacaaggcccaccgcaatgagcgtagcggcattggccagcacggacacgtcgcgagcgtaggtgaacaccgcgtcaaagcgcgggaacaccaccacattcatgagcgacgtggtgagcagcacgcacagaagcgccgcacacacccgccagaacggcgcggcgaacagggagggggattgttccggggaagcggtcatgcccgccattgtagcatgcacggcttccccaacaggtgcgcagctgccggcaaggcacagcagacggcgacgccccggaggagtagcggggcgtcgccgaagggagggaaagcggcaggctcgggtgaaagagggaaagagtccgagcctgccgcaggggttggtgggtggcacggacggcgcgaaagggaacgcgccgcccggaagccgcgggaaggcccagccggctgcggttgccggcgggcacggccacaagctctatgcctggccggtggcggccaacatgccggcgcggcggccgaaggtcatcgtgcgaccacaggccaggcccgtgaacaggttcggatagctcacgctgaagaagccacccgagcagtcgccggtcaggtacagaccctccaccggtgtgccgtcttcgcgcacgggatgcatatccgtgtcgatcatcacgccgtcgagcgtggccaggaaccaggcgccggtgcgcacgccgtagaacggcggcgtgtccagcttcatcaggcggtacgcctccttgttgtagtcctcgtcgcgcccttgctcggcaaggtggttgtagcgctgccacgacttcaccgtgttctccacggggatgttcagcttctcggccagctcctccatggtgtcggcctgctggatgtaaccggcctcgatgagcttctcgaactcggaggccatggactcgatggtgcggttcgacggcgcgccgttgtcgaacgggtacaggcggcagcagcccacctcgttcatctggcgcacctgctcggcgtaattcgcgtcccagatatcgcagtacgtgtggtgcggctgcatgtaggccgaatgcagcatgtagtcgtaggggccggactcgttgcagaagcggttgccgttcaggttcaccttcatgaacggctgctcgccgaaccagaaccactcgcccaccgtgccgttgccagccgtctggtcgggcttgcagcacgcacggttgaacgtgcacgccgcgccgatcgggtccatctggccgcctgcccacagagccgccttgatgccgtcgccggtggggttgccgcccttgccgggagccgcgatgcgcagcgcctggttccacggctggcgggcctccatcatctccaggttgttgccgtagccgcccgttgataggatgacgcccttgctggcgttgatgcgcaggtagtggcggtcgttcacatcgcgggcgatcacgccggtcacgcggccggagctgtcctgcacgcacttcaccagctcggtgttccagcggaactcggcgcccttctcctgcgcgtattccatgagcgacacgccgaagctgaagctcttgtcgtccttcgagagggcagttttctcgggactgtggccggtggcccacgccttgtcgcgcgcgccctgtcccgtcgtgccgatggagccctcgaagttcatgaccatgcggccgtcgcgctccacgatgccggtgatccagtccagcatggggccggactcgttcgcccacagcttcaccaggtcgtagttgatgaagccgttggcatagcggacaatgtcctccacggcctccatcttgtcgatctcgaactggggatactctgcgaacgacgccttctgcagagcagagtcgatggcgccgatgtcctcgcgcgggttcgccaccttggacacgcggtcgatgcccagcacgcgagcgccgttctcggcggcggagatgatggccggcagcccaccggtgcggcagcccaccaccaacacctccacgtccagcgtctcggcgatatcggcctcgggcacctcgggcgccgatcccagccaggttggcgtgcccgtctccccgacgcgtgcgttagcgggggctgcggcggcatccacggcgtagccgttgccgcacccagccagcgcacccgctgcggcggcgccgagcgcggtgatgcccgcccccttgaggaagctgcggcgcgagagcccgctgcgctcgttactcattgggagcctcccatccctcgggcgcggtcagcgcatggcattcgttgcacacgagcgtgctcttctcatgcaccttatggcagtcgccgcattcaagcgcgttgtcctggtggctggaatgcgggttgtacttctcgtcgttgccctcgaagccccaagtgcctgcaaccacctcgtccatgctgtggcagccgctgcgcgcgcagaactcctcggaggcgaactccttgcccgtggccagcatgcccgtggcctcgtccatcggatagctgtcgctcgcccatgccatggcctcggacacctgcgtggcgaactcggcctcgtggcagctcaggcatgtgtcgccggccgccgcgtgctgcgtgaccagcttgcccgggtcgccctcgctgtacgtctccacgtacttgtccatggggctgtggcagatggcgttgcagaagctgggctgctcgtgccacacccacgccccaatgccggctaccagcaccaccgccacgatgacgcccgccacgatgacgccgcgccgcgcgcgtttcggcgcgggggcagccgggttggcatcctgcgaggcaccggcagccggggtgccaggggcactcgaggcgcccgggccgctgtcggcaccgggagcagccggggcactcggagccccgatcgcgccgtctgcgctatccttgtcgaccatgtcctcctccttctccttctctggttcgatcgatgaaacccttcggccgcatgatgcaggccagcggagcaaccgaccattacccccgtgggggcatttttacgtttttgctggtgagaggtttaattggaaagggaatggcacggaggggaaaccaccctccgaagaagaagccgcccgttgccgaggagagagcgcagccaaagcctcccgttgtcggggggggtgcacggccgaagccgcccgccacagcggcggaggggcctcgtttcgcctacggccgcaggggtgtcgacgcaccatgcggcaactgcgccagaggcgtgcaagataacggcaaggtgtgcatggcggatatgcaagataccggcaagatcggaacggcggatacacaaggattggacaagatcagggcgattccccgacggcgatattacggtcgcccggcaaggttgcggcggtaggatgggggaacggagcgcagaggcggcgcggtgccacatccctctccaaccttatcccctcttgcagggcgaaacgggaagggggtggcaaccatgaccgatttggttttgcttacggcaatccttgagctgatcgccagcgcagtgcatctaactgcggctataatagaaaggctccccgtccgtaaggacaaggagcgctaaccaaagccaaaccgccgaagcgattcgagagccgtggggagttagcagctccctgcggctcgtcttgcatgatagcaaaaaaaccaaagcgcgtgccacttatatcgaagccttgggcacgtctatacccatatttcacatccatcttcggcagccgaattcccgctgaagcccgaaccgtccaaggagagccagtcgttgctcgagcgcgaccggcaaccccgcctcctatccttctccttcatcccaagggagcatctgcatgacagggatgtggcgaggggtattcgctttggcggccccagatagacgtgcgggaaggcaggcgcggcgggggatactctggggcgagggttgcgggcatctccgctttcgcactcggaagttgacgaaaccgtaacttttagcactcgttgcttgacagtgctaatgcaacgttttataacagtctcgtacagagaaaaccgcacagatagaggcttaggttttctcattcgatccgacatccgaccgacaagccggatgcgccgccgaagggagcccgagcctcgcacgacacgtaggagagtgattagtatggccatgatggtacccatgcggaggaaccgcaacctgctgagcgagctgatgaccgacccgttcgacgcgttcttcaacgcggcctcggccccgatgcaggcgatgcagaagatgtcgcccacgctcatgcgcaccgacatcaaggagacggacggcggctacgagctgaccatcgacctgccgggcttcaagaaggatgacgtgcaggccgaactcaaggatggctaccttaccatcaacgcgcagacgcagagcgagtccgaggacaaggacgaggaaggcacctacgtgcgcaaggagcgcttcagcggcaagtgcagccgcacgttctacgtgggcgacgacgtggaggaagacgacatcaaggcgaagttcgaggacggcgtgctgaagatcgccgtgccgaagaagcaggagcagccgaagctcgaggagaagaagaccatcgccatcgagggctagttctgcgaggtacacggccagtgcgcaacggaaggcgaccgcaaggtcgccttcctgctatgatgggacgcaagccattcgcagcactatcgaggaggaaccatggacgacgagacgcggcgcgggatcgaggcgttccggcgctgggtggacgagacgaagccgggacgcatggtgttcttcggcggggcgggcgtgtccaccgagagcggcatccccgacttccgcagccctgacgggctgtacgcgcagaagtacccccatccgcccgagcagatgatctcgcgcagcttcttcgacgcgcatccggcggagttcttcgccttctacagcgaccgcatgctcgcgctggacgcccagccgaaccgcgcgcaccggaagctggcggagctggagcaggcgggcaccttgtccgccgtggtcacgcagaacatcgacggcctgcaccagaaggccggcagcaagcgcgtgctggagctgcacggcagcgtgctgcggaacttctgcatggattgcggtgcggcatacccggtggacgagctgctgcgcctgcgcgacgaggccgccgacggcgtgccgcgctgccccgcgtgcggcggcatcgtgaagcccgacgtcgtgctgtacgaggaagcgctcgacgagcgcacgctccaggcatccgtcgacgccatcgcccgtgccgacctcctggtggtggcaggcacgtcgctcgccgtgtacccagccgcgggcctcatcgacttcttccaaggcgaccacctggtcatcgtgaaccgcacccccaccccgcgcgaccgccaggccgacctctgcctagccgcgaacgtgggcgacgtgttcgacttctagccgcaaccgcgacccgtcgtcccgcgctccggcgagcaacgcgaacgaatgtttcacgtgaaacatcggcgcctgctcccggaaacgtagagggacggtacgtcaagctaccgagaaggagcaaccctatgcccgagaccacccgcaatgcccctgccgcccccactatcgacggcaccaccagcgcagccgccagcgccacaaatgcccccaccgccagcgccgcttcgcccacgcccacgttcgccggcctgcgccaagtatccgacggctggataaagaagtacgtgctgacgtacacgatgcccgacggctcgacctatgagtacgagagcgcctcgcgcaaggggccggaggcgtaccgcgccgagctggaggcgcacgcgcgcggcgagagcgcggcatccgacgccgtgtgcatcgtgccgcagacacccgacggccggctgctgctcatccgcgagttccgctatccgttgaacagctggtgcatcgcattccccgccgggctcgtggacccgggcgaggacctggcggcagccgtggaccgcgagctgcgcgaggagacgggctacgcgctgcgcgccgacttgggcgccgcggcgctcgaccccctgccgcaggcgggcttctcgtccaccggcctcaccgacgagacggtgcaggtggtgttcgcacaggtggagcgcgtggccgacgcgcaacccgagccggccgagctcatcgagccgttcctgctgcccatcgccgacatcccgcgcttcctcgccgagaacgacacgcccatcggcacccgcgcgcagctcgtgctcgaggcgttcgcacgccgccgctaggggcgcgcgagcagctggggcgaagtagcgagcgacgcccgcccgctacttcgccctcacgcgggcatggatgccgccgcgcaggttcggaacgccctgggcgggatcgaggttccaatccgcatcggggaacagcatgccgtcgttgtggaggcaggcgccgctcaagccggccgcgacgcccggggccgtctcgggcttccaccagccgtgcggcacgcgcagcgtgccctcaggctgcgcctcatccaggtgggacaacagctccacctgcccgtacgccgtctccaccacgcaccaggcgccctcgcctatgccctcggccgccgcatcggccgggttgatgaagaaccgcggttccggctcctgcgcgcgcagctcgggcatctggtgcaggttcgtgttgtacgacttccgctcgcggaagcccgcgaacgccacgtaagggtacgctccctccggcgcggcctcgcagccgggatcggacggctcctcgtaggagggcagcgggtcgaagcccagctcgaccagcacggagctggccagctccaccttgcccgaaggcgtgacgaaccgtcccggcgcagccagctcgcgcaggaggggctccggcgcccgcgcgcacgcgtcctcccacgtgaggccgagcggcgccagccgccaatcgtacagctcgtgctcgttcgcccaagggaaccgttccgcaaagcccaggcggtcggccaggcccttcaccacgtagtaccagctcttgcactggcccgccggcctgcggaacgcctgccccgccgagaagaccggccccacgtcgaacggcgaccccaacacgtcgcgctcggcccacatatcgcccggcagcacgtagtcggccagctgcgccgtgggcgtgagccaatgctcgaaggccaccacgaggtcctggttcatgagcgcgtcgacgatgccctgctggttcgcatagctcatcaccgtgttgttcgccacggagaagaaggccttcacggggtagggcccctcgccgcgcatggcggcgaacagcgatgccggatcgcaggcgcacgactcggccagcaggtcgggctcgtagggtacgccttcgcgctcgttggcctggcggtagaggtccgaggccgcgaacgtgagcagcggatgggtgccgcgccccagctggagggcgcgcttctcggttggcagcagctcgaacgcggccagctcggcgttgcccacgcccccgagcgccggcccgcacaccgcctcgctcttgttcacgaagccgcagagggcgcgcaggatgcactgcgcctgcaatagcgacgtggagttgcgctgcatgtcgcccaccacgccccaggggatgatggccgcctgcgcccgcgcgtacacgcgcgccgtctcgcgcacgagctcggcgtcgatgccgcagagggcggccacgcgctcgggagggtactccgccgcccgagcggccagctcgtcgaagcccgtgcacgaaccctccacgaaggcgcggtcgtagagcccctccccgatgacgacgttgatccacccgagcgcgagcgccgcatcggtgccgtagcggatgcgcaggtggtagtgcgcgcgcttcgccgtggccgtctcgcgggggtcgacctcgatgagcaccgccccgcgctcgagcgctgcgttcagagccaggtactcgccgggccagcgctcgcggtcgcggtcctgcccgaagtagacgatgcagtcggtccgctcccagtccgccccggcgaaccagccgtacaccgcccggtgcacctgggcggtgttgcccatgcacagcgccaccggcgccgtgtagttgggagtgcccaggcagttcatcaggcggcgggtgatgccgccgaagcccatgttgagcggcatctcggcgaacgccacggcctccgggccgtaagcgtccgccaccgcccgcagccgcgcggctatctcgtcgagcgcctggtcccaggacatctcctgccactgcggctcgccgcgttcgcccacgttcttcagcggcacggtcacgcggtcgggatgcaggcggtacgcatccaccatgcccgccttcgggcagatggccgggaatgccggatcagccggcagcacgcgcagccgatccccgtcgacctcggccttgacccgacagcccccgtcgcagaacacgcaggtcgtgtacttcgtctccatggctccccctcgcacgtcgtccaccggcacgctatccccccgtctaggcagaatatacgcgcgcaacgccacaggcgcaagggcgcgccacggtgcgctgctagcggttgatcacctgtatctggaggccttccatgacgtcgagggccttctcgtgaaggtcggggtcgaacgaggccgtgcaggcggcgtccacgatgacgggcacctcggggcaggcggtcttcgccagcacggcgttcgagatgatgcagatgttggacaccaggcccacgatctctatgctcgcgaacggcagcttgcccaccgcgtcggcagcacgctgcgactggcggcagcgctcgaagaacgcggccgagccgaacgccggcttgcagaacacggtgtcggagtcgcgcaggcagtccgccacctggccgtacaggtcgtggccgggcgtgccctccacgcaatgcgctacggggaggttcttcccctcctgcgtgtcaaggtagtcgcgccggtgcgtgtcgaaggtgaacgccacctcgtcgcccgcctcgcggtacgcggcgatcttgtcggcgatgggcttctccagcttctcggcaccgggaaaacccaaggccccgtccacaaagtcgttctggtagtccaccaccatgagcaaacgtttcatgatcctgttcctccccttcatctggccgtcattatcggcctggagcggcgcacggtacccgccgttcagccgaccggcgcggccggctccgtcaaaggctccgcctcatggcgcgccagctggtccaaaagccagcggtattcctgctgcacgcgctcgtacaacgccgcgacgggaaggcatgcgcgctgcaccacggccatgacctcgtcgtaatcgcgcaccatcaccgccacgcacgaaccgtcgatcaacccgcggtcgcgctggtcggccagcacctccagcacccgctctttcgggaacgcctccttgtagctgcgggtgcccaccagcgcgctcacgatgtcggccactgcgatgatgcggtccgccatcttcagctcgacagccgcgaggccgcgcggctagcccgagccgtcgagcttctcgtgatgtcgggccgccgcagcggcgatgtcattgggcacgcaaccggccaggatcgactcggtcaaggtcacatgcgtgcgcatgacggccatctcgcgggcatcgaggcgccccggcttctccaaaatgccgagcgggatgccgatcttgcccacgtcatgcagcagcgcggcgcagtacacacggcccctctcggcttcgtcggctatcaggcggcgggctatctcgtaggccgtccaggccgtggtcaccgtatgggtgacggtgtggcggctgcgaaagtcgatgacatgcacgagcatgtcgaggaaggccgcagcggcatcaggatcggccgcagccgacaccttgcgcagcgcatcccccgcatcgaaaccgccgcgcagctgcccgagcaggcctgcgcgccgctccgcttcctggaacagggccgtcgcctcgaacgagaactggcccgcaggagcgctccccagcgcatgcgccacctcctcggcgcttgcccggggacgctccagcaacagcatgtccacgcggtcggccacctgcagcacctgcgcgaggaaacgcaccgccggatcttggtcggtgaacaggcgatagggcatatggtggtagagcacgacctcggcatagccggccaacggcgagagctccttgaagaaaaggtagccgtagaacgaatgctcccacacgtcgcatgactcgaactccacgagccgatcgatctcctcggtgcaataggcgccgatgtcgtgcatgagcgccatgaggcacgcgtcgcggcgccttgccggctcccaccccgccgcctcgagcatggcgtccatgatcgcgcccacccgcaggccgtgatccaccaaccgggaatccacgcagttgagcgcccgctggatcatcacggtcgcgccggctgcacccaggtagtcggacaaccggaccggatggtcgaggcgcggaggtgcaagggccacgaggccctcggcgtcatgggcggccgacgacatgctagtcgagcgcggctatctgggctcgggccttgtccatctgggcctccacatcgatacccacgatatccagcccctcggcggccacgaaccgcgtctcgggaatgccgaacatcttggcgatgccgcagaagtactcgtagccgaagttcgcgccctccacgaacccgccgcacgacgcgatataggtgaggcggtccgccttgcagatgccctcgcaccgcgcgtcctcggtgtagtggaacgcgatgtcgcacacgctcacatgctccatatacaccttgagcgccgccgggaacgacaggtcccagtacggcgcgccgatgacgacctcatcggcctcggcgaactggtgcgacaggtcgaagatgggatcgtcccatgccttcgccttctgcttctcggtacggtaggccaccatctgggcgtcgaacggcttgaggccgagcgtggccaagtcgacttcgacgacctcttctttgtcctgcaggtattcacggcacagtgcgagcgtgcgcgagtcctctccgcgcatgcaggcgttcacgaacagcgtagtcatgaaagctccttcggtatatcatcgtgcgcctccgagggcgcacatcctataatagcgcacccgcgccgggagcggcgcgggtgcgggcaatgcgaaaagcgaaccgggccgagcggcggcctaaaaccgcagcgcatgggtgaagccggcccagccaaggccgtcggtatcgcgcacgcgggcgccgaacgtgggggcatgcacgtagtgggtgccgcccgcattgcaggcgatgcccacgtggccgttgtagccgtcgccgtagcccacccacagcacgtcgccgggctgcgcctgggaaacgggaaggcgagccttcgccgcgttgtacagcgcctcggtctggtgcggaagcgacatgcccacttgcaaatacgcccaacgaaccaggcccgagcagtcgaacgcatccggcccggccgcaccccatacgtaggggcagccgatgcgcgagagcgcgtagtccaccacggagccctgggatggaacgggcgacgtcgtgcccgagtagccgtacgaacgcgagcgcgccgcggctatctcggcctggcgtgccgcttcctgctcctgcgcaagcagcgactgggcctcagcgtccagctgggcgagcagcgcctgcagctccgccaccgagcgctcggcgtcctccttgatgcgctgggcctcggcagccgcctcggctgcaatctgctcctggcgctcgagctctgccttggcggcttcgacctcggcgcgcaggtccttcgtctgctgcacgaagctggcgtcgttgtcgttcagcttctccagcagatcccaattctgggcgaactcctcgaacgtggtggcgcccatgatgaagtcgagcaccgaggactgcccggtgcggtacatgctgcgggcccgggagcccagcttctcctgcaatccggcgatctgcgcggtcgcctcgtcgatgcgcgcctgggcatcggcaacggcctgctgggcagccgcgtgctcgtcgagcgccttgtagtactgctccgtgaccacgtccagctgcgcctgcatgtccacgatgcgcgcgcggacggcgtcggcctccgccagcttgtcggcggcggtgggctcggcgaacgccagagccggcttcaaaagcacggccgcgcccagtgcggcagcgcctgtcaaaaacgtgcggcggtcaaggccgcgcgtggattcgctcattcgtcaaacctccctcgcgatccgggatacgccgcctcgctcggtataatacgaggtcaaagcatataaatgccaggcgttccacagtcaacgcgtcggtgacgactataacacgccccggcaacgcgcgcgccaatcttcacgcttcgcacgtagccgcaggtgggttggggtggcgtatctcgtcgggagcgtcgagcggttccatgtccagatgcagcgcctgctccaccaccttcatgagcgcctcgtcggagatggcggggttgatcttcacgaggcccaccaggccgaagatgaccacgcagaacatctcgtacacgaactctatctccacctgatggtacgccgcgtactcggccacgatattcccgttgatgcagtccaccgtctcgcgcacggcgcgcacgtcgaatgcgtcgcgcacgcccagctcctccagcacggctatcatggggcgctggttgccctcggcgtcgtagagcgcgcggcggaacgtggcgatgcacgcgcgcagcgaccccgacgtgtcaccgaaccggcgcgactcgttccacacgatgacgctctccaccaggtcttccacgtaatcgtccaatacggcgtccacgacggcctgcttgttctcgaagtagtagtacaccagctcgcgcgtgacgccggcctcggcggccacgtccttcaccgtggtcttcgccacgccctggcgctcgaacagggagcgcgccgccagcatgatgtcgccggccggccccgtgaggcgccgactctcggcgagcgagcgaccgcactcgcgctgcacgggcgcgtatctggtctgcctggtgcccagccgcatggcccctcccctcgctccgaagcgcgcatggacgcgcgcggggtgctcctgcacgcgtccattatacgggagggaagaggcgccggacatgcgcgcggcctagctgttctcctccacgacccgctggtaggccttggtgtcgacgtacagctcgtcggtgagcgggttgagcttgcgctgccggatgcggcggaactggaacacggccagcgccacgttcgaggcgagcgcgagcaggctcaccgcgaagaacgccgcgggattgtgcgtggtggggatgggcgccagcacgtcggcgaactgcggcaccgtcatcacgaacataatccagagcccgagcgtctgcgcgcgatgctgcagccacgcccccttcttgatgaagaacgtggggatggtgcacgccagcaagagcgccaggccgcagtacgcggagtggtcggagatgcagttgtacgtgtaggcgaagttccacaggtcgtaggcgatgatccacgcccagattatgtccggccagatcatgtcgcgggcggagtccttcgagatgaagatgccgaaccagccgcagatggtgacgatgttcaggatgccggcaatgccgttcatgatgttccacggcccggagatggtccacaggttctctacgatgccgccctgccacaacccgaagccgaacacctggaagtcgcggatcacggcctcggcgatgttgatggccaggatgagcggcggaaagcagagcgcccagcgcttctcgtagaggtggtgcgtgcggccgtccgcgccgcgccatttcacgaagcgcagcgcgatgaagccgaggcagcccgccagcgccgagtacgtcttcacccagttgaaccacgtgcccgtgccgtacgggttgccgggcgctgccgtggtgggccacacgaagacggtgagcacgagcggcaccaccgcgaacagcgcgatgccggcccacagcttcacgcgccccagctcgttgaacgccatgagtgcgaacaggatgaacagccagatggcccagtacagcggatcttcggcctggtacaggatacccacgaggatcgcccccttcatgcgagcccgtgcacgtatgagcccctcgcccaccgcgcgtttgcccgcagtatacggggcgctcgcaggcgaagtctttcacacgggagggcggtttgtgaaagaagcggcatggccggcgatgctagactggcggcgtcaacgttgccggcatcgcatgccgttccacggcagctgccgcttcaccgggggaaggggtttcgccatgaccgtgcctgtgtgggtcacgccgatctcgatggttgtctacaccgtgctgctcatgctgctcaccgagttcatgcgacggcattaccgcacgtcgatgtgggtgtgggtggtgtcgctcgtcaccattccgctatggatagccaacatccccggggacgactggttccgctgggccaagaacctctccgtcatcctgccgctcatcttcgccggcctcgggcgcatcgccgccgtggagcagaaggacacgccgttctggcggaccatgcgcaagcgctgggtgcgctgggtgctgtacggcatcgtgttctgcaacatcgccgaggccacgctgcgcgacgtgcagatgggcaacatgatgaacgcgctcgccggcttcatcctgtgcgtcaccatgccgttcggcgacaagttctggaagtacgacacctccagccacggcgagatcctctcctacaccgtgcccatgtggaacttcctctacaccacctggaacgcctgcttcgtgtacgccgagggccatgagttcttcgcgtccacctgctgcatcctggcggcggccgagctgtaccccattgtcatgcgccggccggagctctacatcaccgggcgcatctacacgctgggcgcgcaccttctgctgcgcagctgcttcccgctgctgttccccaccatcatgaacagcgccgcgtggttcaaccccgacttcatggcaggatggggcctgttcaacggtatcatcggcatcccgttcgtgttctggtactgctaccagctgcacacaggccgtgccgacgtggcgttccggcgcggcaaggcgcgcgcggtctacctggaagggcgtgcgaacggcacgatcgacgagtacggcgacccggtagccttgcccgcgccggctgcgggcaagccgcaggcccccgcgctcccggacgacgacgccgcgcccgtcgcggggtgacgggcgcgcctaccggcccgaggcctgagcgtcgtccagcgcgttgagggcggcgttgtagccgccggagccgtagcttaggcatttcgacacgcgcgcgatggtggtggccgaggcgcccgtggcctcctcgatggcggcgtaggacttgccggcatcgagcaggcgcgccacggccaaccgctgcgaggtctccttgatctcgcggatggtgaacaagtcctccagcagcgtgtagacggtgtcctcgtcatcgagcgcggcgaacacgcgcagcaggtcctccacctccggcgtcctgagatcgctcatgctacttccccattctcatcaggccgtactctattgagtcgaccagtgcgttccatgacgcctcgatgatgttctcggagacgccgatggttccccaggtgccctcggcgtcgcgcgtggtgatgacgacgcgggtgatggcgcccgtgcccacgttctcgtcgaggatgcgcactttgtagtccaccagctccatgcccgccacctcggggaagaactgcgtgatggccaggcgcagcgcgttgtcgagcgcgcccacggggccggtgccctcgcccgtggccacgaagcgctcgtcgcccacgtgtatcttgatggtggcctcgctcatggcgtccttcgcgcgggcgccggtgtcctcgtggtcgtccacgatgacgcggaagctctccagcgtgaagtgcggccggtaggtgcccaggtgccactgcagcagcacggcgagcgagccgtcggccacctcgtaggagtagccctgcgcctcgcgcgccttgatgtcgtcgaggatggcctgcgcctgctcgggatgcgcggccaggtcgacgcctaggctggccgccttcgccacgagcgacgccttgcccgctagctcgctcaccagcatgcgctgcgcgttgcccacgttctcggggcgcgtgtgctcgtaggcttccggaaaccgcgcgatggcgctggcgtgcagcccgcccttgtgcgcgaacgccgatgcgcccgtgtagggatggtgcgtgggcacggccatgttgcaggtctcggccacgaactgcgacacgctggtcagctggcgcagcttgtcggggccgacggtggagcagcccatcttcagctccaggtcggcgatcgtggtgagcaggtcggtgttgcccacgcgctcgccgaagccgttgacggtgccctgcacctgggtcgccccggcgcgcacggcggccagcgtgttcgccacggcgcagcccgaatcgttgtggcagtggataccgatgcgctgccccggcagctcggccgccacggcggccacgatctcgcccacctcatgcggcagcgcgccgccgttcgtctcgcagaggtcgatagagtgggcgccggcctcgctggccgcgcgcacgcaggcgagcgcgtaggcggggttggccttgtagccgtcgaagaagtgctcggcgtcgaacaccacctcgcggccctgcgccttcaggaacgccaccgaatcggcgatcatgcgcaggttctcgtcgagcgtggtgagcagtgcgcgcgtcacctgggcatcccacgtcttgcccacgatggtgacgatgggcgcgccgctggccacaaggtcggcgagcccctggtcgtcggccgccgccacgcccttcttgcacgtggagccgaacgccgcgatgcgcgcgtgcgcaaggggcagctcccgcacgcgctggaagaacgcgatgtctttggggttcgacgcggggaagccgccctcgatggcatcgatgccgaacgcatcgagccgctccacgatgcgcagcttgtcctcgagcgagagcgtgatgccctcgctctgctccccgtcgcgcagcgtgctgtcgtaggtgagaatcttctgggtcatggcctttgtcgcgcttatacttccgcgagccagtcggcgtagtcgtcgatctggccgtaggccacggcgaagtagcggtcctgcagggcgcgggtgacctcgcccggcttgccgatctcgcgaccgtcgacgctgccgatgggcgtgagctcggcggcggaaccggtcatgaacacctcgtcggcgatgtagaggtcgctacgggtgaggctctcctcgatagcggggatctccaggtcgtcggccagacagagcaccgtgtcgcgcgtgatgccctccagcaggccgtcggacaggggcggcgtggacagcacgccgtcgcgcacgatgaacaggttctcgccggtgccctcgcacacaaggccggcctcgttcagcatgatggcctcggcgtagccatgctccttggcctcgagcttcgccaagatggagttcatgtaggacgccgtgctcttcaccgcgggagggatggcgttgttcgagcgctggcgccacgaggacacgcccacggccacgccgttctccagcgcgtcggcgcccaggtagctctcccacggccacacggcaatggccacgtcggtgggcgagccggtgggatcgacgcccatcacgccgtagccgcggtacacgagcgggcggatgtagcacgacggcaggttgttcttgcggatgagctccagcgtggcgtcgcacagctcgtccaccgtgtagggcagctcgatgcaggcgatcttgcagctgcggtgcaggcgctccatgtggtcgcgcaggcggaacacatggctcttgccgttctcgggattctggtagcagcggatgccctcgaacacgccggagccgtagtgcagcgagtgggacaagatatgcgtggtggcctcggcccaggggatcatctccccgttcttccagatgtactccacttcggtgatgtcggccatgatcgcgtcccttctcgcctcgggtcggacgccgccgcatgcaatcgttcgccccgctcccggccgtgccggcaatcgggcgggcgaacgagcccatgcggtctgacgtgcgggtatcgttcttgatcgttcgctcattgtactccaataggctaaagcgcgccgcggtttccggcgaagcgacagaaaaccggcaccgaaagcaggccgaggggcgagggggcgtttgcgagcggagggcgaagcaccgacagccggagcgccgagagccgactagcgcggacggaacgttggcacggcacgggacggagtcccgtgccgtgcgccggccggccttactgcagggcgccgccgcgcatgccgcgctggatgtcgccgccttggccggcgggcatgccgccgcctcccatgccgaggcctcccatgccgccggaagccgtggtggaggcggtgatttcggcggtcgtgccgccgctcacggtgccgacatctgcgtagccgtcggcgttcgcgccgctcacctggccgccgatgaccagcgagtagctgccgccctcctcgaatgcggggctcgagaccagcaccatgccgaactgcttcgccgccatgagcgacgccaccaccgtgccgtcggcgttggcgaccgcgacgctgtcgcccgcgttgccgctggccgtgatgaaggcgaagggctgctcgccgctcgtgaagttctgggccatgccggtggagcccaccatgagcgccgtgccgcccgtcaccgtggccgtgaggtcgtagtcgaacgcgccgtcgccgccgctcatgggaccgttgaccagcagcacgccgccggtgacctcgaccgagccgttgctgtccaccgcgtcgcctgccgcgtcgagcacggtgtagccgccgttgacctggataaggcagttctcgtcgcccatggtgggcgcgccgccctcggcgaaggcgttgtcgggcatgccgccgttctgctcgcgctcgcccatggcaccgcccatgccgccgagcatagcgccgtcctgtggcatcgcgccggcgtccatggcgggggggggctcggctccgtcgggcatctcgcccgttgcggcggggtcgaagctctcggccgctctggcatcggtcgtagttgccgtcgcgtcggcctcatcaccggagaggtcggcagccgccgcgttcaccgcgtcgtcgctggccacgatatgcgtctcgccgccgttcacgtagatcttctcggcctcgtaaccctcgtagcagctggtcacatcgacggtgccaccatcgatgacgagcttcgtctcggcatggaacgcgtcgtcgcccgcctctatcgtgagcgctccgcccgccacgatgccctcgaggtcggagtgcagcgcgtcatcggcggccgtgacgtccagctggccgcccgcgatgcgcaggtacgtctgcgcctgaatgccgtcgtcgccagcctggatagtgaacgtgcccccgtcgatggacacgaagcccttggtcgccttggtatccttgttcgacttgatgccgtcgccgccggcggtcagcgtgaagtcaccgtccgcgatcttcacgcagtcgcgcccgcgcagggcgtcctccaccgcatccaccacataggtgccgcccgtgatgacgaggtcgtccttcgagcacaccgcatgacggtaggagctcgtcaccgtcaaggtgcccgaaccgttcagcgtgaggtcggcccggctgaacagggtggcgtagggctcgtcggagccgtcttccagcacgtagtccgtcccgtccgtgagcgtgttcgtcgtgccgtccgccaacgtgacgaagcacttgtccgcctgcctcacatagaacgccggcccgtcctcgttgtggatgctcgcgccgttgagcaccacctgaaccttgtcagtatcggcaacctccaccaccaaccgtccgtcatcaagcgagcccgacaccacgtaggtgccctccgccgagatggtcaccgtcgacccctcgaccgaagccccgtccccatcgaccgtagccgtcgccccgctcagcacgatatgcgtggccgaagcgtcgtcataggaagcatccttgtcccggttggaatactccaagtcgagcgccgccacatcgaacgcagccgccacctcctcaaaagaagccgcctcggtcgaagtggaagtggaagaggaagcagcaacgtcagacccatcagtttcggaaatcgtcggacccgaacaccccccaagcgtcccggcgagtaaggagcataacgcgacaacagagatgctacgacccgcggcgcggggcgacgcccaccaagcgagttccgcagcgcagcgaggactgtccgagcgactgggcgttgccccgcgccgcccacgtgagagtttcgataggatcttcttcatcacagcacatccttactagccgccgcgctccccagcaccaccttgaggttgccgttcaagcacctcacctcgtcgatcatgcgcttttcgatgccgggcgccttcatcctcaccgcgtactcgagcaggaacaggctgcccatgttggtggtctgcacttccacgagctcgtgctcgtcagtgtagcgcgccagcacatcgtcgaacacgccgtcgtactcaaggtcctcggggatggtgatcttgagcgtcttctcgggcgccttctgcttgccgaacggcgagagcacgtacaccacgttcacaatgcccacgatgacggtgaacagcaccgccagcgcaatgaatcccatacccgtagccaagccgatggccatggccagaaacacgttgccgatgtccttcgcgctgccgggaatggaacggaagcgcacgaggttgaacacgcccatcaccgcgatgcccgcgcccaggttgccgttcaccagcgtgatgaccatctgcacgatgagcggcagcagcgcgagcgtcaccacgaagttcttcgagtacgtgtggcggaacatgtagatggccgccaccgccgcgcccagcacgatggaagcggcgcagcacagcaggaagtcgatggtcgacacgcccgccacgagcgattcggctgttccgaatattgaggtcaaagccgaatcaagcacagcgacctcccttcttcgcagaggtcatgatcggtgcgcggaagcgtcgcggacggctgccatgaagagacgccgcaagccgctcggcttgctggccgacggctgcttgcgccgcgcgcacgtccctgcatttggcctcaagcacctccgccacaggccgttgggtcggctcgcacgcgcagtacgcggcgccgtacttggagaacgacgtcgggtacgcacggctcgcatcgagcgcctccacgagccacagcggaaacggacccgaggccttgacctccatgacagcctcacccgcgcgcaaaagcggggtcatggaggagcccggagcgaacaggtctcggtaggcgatgcgctcatcgaacgtgatgcgcagatcccgaggcacgtcggcaggaggcaagggcgccggggcgtaggcgacgcgctcgcaccttatgagcatagagggcgcaaggggtgcgtgacgcgcgatgagctggtcgatctcggcggcaatctgctggctgcgcggcgcgcacgactcggccgccgcaaccggatcggccagggggaagcgggcgcatgcgtcctcgtacggcatgccgcccaagtaggcgcgcgccgccgcataggagcaccccacgcggcgcttgtacacgataccctcgaacttcttcttgatctcgacgaacacgagcccgtcgtcggccagcgcgccgtagcagcgcaggcgcagcttctctttgtagagcggcttgtcgagcgagcgttctataagggtgcgctcgggcgtgtcgaggtagaggctgcgcacggtcgtgcggccgtacgcgtcaggctccatgtgcccttcgagcgcacgacgcatcgtctcggcttggcgggcgtccaggcggtacttgacttccttccgctcgaacacatcggtgaatgcagtcatttagggttcctttccttcaagcatgccgatcatcctagccgcccacgctgaaagaaccctgaaaggctgcctgcacccttcagggcatgagatgatcccccggttctttcagggaggtttcagcaacggcgatacaatggagggaacacagcgcgaggaaggcggttccgggcatgcagattctcatcgtcgaggacgacgtgcggctggcgcgggcgctcgcccacatccttgaggaaaacggctatggcaccgatgtcgtgcatgacagcgcgacgggtctggcctgggccgaagtcggaaggtacgacgtgatcgtgctggacgtcatgctgccgaagaaagacggattttccgtggtggccgacctgcgtcgcacgggcgtgagcacgcccgtgctgctgctcaccgcgcgcgacgcggtacccgacaagatcacgggcctcgacagcggcgcagacgactacatgaccaagcccttcgcccccgcagagctactcgcgcatctgcgcgcgctcacccggcgccagggcgaggtgctgttcgagaagctgtccgccggcgacctcgaactcaatctggaaagccacgacctctcgtgcggcgcgaagtccatccaccttagctacaaggagttctgcctcgcgaaggtgctcatagccaacgctggggccgtggtatcgaaagacctgatcatcgagaaggtgtggggcgtcgaatccactgcggaggacaacaacgtggaggcatacgtgtcgtttctgcgcaagaagatgaagttcttgggatcatcggcacgcatcgagacgctgcggcgcgccggttaccgcttctccgtcaacgcggaggaggacacatcatgctgaagaagctgcgcctcaagttcgtcgcactcaacatggccaccgtggccgtggtgctggccgtggtgttcactgccatctgcgtgatcgaccaccagcaaagcgtcgcccgcgtgcaggaggcgctcgacgcggccgttgcgcacgcaggcgagacggctggcgggccgttcggcggcggagacgacttgggcgggcaggctcccgctggcacggcgagcgaaggcgcgaccccgcccgagatcggcggcaagcggggcgggtcggacccggcaacccccgtagccgtgttctcggtgagcaacggcaacgcgctcgaggccgtgcagacgcgcacgacagcctcgctcgccgatggcgtgcttgcccaagccgccgagcagctagccgacgcgcctgaaggattcggcagcttggacggcctcgggctgttctacgaaaagcgcgccgcagccgggacggtctatcttgcgttcgccgacatgagcgcggcgaacggctggcagacgctcgccctcacgcttgcgggcgttggcgtggcggcgctcgcagcgttcctcgtgataagcgtgttcttctcgcgctgggcgctgcggccggtggagcgcgcatgggttcaacagcgccgattcgtggccgacgcgtcccatgacctgaagacgccgctcacggtgatcttggcgaacacgtctatcctcctcgagcgtcccgagcgcagcgtggccagccaaagccagtgggtggagagcacccagcacgaagccgagcagatgcagagcctggtgggcgacctgctgctgctcgcccagacggacgaaggcgcggagaagcctcccatggagcgcctcgacctgaccgaccttgtggaaggcgagttgctgcagttcgagtccgtggcgttcgagcgcaaggtggagctgcgctcccagctggagccgggcgtggccgtctgcggcaacgcgccccttttgcgcaagctcgcgggcacgctcttggacaacgcctgcaagtacgccgacgagggcggaagcgtggacaccgagctgcgccgcaccgcgcgccaggtagagctcgccgtgcgcaacaccggctccgccatcgcgcccgaggacctgccgcatgtgttcgaccgcttctaccgtgccgacaaggcccgcacgtgcgacgatagcgggcacggcctgggcctggccatcgctcgcgccatcgccgaggaacatggcggcacgctttccgccgagagcgacgagacgagcggcacgacgttcacgctcacgctgccaacagcggaaagctgatcgcgctcgcccgtccgatgggcgcggcacctgcttgcagctcgacccgcggaaccctacacgtagaacagcatgtcgttgtaggtgggcaccggccagtggtcgcggtcggtgacgacctccatctcgtccacggcggcgcgcagcttctccatgatgggcacgatctcgtgggcgtacttgttcgcgcgctgctgctggtcgggcagcccaagggcggcgtggtgcgcggcgtcgagcgcctgcagctgggcgtcgatctccttcacgccggcgagcagcttgtgcagcagggcctcctgctggcccacctcggcatcggcggccgcggcgcggacggccgtgatgccgcgcgccacctcggcggcgtagtcgttgatggcggggaggtaggcgcggcgcaccatgcgcttcatggtacgggcctcgatgttcagcagcttgttgtacttctccagcttcacctcgtagcggctgcggacctcggcctcggaaagcaccccgagcccttcgaacagcgcgatgctcttcgggtccacgaagcacggcagcgcatcggccgtggtgcggtggttcgccagcccgcggcgctcggcctcgcgctcccattcttccgcatagccgttgccgttgaagatgatgcgccggtgggccttgagcgtcttgcggatgtaggcgatggttgccgtctcgaactcgtcgccctccttgccctccatggcgtcggcgaagtccttgaagctcttcgccacggcggtgttcaagatcatgttcgcgtcggacaggttcacgttcgagccgggcatgcggaactcgaacttgttgcccgtgaacgcgaacggcgaggtgcggttgcggtcggtgttgtccttcaggaagttcggcagcacgtccacgcccaggtccatggccactttctcggcgctctcgtactcgtggtcgtccacgagcgcatccacgatggcgtccagctcgtcgcccaggaagatggacacgatggccgggggcgcctcgtcggcgccgagtcgatggtcgttgccggcggaggccaccgacatgcgcagcagctcctgatagtcgtccaccgcctggatcaccgcggtgaggaacacgaggaagcgcaggttgtccatggggctctcgcccgggtcgaacaggttcttgctggccgacagcgaccagttgttgtgcttgccggagccgttgatgccctcgaacggcttctcgtgcagcaggcacaccaggccgtagtgcgacgccagaaggcgcatcttctccatggtgagcaggttctcgtccacaccacggttcgcgttcgtgaagatgggcgccagctcgtgctgcgcgggggccacctcgttgtgcttcgtgcgcgccggcacgccgagggcccacagctcgtcgtcgagctccttcatgaactcgttcaccgtggggcggatggcgccgaagtagtgctcctccagctcctggcccttgcacggggcgtagccgaacagcgtgcggccgcacatcacgaggtcctgccgcttggcgtagtccttctcggagatgaggaagtactcctgctcggcgcccaccgtgggcacgacgcgctgcggctcccagccgaacagcgcgagcacgcggttcgcctgctcctcgatggcgctcatggagcgcagaagcggcgtcttcttgtcgagcgcctcgccggtgtaggagcagaaggcggtggggatgcacagcacctcgtccttcacgaacgcgtaggaggtggggtcccacgccgtgtagccgcgggcctcgaacgtggcgcgcaggccgccggacgggaacgacgacgcatcggactcgcccgagatgagctccttgccggagaagctcatgatggcgcggccgtcgctcaccgggtcgaggaagctgtcgtgcttctcggacgtgatgccggagagcggctggaaccagtgcgtgaagtgcgtggcgcccttctcgatggcccactccttcatggcgtgggccacgacgttggccacctctatctccagcggctcgccttgcttcatggtcttgagcaggctcttgtacgtcgccgagggcagacgctcctgcatcgtgtgctcgttgaacaccatcgagccgtacgtatccgaaactcgtgccatagggctttagctcctcaccttgccggcccggcgtctaccggggccgtcgcgccgcgtgcgcgcggattcaatcgccgtatacgataccatgcttcgcaggggaaacgcactttcagcatgccgtcatcaaactaacggctcattgtttcggagaggttacgggcgtgggcgcctcccgcctgcacttcgccgtttatcgtagtgtcagtcaactatttgcgttatgataataagtgctcgaaaacaatagggaagcgaggctgcgacatgggcaggcgggcatggatgcttttggcggtggtgggggtgatggccatggcggccgtcgtcgcggtgtcggtgctcatgggcggctgcgcgaagccggtggagacggcagccggagggaccgtgcccatgaagtgccactggacgttcgtcgccacgacgctcgtgggcgcggcgggcgtggtcacggcgctgctggcgctggcaggccgcacgaaggagggggcgccgcttcgccggcatcgccacggtcgccgtggccgcggcgaccgtgctgttgaccacccccgcgggcatcggcctgtgcgccaaccccgacatgtcctgccaccagacggggctcgtgctgtgggttgccgccggcatcgccctcgtcgtgggcatcgtgcaggcagccaaggcggacccaaagggcgccgagctgccaaagatgaagctgtagcggctagcgaggctgccgctcgtgccgcttcagcaggggcaggcacgcgaacgcgatgacgggcaccatcacggccagcacggcgccgaagccgaagctggccgtggttcccagctggtcgatgagcgcgccgcccagggtgggcccgaacgccaggccgcagatgctcccggagttcatccaggtgatggcctcggtcaggcggtcgcccggcaccatgcgctcgcaggtggcgttcgccgtgatgaagaacggcgcgtagaacatcgccgccacggtggacaccacgaacagcgactcgatggacccgatgaacaccatggtgccgtaggcgcaccccaccagcaagctcacggccgcgagctgggcgtactgcggaatggtcaggcggatcatgccgaacaggaacccggacgcaatggacacgcacgcggccacgatgaggatgacgctggcggccgacgggttccccacgtcctcggccagcgacacggtggccgtgtcgaacaccccgtagaacgcgccgaggaagaacatgagcgcaaacagcacgcgcacgaccgacgaggtggcgatgatgctgcgacggtgcttcgggggctccccggcgccgacgcttcccaccgtgggctcggtcgatcgggagagcgtgagcaccacgacgcccacggcgaagcacacgccgcccgccagcatgccggccgccggaaagagggccgcggccagggcgatggaggccgccggccccaccatgaaggcaacgtcgtcgatgatgccctcgtaggagaacacggtcttcagcgtgggggcgtcctcgcccagccgtcccgcgcgtaccaggtacgtccagcgggcgcgcgtgagcgcctgggcgttggggatgaaccccatgagcacggcggccacgtagcacagcgcgatgggcccgcccaggctcacggttgccagcatgagggcaagccccacgagcgtgaccaccgccgccttcggcaccaccgcgtgctggccgcgctcgtccaccagcttggagacgcgcggcgagatgaggaacgtggccagcgcgatggtggacgacaccgtgcccgcgaggaagaacgaataccccgccagcgtcaacatggagatggacccgatggtggccatgtaggcgtacacgcgcatgaggatgccgcccgcgtcgaacgcgtaggcctccctcaccttgagaaccgcgcggtacaccccgcggtcgaaattcttcaccggcaccgtccccctgaacccgacgccgggcgctaccgctccacgaacgtcttcccttccagatgcatgacgcgcgaggcgcgcgaggccagctcgcggtcgtgcgtcgcgaacagcaggataccaccgtttgcggcgcgctcgaacagcgtgtcggcaacgctggaggaactgtcggcatcaaggtcgttcgtgggctcgtcggcaatgacgatgggcgggtccaagagcagggcgcgcgccacggacacgcggcgcttctgcccgatgctcagctggtaggggtagtgcatgaggcggtcggccaaccccaggccgcccagcagctgctcggcgcgctcgcgggcgtcgaacggcagcttgccggcgaagttggcgggcgccatgacgttctccacggcacgcagcgaacctaccagctgggtatgctggaacacgaagccgaacgtctcgcggcgcaggcgcgacagctccttgtcgcccagcgcatcgctgtcctgcccgtccacgacaacggtgcccgtggtggacgacagcagcagccccagcatggacagcagcgtcgacttgcccgacccagagggcgacacgaaggcgatggaatcgcccggctccgccgcgaacgagatgttctccaagatgacgttgccgtcgtaggacttgcccaggtcctccactttcagcttgctcatgttaatcgatatccccctgctgcatggcgagcgacggatcaagccggccgatctgcgcaagcggcgccgcgatggccgccaaggccagcagcgcaaacgccgccgcaagcactgcagcaagcgccccggtttcgcctgggtccggcgagatgaacgggaaggccgagccgtcctgcagcaaatccatcagcacgacgtacagcccggcgccgcacgcaagccccgataccagccccgcacccacgatggcagcgacctctcccccaatgagcgcgcgcaactgccccttgctcgcccccatggcgcggtacagcgccagctcgctcttgcgctcccacacacacgagtagaagcgtgcgaacagctgcaccaaggtggaagccagcatgagcacgcccgcgcccagcaggataaggaacaccgtctccaactgcttctgcgacgcctcgaccacctcagaccgttggaaggcgtacacgccgtccaacgcgttgatgcggttgagcacaacactcgcgtcggcagtgccgtccaggtctgccaacacgcacgatacgaggtcgcccggggccccgtacttatcccacagataggacaatcccaggttctcctctgaaagagagcgcgccgtgtcgatggcgaggagcagggaatcgtcgagatcggccccgctcggctcgagcttctctacgatggtgaacgtgcgccccagcagcgagagccgatcccccacgtcgccgcccacatccgcgcccaggataacctcgtcgtcggccaacccaaccgagaggtcgcgtcccgagaacggctgcaccgtccaatccctggcgaagtccacgccgataaggcgcgtcgcacctgccgtggagcaacagctctcgttgagcgtctggctgaagaactgggtggtagcacggcccacgccttccacctctccgatggcctccgccgtcgagaccggaaagtatacgggtgcaggcgcgcccgtgaacagcagcgccgtgtcggacacatcggccgcggcatcgcggggaaccaccatgatctgcgcacccccgcgttcggcagaagccctcacgccctgttgcacgccgccgtacgtgagcccgagcgcgaacagcgccatgacgctcaccgcaaccgccagcacgacggacgcagtgagcaccttgcgcatcttcaaactgtgtgcaatgagccttctcacgtgctatttcccttggtacttcaccattttgttgtacagcgtctcgtcgatgtacctgttcagctcttccggatcggtcggcgcatcctccatggcaccggcgcggtttatctgcatccatatctcgtggaagctatcgtcgatgagcttgcggtcgcccgagctccatgtgtaggccttgatctcctccaacatgatgtcgcgcgtgaagccggcatcggtgttcacgggcacatagccgcccttgacgatgatgtcggccgcctcttccggattgttcgcgaggaactcggctgccttcgcgaagccctcggacaacatggggccgatctcgggacgggcattgagcgtcttcgtggacatgcccacgaagcagcacagatagtccttcaggccctcgtcgaacgtgtcggagaagaacttcgtggcgccgtttgacaccgcgatgtcggcccatgggtcgtactgggcgaacgcgtctacctcgcctgcgttcatagcggcctccatctgcgcagacgggtacgtgagccactccaccttgctgggatccttgccagccagcaccatctgcgaggctatctggatctgcgggatggagcccatggcggcggcgaccttcttcccttccagatcctccaccgtcttgatgcccgattccggcgaggctgcgccttggatgcagcctttgtgcagcgagtcgatgatagccagctccagcccctgctccatgggcttgaacttgtccggggtcagctcgaagcaatccagctcgtcgttggccatgagggccgtcacatcagacgtgatgagcagcgcctccggctccaggccagcttccttgaagtagcccttctcgatgccgatgtagatgggagcctcgcacgtgccgccccaatagcccaagaccacatggttgtcgggcttggcgctgccctttccttcttttgccccgtcgcccgcgctcgtcacttggccgcagccggagagcaggccgccgagcgcggcggttccggcggccacgccgctcagcttcacgaagttccttctggtcaagctcatatcgcttcccttcctttgctctatctaggtacgccatctcaatggcctgaagctttctcaagcgcctggcggggccgaggtggaaccgtcgagcatcgcgagcagctggcgtcgcttttccacgaattccggggacacgcggtcgcggggatgcggcaggtcgatgaccagctccccctgcagccgccccggccgcggcgtcataacgaccacgcggtcgcacaggtacacggcctcctcgatgtcgtgcgtcacgaggatcatggatgtatgcgcgatggcctgcatggccagtatctcgtcctgcagcgcggcgcgagtgaaggcgtcgagcgctgaaagaggctcgtcgaagcagatgagcgcagggttctgcacgaacgaccgcgccagcgcgcaccggctcgtcatgccgccggatatctggggcggatacgaccgctcgaacccgtccaggcccatcatcctcaccagacgtgggatcttgtacttgcactcgtcataggtgcgcgtggcccgcagaccgaatgcgatgttctcctccacggtgagccactcgaaaaggttcgcgttctgaaacaccatcgagcgcgatgccgaagggccggctatgttttcactatcgaacgagatgctgccggccaacggttcgtccagccccaccaccaagcgaaggaaggtcgacttcccgcagcccgaggggccgatgatgcccacgatctctggtcccgaaaccgtgagcgagaagtcatcgagcgcccacacctcgttgccgccctcgtccaggaacgtctgcgtcaccccttcggccaccagctcgtgcgaacccgacgaggcgaacaacggcagctcgggccgcgggtcgatgtgctttccctttctcatgccctcaccatctcaccacagacttctgccaggtcatcacgcgatcgcgcactttgaacagcacgttgatgagaaggtagaatatgatgatgaagatgcccacggatgcgaacaccttgtaatactcgccccattgggtggcccagttgatgtaccatcccaagccggccttcacgcccagctgctcggagatgatgagcgcgccgaagctcgacgacaagcccatgaacagcgccgtgaagatatcgggcaccgcggcgggcagcgccacgtggaacaggatgtacggctcgctcgcacccatgacgcgggcggcctcgatctttcgcttgtcggtggagcggattgccgacgagagcatgagcgataagggaaaccagatggccaccgagatgaggaacacgcccgccaagtgcgccgagggcatgagcaccacggcgatgggcagccacgccgccgagggcacggggccgatcaccttcagcaacggtgcgaaccaatagttcgcgatcttcgaccagcccataagcaacccggtggcgaaccccgtgaccaagccgatgaccaccccttcggctagcagcatcatcgaagccgtcagattcgtcgcgtacgcctcaatgttcttcggcaccgcttcgaggatgcgatcggggctgggggcgaacggcagcagcagatagccggtcttgagggtgagtacgtccagtaactccaccagcaagaacacggctgctacaaggtatgcgtaatgcaccgcgtaacgccgtaatttgggaacgaaacaggccgtcgccatgaccgcaaggtagacacccagcataaccagaaggaacaacgggtagtacccctctacgtagtcggccgggtacacgttcggcaacgtgcccgtcactccgtaggcgatgcagatggcaccaacaggcagcagcatcttcacgaactcacggcctgttgccaggcggcgttccaccgtcttgcgggtaggtgccgtccgctgccgctcatggaaactctgttcaagggcggcggacacttagcgcatccagcccttcgaggggccgtcgaggacctgccagccggaggcggcgaacatcttgcgcagctgggcgatgttgctgccgcgaccgccgtgctcggtgcgctccacggtgtcgcgcgggttcgtacccacctcggcccaggcgaggttcgcgccggaggcagcggtcataaccgtgttcgccgagcagttcagacgcaggtcgcggcccgtggccaggcggtagacggccaccatgttcgcgttggccacgtcggtgagcatgccgcggtcgtacacgagcgtgccgggcacgccgatgcgcttgcccacgccggccgaaagcgggttcgtggagatgcagcgcatggtggcctcggtgagctcctcgggcgtgtgctccgggcccaccggctctacgcaggtggacagcgtgagaccggcctcgcgcagattggcgaacgtctcgaagcgcttctccacagggatctcggtatcctctccctcgcgcatgcgcacggcatggtaagcgccgttcgcgccggcggccttgagctggcggcattggtcgagctgcatgtcgtcagtgttcacgagcagcggcatgtcggccgggatgacctcgcgcacgctgcccaccatgtccaccagcttgtcgaagctgtagctggccgtggtgagcatgaggatgaggttcgcgccctcctcaacgtagagcttcgcgtactccagcacgtcctccttcggcagctcgtacttgcccttgcgcacgttgttgcaggcagcgaacgagcagaacttgcagttcttcgggcacacagtggagttgaggccgatctgcgcgtggatctcggccacgccgtcggcggcgatcatcgagagctcctggccagcccagcggatataggccgcctccttgctggtctcctccacctcgtagagcgcgagcacgttctcggcggacaggccgttgccctcgaggcccttctcgacgatgtcgtagatctcctggtcgaacacctgcatgactgcctcctcttgcctgcggcggatagtccggcgcccctcgcgccgcccgccgactagcgcaaatccctgtttgcggtttatataagcgttacgcaattgtaagacatatattctactaggtagttttgcttataattctcttgcggaagccatgcatggcttccgcagctggtcgtcgctggaaccggacaccggcgcagtgctaatgctacctatagctcccagtatcatgccaccggatccagcggcgcccgtccatcgccgataagattgatgccgacaggctccgtagaatactgctcgaggacaggcgccccgcgacaaggccagcttccattcatcgaggaaggggaactatggagcgggcggagatggattacgacgtgtacgtcggtgtagacgtaggaaagaccaagcaccatgcggtggcgctcgacggggcgacgggcgaacggttgctgtcccggcccttcgatcaagatgaggcgagtatccgcgagttgttggaagaggcgagcgggcatggcaaggtgctcgtaaccgtcgaccagttcggcaacatcggacggctcgtggtggccgtcgccaaggatatggggatcgacgtcgcccatatcacccctaaggacttcaagaacatcgccgagacctacaaggaaggcaagtcggacgccaaggacgccttcatcatcgccgacgtgtccctcagcaccccgaggctgatccgaactgtcggcacgcgcgacgacgcggtcgcagaaatcaaagtcctcaactcgcggcgggtggacatcgtcaaagagcgcacgcgctactacaaccgactgcacgacctcctgctgcaggtgtccccgcccctcgagcagcttttcgagggcgatagcctccattccgatctggccataaaaatattcgagcgctacggcggcccccgagggctcaaacgcgctggcaaggcccgcgtctccaagtgggcgggaagcctcaagtatcagaaaacccgtgggcctaagaaggttgaggaggtgttcgaggcgctcggcaccatgacggttgaactcccggcaaccgaggtcatcgagattcagatcaagaagctagccaagcgcatcctcgagctcgaccaggaggaatcggagctggacgccgccatcgaggagcgcgccgatgcggtgcccgagacggcgatcctaaagagcgtcccaggcatcgggcgcgtctacggggcgacgatcgccgccgagatcggcgacatcaaccgcttcccagacgcgaaccacctggcttcctacgggggcatcgcgcccgtgaaggaagagtcgggcacgagcgtcaagaagaacaagaaaaggaagaacggcaaccggaagctcaagaatgcgttcatcgagtcggcgcagaaagcgaaacggtacgacccgcgctgcaaggcctattacgacaggaaacgcgccgagggcttgcagcacaagcaggcgctccgagccctggcgcgaaggcgcgtagacctcatctacgccctcttggctaacggcaccttctacgagccgtcgcatcgcgcaacagcctagcccttttccggaagcaggtcctttgcgctccccacattatagagcatgggggggttaattttgcacaccctaatcctggatgaaaaagcctgaaaccttttcgctcctcggcaaattggcacgattgttgcctataataatgaaccggacgtgctatgcatggctcgtccgctggtcgtcgctggagccggacactggcgtatatatattgctcttcgagagcctaactaatcatgccaccggttccagcggcgcccgtccatcgccgataagattgatgccgacaggctccgtagaatactgctcgaggacaggcgccccgcgacaaggccagctactttagtacagaatggtgggaacggaactaaaaaattaatcgaaaacgaaagcaaaaaaaagaccccatcgttaacggggcctagatgattatactgaaaaatcgacgggtcatagctttttcctttggtgggttcgcatatatcctgtttttcgatttgcttttatttccttatagattgattagtattagacaatatctactaatagatttaggctatccaagagtgtgggagcctgaggaggaggcgagagagatggctgcgcagcgagcaagccccgtctgcgcttatgatcgaacagtggagattgagatgggtatgtactagtactagactatgtcttacaatagatattgtctgaagcacgactgcagagccttcgatctctccccctaagagaggctctgcagtttgaagacgcaggctcgccgacccctcctgtcgagccaacctccctccttgtcgagaggacccggcgcagcttgcgcagcgtcgggtcctttccgtttctccgcttcttacgcgcctacttggcagcagacgcctccctggattgcgcggcagcggagtagtgccaacgagcgctacgcctcggacgccgcgggcgcggccgtcggtgcggcagcctgctggacaacgcggcgcttctcgaggcgcccgagcgcgagcgacagcgcgaagcccgccaccgcgacggccatggccacgaggcaggcggcctggaagcccgcggccgtggcgagcctgtccgccgcgccgcccgcgagctgcgcggcctgaacgctggacagtacgcctacgaacagggacgatcccacgcatcccgcaatctggaacgacgtggacacgatggtcacgccgtgcgggtacagctgcggcttcaggctggacagcgcatagctctgggccgggcccatggaaagcgcacagcccacgatgacgggcgcgtagcacagcacgatgacgggagacgtagcctgctccgtgcagcgcgacaacgcgaacgcgaacacggccatgaggcccaggcccaccgggagcatgacgcgcaatcccgcacggtcgtacaccttgcccgccagcggcgccagcacgcacgacagcacgcacgccggcagcaacgtgagcgcggcgtcgaacgccgagaacccgagcgagccctgcatgaacaacggcaggatgatgtcatggagaacaccgtcatgagcgcgatcacgatcaccgccaggcccatgacgaacgcgcggctcgagaacggacgcaggtcgacgagcggctcggccacgcggccctggcgcacgacgaacgcaaccaggcagcccacgcccacggcaagcgcgaccgccgccatcgcgaagccgcccgagaacaccgtggacaggccgtatagcaggccgacgagcgcaaggctgatcaggcaggtggaagccacgtcgagccgcggactcgtcagctcggccgcattcggcaccacggcggccgacagcactgccgcagccagcaccatgacggcgaacactgcgaacagctggtgccagtcgcccaccgacagcacgagccctgcgacaatcgggccgaacgccgggccgagcgtggtcatggcgctcaccacgcccatgtacgtgcccggcttgcccttcggcgccacggccagcgtcaggttcatgccgatgggcacgatcatgcccgtgccgagcgcctgcaccacgcgccccgcgagcagcgcggcgaagcttcccgccacgagcccgatcagggttccggcaagcagcagcgcaagcgcgaccatcgtcaggcgcttcgtgggaacgctgcggtagaggaacccggtcacgggcaccatgatggcggcggccagcatgtaggcggtcgtgacccactgcacggtgccggcgcccaccgccaggtcgtccatgatgggcgtgagggccacgttgaggaacgtctcgttgaacgtggcaaggagcgtggcgaacgcgaccgcgaacaggacggctccggcgtggcggataggtgtgttcgacatgaagctgcatacccctttctggaaggctcggcgcgcgaaggcagggccgcaggcggccgaggatggctggttttcgcgaggtgtgaggaaaattttccgaaagagacaggcgcagacgttcgtatcgctccccatcctagcagatggggaggcccgttcgtaagtgtgaagttcgtggattcggctacgcagggcgctttgaccgaaggcgaggcaaacggcggaggctcccgtcggctcgaaggcgcccgccgctacagcgcgaactcgtacagcacgccggcacggccgaggtggggatagaagtcctcgtagacgccgcagttcgcgaagccgcacgactcgtagagccgctgggcgcgcacgttgtcggtgaaggtgtccagccgcagcgccctcgcccccgcctcgcgtgctgccgcgatggcgccctccaagagctggcgcgcgaagccgcacccgtggaactccggcagcgtggccaacacgtgaaccaccagcacctcgtcgggcgcggcatccacctgccaacgcgcctggccgtagccgggatcggcctcggcgttcagcaccagggcggcggcgaagcacgacccggcggccccgccctcgggcgccacgactgccagcacctcgcccgcctcggtcgaagcgcgcaggaacgcctgcgtcggatgcacgtcatgctcccagcacacgtcgaactccgtgccgcgcatcgcgtcgatcatgcgcgtgtagaaatccagcacctggccgacctcgtcggccctcgcctttcgaaccgttgccatgcgcgatccttctccgtcgtgcccccgtgaggtaaaaaagcccgcctcccagcgaagggaagcgggcttgcagaaaacgtgctgctcgacagcgcgatcctagcgcttgctgaactgcgggcgcttgcgggccttcttcaggccgtacttcttgcgctccaccatacgggcgtcgcgcgtgaggtagccggccttcttgagctcggcgcggtagtcgccggccgcaagcagggcgcgggcgatgccgtggcgcagggcgccggactggcccgagatgccgccgccgtcgatgcgggcgatgacgtcgaagtgatccatcgtgtccgtcaccttgaacggcgtgagcgcgtagttcaccagcgcctcgcggccgaagtactgcagggcctcgcggccgttgatggtaaccttgccggtgccgggaacgagacgcacgcgagcgacggcgttcttacgacggccggtgccgtagtacaaagcttcacctgccattgtttaaccctccatcttgatctcgcggggctgctgagccatgtgcggatgctccgcaccggtgtagaccttgagcttcttgcccatggcgcgacccagcgtgttcttcggcagcatgcccttcacggcatgctcgatcacgcgctcgggatgcttggccatggcctcgttgaaggtctcggacttcaagccgcccgggaaaccgctgtggcggtagtagcgcttgtcctcggccttgttgcccgtcacgcggatcttgtccgcgttgatgatgacaacgaagtcgccggtgtcgacatgcggggtgtactgcggcttgtgcttgcccttgaggatgtgcgcggccttcacggcgacgcggcccagaacctggtccgtggcgtcgatcaagacccattcgcgctcaacttcttggggcttcgcgtaatacgtcttcacttagcttcctccaaataatccttcattccgccgtgcgcgcgcaaacgcgcccgccgggttcgccgctctccacgcgtccgggcgattcccttcgaggcagggcctctccggcagtcgtccttggtgcggaagcgacacgtcggttttcaaaagtgcaggtgggacggaccgtcgggttcctacgccgacacgcgactcgggcctggactcctttgtctgcgtctccgttttcgctgcatgcacggggcttttgaaagcgaacctttgcattgtatgtcggagccgttcgcgaagtcaacggaaaacctccgcattcgtcgcgatctgcagaaatattcaaaagttttttcggatggcggagccaaggcggaaggacagatggcgtgcttgacgaggagcaggatggcagggctagccttgaaagaggttctcgacttcgacgccgagcccctccgcaatattgcagagcgtatcgaacttcacgttcgccttgccctcttcgatcctccaaaggttgacgtgatccatgccaagcgatttggcgaactcgcgcctcgacacatccttactctcgcgcagcatgctgatccgcagcccgagccggcgtttcgcctgaaagttcctgatattgtcatcccgctcgagcatgaccaaagcgtatgcgatacactacataggttgtatgtttgcaaacatacagttgagaaagaggggcaacgtgaaaacacgctgtcgccgcaaatggctttcactctgatgaaagaaggcatcgatgggtgaatcgtacgaatttaccttccaaaaggtttcgaggctctggggcataacgacgcaaaggttagtcgacgatcaggtgattaccgaaagggaagccaagcttatcgacaagggccaggtcacggccgtccgcttgtcgacactcgtcagaatctgcgaggccataggctgcccgccaggtgatttcttcgttgcaaaacgaagcagaccagacgattaaaagcgaccaggtaagggggaagaatgggggcggctctcttgtcttccctaagcaggccggccccgcgcggagggcgcggggccggaagggagggaaggtattgctgggaggtcttgtccgccgaggccccgacgagcgccggggcctcgcgcggctccccggggtgggttcgacaggggcggcctacgctaccgcgggtgcgcctgcggcgtgcggggtgatggcgatgctggggccggtagtgtcctcaggcaagccgaacgtggtcacggcttcgccgtactgcgcacgcaactcttccagctcgccgaactcgagcgcgttgaacgggcaggccgccacgcacaccggctgctcgcccgccgccacgcggtcggcgcacaggtcgcacttcgtcatcttgccggccgcctcgtcgtactggggcgcgccatagggacacgcctcctcgcagtacttgcagccgatgcacagctcgccgtcgtaggtgacgatgccggtcttgtcgtccttggcgatggctccggccgggcatacgcccaggcacgcggggcgctcgcagtggttgcacgacatggacgtgtagaacgcgaacgcgtcgtgcgcccaaccgctgccagcggccgcgaacgagcctccctccgtctcgaacacatggcggaacaggcgcgcatcatcgaggttcttctcgtccttacaggccatctggcaggcatggcagccggtgcacaggtcttggcgcatatggaatccgtattgggtcatggctcatcccctcctagagcttcgcgacttcgacgaggttggtgtgctgcgtgttgccctgcgtccacgacgtgcgcgccgacgacgtgagcacgttcaggcagccgttctggtcgacgccgtcagcgtcggggttgtaccaggttccggtgggcgcggccacgcagccgggcacgatgcggctggtcaccttcgccgcgatcttcagagcaccgcggtcgtttgccaccttaacgatatcgccgtcggcaatgccgcgcgcctcggcgtccagcgggttgatccacaacacggtttcctgcgtctgcgcaagccacgggtgcgtgaagtagctggagttgtcgcgggccttcgtcttccagccgatgagctgtagcggataggcggcggccagctcggtgcccggcccctcggccacgggcacgtagtgcggcgtggcggggatgtcggggttcttcatgttgtagagcgtcttggagaacagctcgatcttgccggagtccgtctcgaacgggttgttcttcggatcctcgatctgctccttgaaggccacgcgcggctcctccttcttgaagtaggccacgccctccttgaccatggtatcgaaatcgggcaggtcgtcgtcggggaactccttctgggtttcctcgaccatgaagcgcacccattcctcctccgtcttgcccccggtgaacgcgtccttcacgcccatgcggtcagcgcattcggccagccagtcgtactcggagcgggcctcgcccaagggctcggcgatcttctgcgacaggatgaagtagtcgccgttgttccacgtgcctccgatgttccaacgctcgaagcacgtgcaggcgggcagcacgatgtcggaccactgggcagtgggcgtcatgaacacgtcggagcagatgatgcactccaccttgccctcgtcctccaggatggcgcgcacgcgattgaggtcggggccggaggtcatcatgaagtcgctcgcgatgttccagatcatcttaacggggtactccagcttgtcgacgcccttgaggcccgtctccttcgtcagagaggtgtgatcgtcgatggcgtcgatccagccggacgacatgggcacgctcgcgctctcgaacttcaggtcctcgggcaggtcggccatgccgagcgggaacttgcgggtgaagccgttgtaagcgccggcccagccgccttccacgcccacgttgccggtgaggcacgccagcatgccgccgccgagcgccgtgcgctcgccgcatgcatggcgctgtgggccccagccctcgatgagcgccgcgggcttcgtggtggcgtactcgcgggcgatgcggcggatggtgtcagccggaaccttgcagatgacctcggcccattcaggcgtcttcggcgtgccgtcggtcgcgccttccaggtacgcgcggtaggactggttcggctccacgccctctggcatgtgcgcctcgtcgaagccgatgacgaacgtatcgaggaactcctggtcgtgcaggccctcctccacgatgacgtaggccatggcgtccatgagcgcgttgtcggtggtgggcaggaggggaatccactcgtcggccagctcgacggcggtgttggagttgcgcgggtcgatgacgatgaacttgcagccgttctccttcatctggcggtagtagtagttcgacaagccgaagatggtctcggccgggttgtggccccagaggatcacgagcttcgtgcccttgaggctggccagactgctgccggtgttcgcgatgccgaacatggacggcgtggcggtgcccgtgttgcccatggacaccgagttgtagcagccgatgtggccgccggtcacatcgcagaagcgcgcggccagatcggcacgcacgatgttgccgcccgtgtcgcccgtgccgatctgcacgtagcgcgaaagcgggccgtactcgcccaagatgcgcttgttctcgctgacgatgtagtcgatggcctcgtcccagctgatctgctcgaacttgccctcgccacgtttgccggtgcgcttcgtggggtgctgcagacggtcgggatggtactgccatttgcggtacgagcggccgcgcacgcaggccttgccgcacggggtctcctcgtcggactggaacgggtcgcgcgtgtcgaccttcgtgatggtgccgtccttgacgtgcgccttgatgaggcacttgccgccgcagtcgaacgtcgagcacgtgttcaccacctgcgtgccgtcgtcggcggccttggcggcaccgtctttcttggcctgttcctcgctcttgggcgcacagccgccgaacatgagcgcgctcgcgcccacggcgccggtaagcgccaagaacgaccgacgtgacaatccggttttctgcatacgtatcctcccccttcgttctctccctcgagggatgcgacgcgcagcgagcggctttccccgagccgcgcgcctccctcgtccttccgtcgatcatacgcgcgaaatattacggaccggatgaaggttgcttatcttttccttaccagatattacctaaatattaattatctttttgataatgattaaatttggctatcgcaaggcagcgaacttgtagcccacgccccatacggtgagcacgtagcggggcttcgagggattgtcctcgaccttctcgcggatcttgcgcacgaacaccgtgaccgtgttggcatcacccacggcgtcctccccccacacgctttcgaacagctggtcgcgcgtgaacacctgcccagggtgctgggccatgaatgccagtatctcgaactcctttgccgtgagatcgatcctggcaccgcgctttgcggcctcgtagctgcccaggtcgagcacgagatcgcccgcctccaccaccgtgcgcttcgtggcggtggcccgcgcatggtcgcggcggcgcagcagagcctcgatgcgcagggccagctccgcggcgctgaacggtttcaccaggtagtcgtcgcagcccatcttgaagcccatggacttgtccacgatgtcgcccttggccgaaagaaacatcaccggtacgtcctggtcgcggtgacggatagcgtcgcaggcgtcgaacccgttcatgtcgggcatcataacgtcgagaatgaccaggtcgggcgcctgctcatcgaagagcacgagtgcttccgagccgttcttcgcatacaggaactcgtggcctccctgcaccacgatgtgctccaccacgttacgcatgctcgtctcgtcgtcagccagcagtatgcgtgccatcggcccgcccctctccctcttgatccccctctgcgacagctcgcccggcgtccacgggaaacgccgccgtgaactcgctgcctgcgcctgggtcgctgcgcgcctccaccgtgccgccgcgcagctccatgagctcgcgggccagcgacagacccaggccacttccattgtagcgacgcgaggccgaggcgtcgccctgcacgaacttgtcgaagatgacggccatgtccgccggctcgatgccgatgccgtcgtcccgcacggccacgcgcacggtgcccgcggtctcgtcgaaagtggcctcgatgtcgatgcggccgcccgccggcgtgaacttcaccgcgttgcccgccaggttctccaccacgcggcgcgccttgtcgggatcggccgtgatgagcggcacgttgcgcgccacctccaccgagaggacaacgcccttcgtacgcgccagcggttcgagcgcggcttccacgctgttcactacatcggccatatccaccacctgcagggcgagctcgctcttgcccgcttcaagccgcgcgacgtcgagaatgttgttgatgcggctgagcaggatggctgcgttctgccggatctcgcccaggatgtgggcgcgctcgcccgtagcgtcgtcttcttgttcctgcaggatctcggtgaacgcgatgaccgaggtgagaggcgtgcgcagctcgtggctcatcatagccaggaagtcggacttgtagcggctctcctctgacaggcgctcgttcattgcctcgagctgcccgcgctggcgcagcagctcctcgttcgccaccatcagctgaccggcacgcagctccacctggctctccaggttgtcgtagagcgcgttcagctccgcgctcatggtctggaagtacgcggccaattcatgcacctcgccgtcgccgcgcacgtccttcacgtccacggcgaagcggccgccgtcggtcacgcgcacggcgttcttcagccgctcgagcggcgccgtgacaaagcggttcacgaaaaagtacaccgacacgacgcacgccacgatgagcgcgaagaacaagaatccctcgcgcgcgacgttctgcgcgatgctctcgtcataggtcgccgaaggcaccacgacgctgatcaccccgtacaggtcgcccagttcaaggccctccttcgcacggcctgtgacatcccgctcgcccgccggtccaccgtggcacggcatgcagctggaatcgatgcgcagcggcgtgacgtaacgcagcgagctctggccgtcgaacgcggccatctcgtcgtaggacgcgagggaggcatcttgccggaagcgctccatgacctgggtctcgaactcgtcggtggcatgtgcggcgttgcgcgggcggtcgctcacgtagcggatcttgtagtcggtatcctgcgagaagtggttgctcacgctcaggccgacgatggagcagtgcagccccttgaagtcgtagttgccgtcgctatcgtagttgatgcgatcctggttgatggccatgaagtcccacatggcgttgagctggcgcgtaagcatgctggcttgctcgcgcatggccgcttgagcctgctcgcgctgcgacgtgtacgaccacgccacgttcagcgccatgagcagcgcgatgatcacgacggtgggcaccgccagcttgtacttgagcttcccgtgagacatgcgtccccctccccttgccccgccacgatagcataccgggggcggggtgaaggagacgaaggcgaacagtcggacgattcgtgtagcgttactttttctttgctttgaatcatactataaaatgcttattcgagaatctgagaccagcatggcagcaccgatcatccgctcttccaccgacatccgccgcgactacaacggcatcgaggcgctggcaaaagagaccggccagcccatctctctcacgaagaacagccgcgcgtcgctcgtggttatcgacgcagccacattcgactacgaccagtacgtaagcctcatgatcgacgaggccatcgatcacaacaagcgccaccccctcacgtatacgccggaggaggcccttgaggaggcgtatcgtcacgccgtcgcgaaaggccctacccgtcgatgatcaagatgccaaccatgacggcgagagccgaaaggttgatggcatatgaagtacgaggtggtcatcgaggacatggcgactgaagacctaagcgacctgttcctttacaaaaccgcgttcacacattctgtttcccgagcgaaggagcagttgtccaaccttgttatgacggctgcgaagacctatcggagttccccgatcggcatgcggagaaagcccgcggattcaccgatgcgcttcggcgaaagcgcgaggtcggaaaatatgcggtcttttattggatcgaggaagatcggccgcgtgctcatagaacgcttcgctcacacgaaagccgacttcaaccgcatccacttcggtaattgaaccgccctgcttcgctgcggcatcgtcgctcgcgccgctacgcagcaggccactgcgacctctacttcccgtcgaacaaaccacccaacttgccgagaagggcgctcgggtcgttgccgaggaagtcgccggcagccttcatgacggcgtccaggttcagctccttgccctccagcagcggctcgacggccttcaccacgtcggctacctgctcctcgctcagatcgaggcccgtggcacccttgatggcggcggccgggtccacgccgaactgcttgaggctgtccgggtcttccgcggccgatttcaccagttgtcccacgatctcctgcacgtccacgcccatggcttcctctttcaactaatgcttgcacccccacagggaaaacctgcttttccactgtgggaattataatgggatgcgcgaggggatacggcaaaggcccagttcaaccatagattgaaccgcaaggagacagggatcgcatgactacgaagaagcacgacgaagaggccgccgaggaaacgaaggcagctgcgaagccgaaggcgaagaagcccgcgccggagcccgcatccggtaaggaggcggtagccgagaatggggccgcgacagccgagcctgcggcggagcatcccgccaagaaggagccgaaggagcgcacgttcgtcgacgccaagaccggcaaggccatcgcgcacccgcaccaaggcggctcgggcgccgaggccaaccaggccgcgcgcgaggagatgcactctgcccgcaacgggtcggcgcttcccttccgcatcggggccgcggtgctttgggtgctgggcatcgtatgcgagataatggccgtgctcgtgatgaacggcacgctgttcctgcccggcccgggtgcttcgacgtggctcatcatcttcctcgtggtcgacctcgtgatggtggtcataggctcgcagctgtggaagcgcgcgaaccacctcgcgccggcctccaaggagaacaagctgtcctactgggtgcagaccgacctgggcgtcatcgtcgccgccatcgcgttcgcccccgtcatcctgctgttgctgacgaacaaggacctggacaagggcacgaagaaggcgggcgccatcgtggcggccatcgcgctcgtggccgccgtggcgagcggcatcgactaccatccggccacgcaggaggatctcgaccaggccgaggcgggcgcggcggtgctctccgacgacgggctggcctactggacgccgttcggcgaggtgtaccacttcaatcccgattgccagcacctcaagaactcggggaccatctactccggcaccgtgcaggacgcgctggacgcgaagcgcacgcgcggctgttcgggatgcacggtcgaggacggcaccgacgtcctgtcgaaggccgaccccgcggccgtcgcagcggcgctggcgaacgtcgtcaaggtgggcggcgacaacgggagcgtcggcggctccggcgcgcaggaaccgggcgaaggcgaggatgacgcttgggaaggcctatcggaggcagcataactgccggcacgcccgcaagcatcgccaggaggatctacggatgcgggttctcctggcgataggaaatagttggacgccgttaactctgtgagccgactttgctatcatggttcccgacgagagagccaacgacgccctgctgatgcgggcgccttcaggggtagaggggaatcatggacccgttcgtgttcatcaccgtcgtcacgctcgttgccggagcgggcggcacggggttgggcggcatcgtgggcgcgctgttcagaagcgaatcgaaccgcaccgtgagcctgctgctgtcgttcgcaggcggcatcatgctctccatcgtatgcttcgacctgctcaccgaatccgtcgaagcggcggagacgttcaccagccaggccgtgctcgtggcggcgggggccgtcatcgcgggcgtggccgtggtgtacgggctgaacctggccatcgaccggcgcacgcggcacgaggtgccccatgtggcgaggaagtcgcaccccaaaacgcacgacgacctcgacgagctcatccatgccgaccacttggccgagcaccgcaagcgcgatgactcgaagatggccctgttcgtggccggcatcgtcatggcctgcgccatcgcgctgcacaacgtgcccgagggaatgaccatcggcgcgagcttcgtggcatcggacaacctgctgctgggcaccggcatgatcatggccgtgctcattggcctgcacaacatccccgagggcatggccgtgtcggttccgctcatcaacggcggcatgtcgcgcgtgcgcgctgtcgcagccacggccgtatgcggcctccccaccgtgctgggcgcgtggcttggttactggctgggcgacatcgggcccctggggctgtcgctgtcgctcggcttcgcgagcggcgccatgctgtacgtggtgttcggcgagatcatcccgcagtcagtgctcatgtaccgcagcaagctgcccacgttcttcgtcatcgtgggcatcctgctgggactgctcatcatctattactaagcggctgcgggcacgcaagacgccctgctgccaggccgccgccctctggttttcacttgaagtaaagcgggacggtgctcaccttgcgcatttccacaaggtcgccgtcgccatagcgcacgtagagcgtgcccgtgccatcgcggtcggcgacggcgaggtgcacccaccccgcctcggcaccggcctcgtcaagcagcaggtagcagttcggatcatcggttgcgccgatggtgcccctggccggcttcgcctcgccgccgttccacgcctcccatgtgcgctcctcgtcgaacacctggaacgagaggtactcgccgcggctttcgggaagctggtaggagccgcgcagatcgaagcccttctcgatgccctggcgaagacggccgaggtcgccgacggccatggccacgaggaaaacgcatgtcagaagagccaccgcccccacgccaattccgacacgcgcatacagcttcttgcggctcatggggcacctccgtgatcgagttctcgttacgactctgctcgcgggatttccttgagccgctattataccacggtcgcgtcacaccgccgcgagcgcctggtcgacgtccgcgatcaggtcctcggtggcctcgatgccgcacgagaggcgcacgaggtcgggcgtgatgccggcagcggccagctcggcgtcgttcatctggcggtgcgtggcgttggccgggtgcagcacgcaggtgcgcgcgtcggcgacgtgcgtggcgatctgcgccagcttgaggttggccatgaacgtctcggccgccgcgcgcccgccggccacgccgaagctcaccacgccgctcgcgccgccgggcaggtacttctgcgccagctcatgctgggagtcgcccggcaggccggggtagcgcacccaggccaccttcgggtgcgcggccaggtgctcggccagcgccaggccgttcttgttgtgctgcgccatgcgcaaatgcaggctttccagccccaggttgatgaggtaggcgctctgcggcgactgcgagcagccgaagtcgcgcatgagctgggccgtggccttcgtgatgaacgcaccttccagcccgaagcgctcggcgtacaccacgccgtggtagctctcgtcgggttgcgtgaggcccgggaacctctcggcatgcgcaagccagtcgaagcggccggcatccacgatggccccgcccacgctcgcgccgtgaccgtccatgtacttggtggtggagtgcgtgacgatatcggcaccccattcgatgggccggcagttcaccggcgtggggaacgtgttgtccacgatgagcggcacgccgtttgtgtgggccgcctgcgcgaagcgctcgatgtcaagcacggcgagcgccgggttcgcgacggtctcgccgaacacggccttcgtgttggggcggaatgcggcctccagctcctcgttcgtgcaatcgggcgcgacgaacgtgcactcgaggcccatgcggcgcatggtgttggccagcaggttgtacgtgccgccgtagagggcggagctcgccaccacgtggtcgccgcaaccggcgatgttgaacacggcgaagaagttggccgcctggcccgacgacgtgagcatggccgccgtgccgccctccagctcggcgatcttcgccgccacggcatcgttcgtggggttggcaaggcgcgtgtagaagtagccggactcctcaaggtcgaacaggcgacccatgtgctcgctcgtgtcgaatttccaggtggtggactggtagatgggaatctgacgcggctcgccgtcgccgggacggtagccgccctgcacgcaggtggttccgatgctctcgctcatgggggctccttggaggatcagggggtggtttgtgtccggatcattatagaggcgtcggcgatttttccggtagtgcccagtttccgatacttcgtcatctgttaaagagataattcagctatcgatatcgaacttagcgtaccgtcgcataaagaacgccgcgaagggtacgcgggtactcaaacgcctggatgtttcacgtgagacatccaggcgttcttagcaacagcggggttgccggctctcgctctaccagcccttgccctcgggcacgatgctgtcgggcacgagcccggcccccacctcgccgatcacgcggtcgagcacgtcgagcgcgcggtccagctgctcgcgctcgatgacgagcggcggctggaagcgcagcaccgattccgccatgcagatgatgaccacgccctcctcgaacgcgcggtacaccaccttgagcgcgtcgagcgcgcacttctcgcccgtctccgggcgcacgatgtcgatgcccagattgagcccgatgccgtgcacgccgcccacgatagcgtggcgggcggccatgtcctcgaagcgctcctttgcgtaggcgcccagctgggccccgcgctcgagcagcccctcgcgctcgatgacgtcgatggtggcgagcgccgctgcgcagcacacggggttgccgctggtggtgaagatgtgcgccgggaagctcaggctgtccatgatgtcggccttgcccacgatggccgacagcggcaggccgctggccagcgacttccccaccgacatgaggtcgggttccacgccgaactgctcgatgccccaccacttccccgtgcgtcccatgccctggttgatctcgtccacggcgaacaggatgccgttctcgcggcagaacgcggtgagcgcgtccacgtaggcctgcggtggcacgatgatgccggcgtcgcccgcgatgggctccatcacgacgcaggctatctcgtcggccggcaggtacgtctcgcacatctcacgcagcgggcgcatgaagtgctccgcctgctccggctcgctcaagtgccccacgcccgcgctctgcacgtccgggtacgggatgtggtagatgcccggcagcatgggccccatcttgcggcgcatccccaggctgagggccgagagcgtcatcgagccgtaggtggagccgtggtaggcgcccaggaacgacaccacgtagggccgtcccgtgtaggcgcgcgcgaacttgatgatggcgtcgttggcgtcggagcccgacgtgccgaacaccaccttcttcggcgtgtcgcccggcgcgatggcggccagcttctccaccagctccacctcgggcgcgtggtagaagtaggccggcgagcactggatgaccttctgcgcctgcccgcagatggcctccaccaccgccgggtgcgagtggcccacgttggccgacgtggccgccgccagcaggtcgatgtactcgttgccctccacgtcgtagagcagcgcgccgcgtgcgtgatccaccaccaggtcgtagtagggaatgcgcgccgtgggacccatgcaggcgcggtcgcgctccacgtactcctgcgtgcgggcggggttttcgcttgcctctgccatcttcgcctccctcgccttagcgcgtgatcccgcgggcgcggtcgatgcgccagcggatcatctgcacgatgaccaccacgatgaacagcgcgccgaagtagcccacgaacgggtagatcaggttcaccagcatgccgaacggcagctgcccgcccatgaagatgacggcacacagaagcgcgatgaggaactggtacttgcgcttgtcctgcttctcgtcgacgaactggttggccaccgtccacaccatgggcacggccgtgttgtagatctcggccagcaggatgacggcgaacaacaggcccacgaccggcgagatctgctgcgccaggaacagcacaggcacctcgtactgcacagcctcgccgaacaccgacagcagcgccaggttcaaaaggagcgcgcacacgccgagcgccgcgccgccgagggcgccgccgagaacggcctccttgcgcgagcgcgcgccggtgcccatctcggacatgaacggcacgccggccaggatgttgtatgccacgtacatgaacgcgccgagtgcgaaccacgcgctgccggagcccacgccgtacaccacgctgtcgcctgcggcctccacggccgcgttggaatcggccagcccgccgccatgcacgacgagcgtgtagacggccaagatgatgaggaacgcgatggtcacgggcccaatggagccgaggatgtccacgatgcgcttgaggccgaagagcgcgctcagcagcacgatggccgccatgaggccgctgcccacgatctgcggcacgccgaagtactggttgagcgtcgcgcccgcgcccgacaccatgatgatgcccacgaggaagcagaacaggatggtgaaccactccaggaacgtgcccaggtacttgccgcagaagtagcggaacgccgagaagtcgcttgcccccttgtgcttgaaaccgtagcccagaagcacgccgctcatgcccgcgaacagcaggatggcgatgacgcacccgatgatgccgttcgttccgtacgcggcgaagaactgcatggcctcctgccccgaggcgaatcccgatccgatcaacgtggcgatgaccgcgccggcgaacttgacgaccgtgaccggacgcaccgccggcgccttctgctctgacgccataaaaaccttcctctccttgcctgaaccccttttgctttttgccctgaagattctagtacaagatacccgaccgcgcgagcgcgcgatcaggcacgacgagattcccattgccctcctgccctttgcacgccccgttccctgcgcctcgtcgcgcgtggcggcgataacgcgctaccgataattcagataggcgggtcatctgcacaaaaggtatcatggtacgaacattccaggtgccccgacacggaaggcgaggcctgccatgcctatcaaaatacccgacgcattgcccgcaaccgacgtcctcgaaggcgagaacatcttcgtgatgaccgagttccgcgccatgcaccaggacatccgccccctgaaggtgctgctgctcaacctcatgcccacgaagatcgtcaccgagacgcagatcatgcgcaagctgtccaacacgccgctccagatagaggtgagcctgctgcaaacggccagccacgagtccaaaaacgtgtccgagcagcatctggaaacgttctacaccacgttcgacgagatcaaggaccagcatttcgacggcatgatcatcaccggcgcacccgtcgagctgttggacttcgaggacgtggactactgggacgagcttgcggagatcatggcatggtccgccacgaacgtgcactccacgctgcacatctgctggggcgcgcaggcgggcatctactaccattacggcattcccaagtacgagctgccagagaagctgttcggcgtgttcgagcacgaggtggtgaagccatcgtcgccgctcgtgcgcggcttcaacgacttcttcagggcgccccactcgcgctacaccgaggttcatgcgtccgacatcgaggcgcatcccgacctggagctcatcgccgtgtccgacgaggctggcgtctatattgccaagagcacggacagccgccacttcttcgtgttcggccaccccgagtacgatgccggcacgcttatggtggagtacgagcgcgacatcgcaaagggcctggacatgcccctgccgtgccactacttcccgaacgacgatcccgcacaggctccccgcgccacctggcgcgcccacgcgcagctgctctacacgaactggctgaactactacgtgtaccagaccacgccctacgatttggcgaaagtaggcaccgaggaggacggcaaccgtggctgacgaacgcgagccgcaaccccgctaccgcgtgcgaccggtgacgacgccggtcgcgcctgcggcacccgcgacgccggaactcgccagcgaccctttcctgcgccccgaagccgaggacgatgacggctacgacccctactccgaccgcccggcggacccggagccaacgtaccaggaagatccgtggcggtaactacgcataattttacgtaatatattttgcatctatatttgtaaaattatacgcattcatgttatactgaccacaatgaaagccggaccgaggaggacgccatgcctatcagcgtcaccgcgacggaagtcgcccgcaacttcaacggcgtgatggagaaggcccgggcggcaggaagcgtaaccgtcatcaagaacagccaccccatcgcccagatcataccgatcgacgaggtgaaggaggaagctatggaaagcaaagccgtgcaactaggaaaagagttcatcgacgaatatgccgacgtgttcgccgagcttgcaaaatgaacgcgcattgggaatatctcacacacgaagacgtgagagcgatccactcgtatctgatcgcaatgttcggaggtctcgacggacttcgagacgaaggacttttcgatgccgctatagagcaacctcggcaaaccttcgacggtgctgacctctatccatcggcagccgaaaaagctgcccgttatgcttatggcatcgttaacaaccatcctcttgccgacggcaacaaacgcacaggtggtgcttgcgtaggcatgtttctcaggctaaacgatatcaagttcaaaccgcgccacgacgagcttttgagaacggtttatggagtagccgacggtaccgtcggctacgaagagctggtttcctggatcgaggaacagctttagtcgacgacccgacgctttccccagaaagcgtcgtgagcgcttagcaaccgttccagccgatgaacgtttccgcgtccagttcctcgaagctgtcgatgacgacgtcggcgtttgcccgcagttcctcgtgggtgccggcatcgtcgcggtcgtagatgccgacagtgcggtagccggcgtcgcgcagggtgcgcagggcgtaggcagaatcctcgaaaccccaggtcgtatccaaaggcgtgtccatgaggcgtctcgcatggtcgtacaccttcggctcgcgcttcgaggacgccacgtcatccaccgagacgatcaggctcacatacggcgagaagcccgcccgctcgaggcccgcttgcaggtacttctgcgggctggacgaggccacgctcacccgcacgccgcgctccacaagggcgctcacgaaggccaaggcgccggaacgctcgtgcgcgcggttgcggtagtagtccagcatgagctcgtccatcatgcgcacgacatcgtctgcagcggcgcccaaaccgaaccggtcatggaagaatgcacccgcctcgggaatgttgagcgtggtgagctcgtccttgtccgcatccgtcagtgtcgcgcctgcacggcgcgccagctcgtcctccacttcgcgccacacgtccatcgaatcgagcagcgtgccgtcgcagtcgaagatgacgccgatacgtccaggttccatgatgcctcccgagatgcggggccgggccccgtcgcgtttttcgtcgcgtgccagcttagcagatggccccgtccgcgcggcaaaggcatcgggtgaatttgcagaacctttacggctcgcgcgacctgggaacctgcgccacgccccgcccgcaacgcacgcagggctcgcggttcgcgcatggctctcgcaacctgcacggctcgccgtagcgggcgcgacgcgctagagaaaccgctcctcgaactgctcgatgggctgcggacggccgatgcggtagccctgcgcgcgggtgcagccggcttcccgcagggcgcggtactgctgatcggtctcaatgccctcggccaccgtagctatgcccagctcgtcgcacaggctcacgaggctgcagataacctgcatggtgcgcttctcggtgcccaggccccacacgagcgatttgtctatcttcaacacgtcgaactccagctgaatgaacagctggaagttggcgttgtccacgccgaagtcgtcgatggacacgcggaacccccggtcgcgcagctcgtccgccaccgagcgcagcagcgcctcgttctcctcgcgtgcggactcggtgatctccagctcgatgagcgaccggtcgatgccgtgcgacgccaccgcggccgccacgcgctcgacgaagccctcctcgccgatggtgcgacgcgagaagttcaccgccagcggcaccgtcggccgtccctcccgctgccagcgcgccaccgtctcgcacgccttcgacagcgcgaagaagtcgatggccgctatctcgcccatatcctccagcgcggggatgaacgacgcaggcagcgcctgcatgccgcgttcgcggtcgcagtagcggatgagcgcctcggctcccacgatctcgcccgttctgccggaggcctgcggcatcaggtggatggtcagcaggcccgcctctgcggcctcctgcgcgccgcccggcctaagcaggctgctcacggccgcgtccgatgccaggtcgacgcccagatcgacggcgcggtgacggccgcgcttcgcgctgcgcatacggtcgccggccacgtccagcaagctggtggtgcttgtgcacgtctcgtgccacgccgggccgagcgatgcgggaatgccctcgtcgtggaactgctgcgcagcgcgttcggccagttcggcaaagcggttgtagtcgacggacgtcgacacggcgcagaactcgtcgtcgccgatgcggtacacggcgtcgccgaacacctcccggaggcaggacgctatacggcacagcatctcgtcgccagcagaatgcccctgctcgcggttgacgacggccagtcgatcggcgtccaccagcacgaagccgatgcgcccgaacgtgcccctatcgaaatcgcggtgaaatgccgcacgcgaatgggcgcaggtcaaagagtcgttccaagtcaactcggccacctggcgctgggcgatctcacgcttcatgcgggcagacacgaagctcgcgaacgcaacgagcggcgacttcaccaccccgagctcgccgacgcggcggggattgtcgacgcccaaatagcccgcgaacgtaccgtctatctcgatcggggccgccacgagggaggcgatgtcctggcttttcagcacctcgtactcggcggcgcgccccaaggacggaagctggtcgacatcctcgatgatcacggcctcgcccgcgtcgaagcgcttgacccattcgtcaatgaggcttacgggcagatcctgcaggaaccgccgctgcggcgcgacgcccaggccgcaccactcgtgcgtgttcgacatgcggtcgccctcgcgcttgaagacgtaggcgcgatcggcctcgaggaacgttcccaagatgcacagcgcatcgttgagggcgatctcgagcgtgctccctccctcgagcacccggatgcagtcgacgaccatggagccggcgttcgccaggaatttgaacgactcgctctcgcgctgccgctccgtcatgtcgaaggctatctccaggcgcgccggccgcccatcccagtccacgaggcgatcgcgcagcaggtaatggcgcctgctcaccgggttcgtgaactcccattcgaagaaggactcgccggacagcctatcgtttgtgcagaacgggcacggctcgtcgcgtccctgcagcacctggtagcacaggcgctcgccgcccaccgcatcgacgccgtagaggcggcggccctcctcgttgaggtagagcagccggtgggtttccatgtcgcagacatagatgagctcggagagcccatcgagcatggtatggaggacgtcttgccgcaaatccatctccctcgctagcatcgggtcgggcgtgttgcctgcccgcgcgcggcgcaacgggaagagagaacgcgctgcctgccattatagaagcaggcgtttaccgttgccagaggggtggtgaaaagacgaagcccagcgcggcgcagcgagcccttcggcgtgcccgaaccacgggcatgaccaaaccgccgacgtttccgaagcccgctgcgcctatcggtgcctacccttgctgcaccaggttgcgggcgcgggcgctcgagcgctccagctgctcggaggcggtgcgcagcacggccacgtcggcctcgtccaccttgtccaccttcttggacaggagcttgcggacggcggccacgtcggccttgatctgcttcttctcgtccttctccagctgcttgcccttctgtgcgagcgcttggtcggcctcgttcgccaaccgctgcgcctcctcgcgggccagcatggcgtcgcggcgcgcctcgtcctgctcggcgtactgctcggcatcgcggatggcgcggtccacctcgtcgtcggacatacggcccgagtcgtcgatggtgatggactgctgcttgccggtgtccaggtccttcgccgacacggtgaggatgccgttcgcgtcgatgtcgaacgtcacctcgatctgcggcacgccggcaggcgcccgcttgatgcccttgaggcggaacgtgccgatggccttgttgtcggcggccatggggcgctcgccctgcagcaccttcacctccacgctcgtctggaacgccgcggccgtggagaacacctgcgagtagtgcaccggcagcgtggtgttgcgttccacgaggcgggtggccacgccgcccaccgtctcgatggacaggctcaagggggtcacgtccagcagcagcaggctgttcgcccgcacgagccccgtcgacgcaccggcgagcgtggcagcttggatggcagccccggtggccacgcactcgtcggggttgatggaggccgacggctcctggcccgtgagcttgcgcacgtgcgcctgcacggccggcacacgcgtggagccgcccaccagcagcacgcagcccagttccgaggccgcgatgcccgcatcgttgagcgccgtctgcacgggcgcggtcgtgcgctccaccaggtcgcgcgtcatgtcgtcgaacgcggcgcgcgtgacggtggcgtcgaggtgcaaggggccgcccgcgttctgcgcgaggaagggcaggttcacgtgtgcggagtcgagtgacgacagctccttcttcgcctgctcggccgcctcgcgcacgcgctgcacggccatcgggttgcggcgcaggtcctcgccgtgctcgcgctggaaggtgtccagcaggtagttcgccacgcgctcgtcgaagtcgtcgccgcccaggtggttgtcgccggaggtggccagcacctcgatgacgccgtcgcctatctcgatgatggacacgtcgaacgtgccgccgcccaggtcgtacaccatcaccttctgcggcgtgccgttgtccagtccgtaggccagcgccgcggccgtgggctcgttgatgatgcggagcacgtcgagaccggcgatcttgccggcgtccttcgtggcctggcgctgcgcgtcgtcgaagtacgcgggcaccgtgatgacggcctgcgtgacgtcctggccgaggaacgcctcggcgtcgcggcggagcttccgcaggatcatagccgaaagctcctgcggcgtgaacgccttgccgtcgatgctcgccctccagtcgctccccatgcggcgcttcacggacgagatggtgcggtcggggttcacggccgcctgccggctggcgatggcgcccaccaggcgctcgccgtccttcgagaacgccaccacgctcggcgtggtgcgctcgccctccgcgttcggcacgatggcgggccgcccgccctccaccgttgccgcgcagctgttcgtggttcccagatcgatgcctatcgtcgctgtcatgcttcgcttcctttcaaccagtgtgacaaaggtgagacaaggggacggggatgatgtctcgttcccccgatacgctcggcggcggcgaggctcccgggaacgagacatcatccccgtccccttgtctcaccctagaacccaaacggcacgcacatgcggcagagggccggcccgcagcaccagatgccgcagcagagggtcatggggtcgatgcccatgctgaatccctgcgcctgcccctcctgctgatacgtttgcccggcctgctggaactggcgctgggcacgttggtagtccggattgttcgggtccaggcgcacggcgcgtcgtatctgctccagcgccatgagcgagttgccggcgccgtcgttggccaaggcgctcaggtagtaccagcgcgcgttgcggccgtcgctcgtcacggcgttcagctggtcgatggcctgctggaaccggccggcgttgatggcgtcgatcacgctgcggataacgggcccgtcggcggccgacgcctcgggatggatgggcccgcgggcgccgccgcccgggccgccgaaaccgaacaggtcgtcgaagtcgaagccgaagccgcccgtccatccgtaggggccctcggagccgtaggggttctggccggagccgccggcaccgcccgaacccgccgcgccgcccgcgccgtagccggcgctcgggttgctcgccgccgcgcgccggtcgcgcgccgcgtacttctccgggttcactatgcggtcgtacgcctcgttgatcttgttcatgcgctctgcggcggccgcatcgttcgggttcaggtcgggatggttctcgcgcgccttcttgcgatacgccttcttcacctcgtcgagcgaggcgtcgcggctcactcccaacacgtcgtaggggttctcaaccacggtgcgcctcctggtgttcttcttgcacgtgcttcgtttccttcgcttgcttcgtccgtttcgcttccttcgcgcagtacttctgccatacgcccgcgtacagcacgctgcgcagcacgcgcgcatcgcgttcgagcggcagcctctcgaacgccgcggcggcatcggccgccagcagctccaagtcctcgcgcacctcctgcggctgcgcatccagcgccacgagcgggttgtagctgcccgaggcccggtcgtcctccatgtccagcgccgcgtccatgacatacacgagcttccccagcttggctccaaagctgcgcaggcccgcggcccagaagtcgtcgcgccaggcgaacacctcgccgagcagcgcgccaaaccggttggccgccgcgtcgggcggaggcgccgcggccgcgtcgccggccgaggccgccgccgctgcggcctcctccaagcgcccgatgtcggccaggccctcctcgatggccgcgcacgcccgcggatggcgttcgcccaccgcacggtacgccttccccagcagggaggcgtaggcgcgcgcccagccgctgcggccgtcgcgccagtcgtccaggcacttgtggtacaccagcgccacggtcatgtcggccgcgtagtcgatgcagtccgagcccaggtacgcgtgcgggcgcaccgggtgaggcgcacagcgcctgctgccctgccgctcgtccggctcgtagagcgagcccagcagcagcgccaagaacgtcatgtcgtaggtgagcgccacccggcagcgctggccgcaccgctctcccagcgcccggcacacgccgcagtacgccgcatggtagcgctcgcgctcctcctgcgacagatcctccatgcggggcatcacgtagccgaacatgctagcgccccagcttcgcggcgaaggcgttgagcgcccggaacccggcgaggatggtctcgaacgtctccggcggctcgttctcgaacgccgcgccgtagcggcgcttgatgtcggcatcgatacgcgccagcagctcccggccctcgtcggtggcgcgcagctcgaaggcgcgacggtcgcggtcgctgcggcggcgctccaccagcccccgttcctccagcttgtggcacacgctggagaagttcgtgcgcaagatgcccgcacgctcgctgagctgggttgacgtctggcccggcgtgcccaccagctccagcagcacatgcatctgctgcagcgtcagcccgttttgctggcacacgggggccaccgtgtcgtgcagcagcttctgcatgtcgcaggccacgccgaagaacgcgtgcttgaactcgttgaggtccaccgccgtcccctacgacttcttcgtcgtctcggtcttgcacttcgggcacaccacgcgcagcgtgcccttcccgcgcggcacggacagcacggtgccgcagccctggcacttgaagtagcgcgtggtcttgcggttcgcccacgccttgcgcttcagcgcgagccagcgcttgggcttctggacggcctgctcgtacgccgcgttctccttcgagcgcgccacgatgttcttcgagaagctgcggaacagcgccaccgcgagaaccgccagaaccacccacgacagcaggtcgagccccgggataaccgaaaggatgagcaggatgaggcctacgcccatgaggaagttcgacaacccgtcgacgccgttgcggccctgcatccaggcagccatcctccactgcagacgctcgaagaaacctctcacgatgaacctttcccttcgccgcccccgcccgcctttcgggcgcccttgggcagcgaaatcatttagttataaaataagactattcgtgccgattcggcacgccgtcacctaatcgaaacgttacggccacaagacggccacaggtctgcaacgtcgggaggcggaggaagcaatgaggccccgtgctgagcacggggcctcggacagacgcaactcggcaaaacgccagaacctacttaatcctccacgcggatgacgctcggctcctcgcgcagcacgtcgtcgagcttcgctatgtcggcgagcacggcgcgcacgctcttctcgcgggcggtatgcgtgacgtaggtgatgtccacgctgttgccatccttcttgccgcgctggataaccgagtgcacgctcacgtcgtggctggcgaacacgccggccatggcggccagcacgccggagcggtcggccacggcgaaacggatgtaatatttggtcttgagctcctccatgggcacgagcggcagcttgtcggtgcaggtgcagcctacgaacggcgggatgcccgcctgcaggtggcgcgccacctccagcacgtcgcccatgacggcgctcgcggccgggccggaacccgcgccctcgccgaagaacatcgtctcgcccacggcatcgcccaccacgtagatggcgttgtacacgccgttcaccgtggccagctggtgcgacagcggcagcatggtgggatgcacgcgcacgtcgatgccctcgtcggttcggtgcgcgtgggccagcagcttcacgcagtagcccatgtccttcgctatctccaggtcgagcggcgtgatgtggcggatgccctcggcgtgcacgtcatcgatggtgacgcgcgagttgaaggcgatggatgccaggatggcgatcttcgccgccgcatccaggccgtcgacgtcggcggtggggtcggcctcggcgaagcccttcgcctgcgcctcggccagcacgtcggcatagggcatgtcgtcctcggccatgcgggtgagcatgtagttcgtcgttccgttcacgatgcccatgacggagtcgatacggttcgcgatgagcgagtgcttcatcgggtcgatgatggggatgccgccgcccacgctggcctcgaacgcgatctccttgccggcctcctcggccgtgcgcatgacctcttcgccgtgcgtggccatgagcgccttgttcgccgtgaccacgttcttgccggcgcgcagggcgcccagcaccacgtcgcgtgccacggtggtgccgccgatgagctcgatgacgatgtcgatgtccgggtcgttcaggatatcgtggaagtcctgcgtgaagatgtcctccacgccgtgctcgatagcctgctcggggttgcgcgagcacacgcgcaccagctccacgtcaatgccgtagtggcgcttgaattcctcgcggtggctcttcaggatgtcgatgcacccgccgcccacggtaccggttcccacgagcccaagtttaaccgtcatgttgctgctcctaaatgtctcgactgtaaaggtcctcgtacgtttcgcggcgcgtggtcacgcgcgcctcgccgtctttcacgaacacgactgccgggcgcggctggccgttgtagttgctcgacatggtgtggttgtacgcgcccgtgccgaacacggccacgatgtcgcccaggtcgggacgctgcatgggcatgtcgatgaccacggcgtcgccgctttcgcagtgcttgccggcgatggtgacgatctcggtgcgcggctgccccgccttgttggcgaccaccggctcgtagtcggcgtggtagagagccgtgcggatgttgtcggacatgccgccgtccacggccacgtacttgcggatgttcggcagcgtcttgatgatgcccaccgtgtacagcgtcacgcccgccgtggcaaccaggctgcggcccggctccacgagcagccgcggctcgggcatgccgtgcgcggcgcaggaggccttcacggccgcggtgatggtttcggcgaactcctcgatggaggcgggcttgtcgtcggccgtgtaggccacgcccaggccgccgcccatgtccagctccgcgagctcgatgccgtactcttcacggatgcgcgccatgaggtccaccatgacctcgacggcctccggatacgagtgcagcgcgaagatctgcgagccgatgtggcagtgcaggcccgccaggcgcacgttgggcgccgcgagcacgtccttcacgcacttgaaggcgaaatcctcgcgcatggtgaagccgaacttcgagtcctcgcatcccgtgcggatgtactggtgcgtgtcggcctccacgcctggcgtgatgcgcaggtagatgggctgctccacgcccagctcaccggcgatatcggagatgcggtgcagctctatgcggctgtcgatgacgatgcggcccacgccggcctggatggcctcgcgcagctcctgcggcgtcttgttgttgccgtgcatgaagatgcgctcggcgggaaaacccgtggccagcgcgcacgccagctcaccgccgcccgacacgtccaggcacaggccctcttcgttcacgatgcgcgcggcctctttgttgaggaacgccttgctggcatagacgacgtcggcgttgccgtagcggctgcggaacgcctcgaggtaggtttccatgcgcgtgcgcatgtcgcgctcgtccatgacgtagagcgccgtgccctgctcgcgcgccagctcaaccaggtcgacgccgccgacgaacaggtggtcgtcgcgcacttcggccgtgagggggagcaccgcgcccagctccatggtggtgcggttgtcgggctgcttgctcgtgtctgccgcaggtagggacatacgcgttcctttcgcgtccgtcgtgttgctgagggaattcacccagtctagcattgccgcgggagaggcggttttcagatgggctaaaaagaggaatattacacggcgagcagcgtgtttcgcggcgcgcggatgcgcttgtcgacgattgccggccaacgtgtccgaattgcgaggtcaaacccgttgcagaatcgcttgctgcttcgtataatgcggattatcggcggtgcccaggacggcgagttaacgggttcaccatccagctcgggcggcgcaggttttacgggaggccgggattattcccggcctttgctttcagctcccttggatcccttcccacttcgtccgtgtttcctatagtccgtccgcagaccgtggaggaagctcccgatcgtggccaccgccgctatggcgtaaaggatttcaagaacaatgttcataggcaccactcccttcatggaagcgccacccgaacacggacaccgccggcaccgtgcattgtacgctgcccaaacggtgatgcgaagatagtaaatctcctgttcagatgctatttttggtatcgaaaacgtgtaaggtttcggcagggatcccgcaagatcaacgcggcaaccgcgcaagattcaagcggtcggcatgcaaggttcttgcggcaccgtcacggcaaatgtgcaagattcggacggcggatcggcaaggtttggacggtcggcgtgcaaggtttgggcggtcgaccttcggcaaatgtgcaagatccggcgcagcgggcgcgaaaaagccagggcgccgcgtaaaaacgcagcgcccgattcttttccaccaaacaggccgagtccctgaagaggttttccaccgcggcgcaggcagcccgatagcgccctttcggcgctcaaagccttccaagaagacgccgcgagcctccttggaaaggcctacgccagcccgaacagcgcgagcaggcgatcccagatgccctgctcgggctcctcgactgccggctcctcgtgcgtcggggcctcgatgggatcggtggacatgacgaactgcacgagcgagacgttggcgttcttcgcgctggtaaagctcaccggcttgaaatcgctcttgtcgtaatcggccatcatggcgtcgatctctttctgcaccttgtcgggaatgccctgcacttcctcgtacaatgtgccggtgccgttggccagctgctgggcgcccgacgaaagctggctcgcgccagccgccagctcccctgcgcccgcagccgcctggttcgcgccggaggcaagctcggacgtgccggaggcgagagcgcctgcaccgccggcgaactgggaggcgccggaggcgagggcattggcgccgcctatcaagctgttcgcatcttcaatcgagccaactccgctcgccgcgcccgagagcgcttgggacgaggcaccgtagccggcattcgccgcgttaacggtcacgagatcttccaaagccgtctgaaggctcgcctgcgctgctgcgacagcgggttttcccatcgccgcaatcgaggcggtttggacagccgccttcattgcgtcttggacgtccatgccggcagctaggttttccgcataggcctgcgtgtacagaggggtgtactctccgatgaaggcctgggtgtactgcgccatcgcgttttcataggcgccctgagcggcagcggcagcggcttggtcgaccatgccaagcgtctgcgcagcttgggcggccagctcgttttggtaagtcgtcaacccgctcgcaagcccctgcgctcccgcagccacgccctgcgcgcctcctgcaagctcattcgcgccgcctaccagttggccggcacctgcggcaaggccgttcgcgccgcccgccacctggcccacgcccgaggcgagctcgcttgccccgctcgccaagccatcggcgcccgtcttgagcgcgcccacgccgtcgcccagctggcggaacccggacacgagttccgtcgtgtccggcatctcgatgcccattgagaacggtacggcggcgaagctgatgccgctcatcgagaaaccgctcacctgagcctcgaccttgaacgagccgtccttgcccggcatgcccgtaaacgtgacctgcgtgttcgagccggcgagggcgatctgcccgtcctcggtcgccacgtccttcacctggtccgacacgaacgggaccgtaatctgcagcaggtagttgtcgaagaacgccgggtcgaccgacgtgttcttcttcgtggtaacgaagatggccagcttgccgctcgcaccgcccagatcggccgcgtccacgcgcttgccgtcaagctcgtactccaccgacacgtcccacggcagcgccgccgcgcccaggtcgccctgatagcttagcgagtcgccggcaacgtccaccgacacggcatcgccctgctgctcgacgccgctcgcgtcggtaaggttctgcacagcggtgtacgggccgtaatcgaccaccttccccggcgcgtccgggttgagcacgttcaccacgtacacgttgtccacagcccccgccgcagacaaccgcgcgtacaccacttcttccttgggcgtatcgttgacggctgctccggtcgccgcagcgctcgccgaacccgcggagcccgcttcgcctgcactcgccgcagcgccgccctccgccgccaaggccgcgagcgtcgcaggcgagccgccgcatagcccgatagccaacgtacccgccagcacgagtgagaacgccgcgcacaaacgcgcccgcgccttccgcgcgcagcgagccggtcgctccgccttcgcttcttcaaccatgcacgtcgccctgtgagaaaccgccgtgccgccgtatttcctcgccgcttcgtcaggcgtgcccgaccgcatccgcagcgccgatagcgttttcttcagaagcctcatgcatcagcctccttttccgtttccagttgtccgccgccgcggaaaaagcccgcatgccacgtggtcttcgcaatgagcttgtcgaatatgagcagcgcagccggcaggaacgtgaccacgaggaagaacgagagcagcgtgccgcgggccagcagcaagcccaaaagcgacacgatgttgttcgtggacgtgagccacaggacgagtcccgccaaggtgaggatgctcgccgacaccaggatgctctgaaacgacgtgcccagcgtgcgcgccagcgcctgacgcggcggcatgctgcggcggtgcttgcggtacgtgtcggtgaacaggatggcgtagtcaaccgtggcgcccagctgcacggtgttgataaccaggaatcccaggtagttcagcgaatcgcccgtgaaatacggcacggccaggttcaggaagatagccgactcgatggtggcgatgaggatgacgggcagcgtggcggacttgaacgtcagcacgagcaccagcaggatggccgcgatggcgatgaggttcgtcacctggttgtcctcggtaacgacacctttcatgtcgtagaggctggccgccatgccggtgacgaggcccgcatccccgtacaggtcgtgcacggccgcgcgcacctgctccaccacggcgaaggccgccgttccctccgactccgtgtcggcgtacaccacgatgcgcgcatcgtgctccgagtagaactgctcggtgacggcggggtccaggaacccggtggggatggccgcgcccacggcggtgggatacgacaacacgctcgtaacgtgcggaatctgctcaagccgctccgccagctccagctcgcggccgatatcgcccctcggcaccagcaccacggccggcgtggactggccaaatgcctcgttgatggcctcggtgtcgcgcgccacgcgcgtctggctgccctcggtcgatcccatgccgtaggtgaacgacgtgttcgcctgtgccaggaagcacggcaccaccagcagcagcacgagcgcgaacacgggaatgcgcaatggcgccagcaccttccccacgcccttgaacgcaggcaggaagcggcggtgcttcgtcttgtcgatgagcttgtaggccaccagcgtgaacgccggcaggaacaccaccacgcacaaaaacgagaacgcgatgcccttgcacagcgtgagccccagatcggcaccgatccggaactgcatgaagccgagcgccgcgaagccgaacagcgtggtggcggccgaggcggcaatggcggagaagctttgcttcatggccgtgcgcatggcccgcactgcgtcgggctcttcctctcgcgcccgctggaacgcgtgcagcaggaagatggcgtagtccagagacaccgccagctgcaagatgggcgcgatggtgaacgcgatgtaggacacctcgcccaaaaagatgttcgtacccatgttgagcagcaccgacacaccgatagccagcaggaagaacaccggctcgatccacgaggtggtggagagcacgagtatcagaaggatgagcggcaccaggatggcgaacgcgttggccacctcgccgccggccatggccttggactcggccgtgttcacggcctggccggttgcgctgccgtcttcgcccacgatgtcgtagatgacctggagcgcctcggtctcctggccagcggccaccgtcacgtcgaacagcgcatggccgtcgcggtagtactgccccacggcgtcaggatccagcatctcaagcggcgtgcccaggtcaaccacatcgtccagccacaaaacgccctcgatgccgggcgcgtccgccagctgttgcttgtacgcgagggcctgctccacatccacgccgctcaccataacgcgcgcgttgggcacggcagcgtcgaattcggcgtccatctcctcgagcgcccgcgtggactccgccgactcgggcagataggacgtcaggtcgtagttgatgggcacgaacagcgccgcaattcccgacagaagggcaagtaccagcgccacccccacaatagggccgcgatgattcgtgacgaacgcgctgaaccgctccactgaggcgccctttctgccgccgacacggccctgcgaccggaacagtcggtgcacgaccgctccggcttggcaacaccgtgttgattatctttcgctcatactgttatattgcattatgccgaatcttcaaccgatgattttctcggatgtgtcggcaaaccgacacttttgtccccgatgtcgaacgttatcgaaaatatcgcataaggacgttgtaatgtcagacggctggcaagcaatcaagcggcagacggacgatgggcgaacggcgcacgataagcgggcgagcccgactcgagagcagcagacgggcggcggacgatgggtggccggggcgacgaccggagagcaatgaccgggcgagcggaaggtgggaaaaccatgaagcaggaccatcggatacggctcacgaagctgctgctgcgcgaggcgttcctcgacctgctcgtggagaagccggtggcgaagatcaccgtgaaggagctgtgcgagcaggccaacgtcaaccgcgccacgttctacgcgcactaccgcgacctcttcgacctacacgaggagatcgagcgcgacctggcgcacaccatcatgcgctccctgagcaccacgctgtccagccagtcgctcagcgcgttcagcaacgagatctgccgcataatcgtagacaacgagcgctcgtgccaggccatcttcggcgagcacggagaccccgagtttcccctgcgcgtggtggaaacgctgcgtgagagcagcatcgccctgtggcgccggcagcgccccgacctgcccgaagccgagctcgaccgcctgtacacgttcatggcgaacgggtgcctctcggtcatccgctcgtgggtgcgcaacgacatggccgacagcccccaggatatcgcccgcttcatagagaagatgaccgacagcggcctcgccgccctgtagcgccccgcgcctcgccgccctacagcacccgcgccagtgctgcgcccgacccgctgcgagccgcaggcgtcgcttcgacctcttgtaacgagacgcgccctcatgagcggccgagcccccacttccaacggcccccttacgtcgcgcaggtcggcgacagccttcccgaatgtttcacgtgaaacattcgttcgtatattggcccctagctccgcttttcatattcctactcgattgctgtgtttttattgccctcgatagcgtataatggcactatcgaaaccgagaaaggggaatcatggctcagcaagaaccgtccatcgaccagtggctcaaagaggccaagcaggatccgcaggccgcgcagtgcggcatgttcctcgcccataacggcatcgtgcgcatcacgccgaagaagctcgtgcgcgagggcgtggagggcctgggcgacgtggcgcaggtggagttctcgtacgatgccgagggcgtcgcggcggccgagaaggaggcgctcacatggcccggcgtttactacgtgcgcacctggctgaacgagggcgtgctcgacgtgggcgattccatcatgtacgtgctgatcggcgccgacatccgcccgaactgcatcgatgcgctgcagaagctcgtcggcaagatcaagaacgacctcgtggtggagaaggagatctacgcgtagggcgctcgcacgacggttccgccaaccaaataacgaacgaatgtttcacgtgaaacattcgcgaaggaacgcgcgaaagcgcgttttttcgtaggtgctttgagcatcttcccgtggcaccgcgagccgttttcttgcgcgccatcgagacccgatgacactggcgcggatcatttgctcatgcgggcaatcgagaccgtgtcgcattagcacgcgtcgttttttcatctcggttggcgcgggggatgcaaggcgaccgcgccgcccttccctcgaccgtctttcgctcaaatatcctgatatcaaaatatttcttccgtactataatatggccagcacatccacacgagcagggagaggcaacatgggagagaagatcatgcacgggttcccttcgcgggaggaagcgctcgcggacttcttcgccgcctgggagccgccggcggaagccaccgagctggtgagcctggacgaagccgtagggcgcgtgacggcgcgcgacctggtgtcggcgaacacgctgccggtggtgcgcgcatcggcgtgcgacggcattgcggtgaggtcggcggccttcgcggacggccggccggacacgagctcctgggagctcggccgcgactacgtgcgcgccgacaccggcgacgacttccccgacgcctacgacgccgtcatcatgatagagaaggccgccatacagccggacggctcggtcgttctcgacgacgacgtgcaggtcgagtccggcacgaacgtgcgccaggcgggcgacaccataagggccggcgcgccgctcatgaaggccggcctgcccatccgcccgaccgacctggcggcgctcgccatgggcggcatcacgctcgtgcccgtgcgccgcaagccgcgcatcgcgttcatccccaccggcagcgagctcgtgccggccggcatcgccccgcgccgcggccagaacgtggacacgaacagcctgatggtgaagcacatgctcatcgaatatggcgccgagcccctcatcttccccatcgtgcacgacgacgaggccgccctcgagcgggcattcgccgaagcgctggccgtggccgacgccgtggtggtcaacggcggatcggccgtaggcgaggaggacttcaacgtgcgcatgatcgaggctcgcggacgcgtggtgcaccattacatagccgctgtgccgggccgcccgctcatgatggccgtggccgacggcaagcccgtcgtcgacctgcccggcccgacgatggccgcctactacggcacgcagtggtgcctgcaggctgtcgtcgcacgcttcctggacgtgcccgtgcgcaagatccccaccgtgcaagcccaagcagctgccgcggtgagcggcccaccccagatggcgaacatcgcccgcgtgaacctggtccgcgacgacaacccggcgaacccctcgggctacaccgcggagttcctcaacttcaaggccggcgatttggccgcctgcatggccagcaacgcccagcgcgtctcccccctcggcgagcacggcttcgaggccggcaccctcgtggacgtggagctgctgcgcggcgaggagctcatcgactagcaaacggccacgtcagcgctaagggtacgagggcgggccgcgtcactcccccctcgcgccctctcgcgcccgcacggggccgtccctcgggcggcggcgagcgctgggtgcctgccctacagggcaagcacccagcgaaccccggatccccgccttaacggcccggcaatcgtccggccgcacttccgtacaagcggttaccgccgcccatcctttcccctagagtagtcgcactccatccgaccgcgcgccgctcaccgcgatgcgcgcacgagaaagaaaggcggcatatatgggaaagttcaagcgcttctgcatggtcgtgttcgtcgtcgctgccgtactcggcatcggtgtgctcgcggccctgtggttcgcgtgggaaccgctgttccccgccatcgcatggctcatggccatgccctggttctacgtcgtggaagccgtgctcctaggcatcacggcagtaggcctgctggtggtgctcatccgcgcgctcaccgcgccgggcaagaactcgcagcttgagatcgagcgcgacaacggcagcatcgccatcacgcagaacgccatccagtccacggtgaagcacgtggtggaggcgcaccacggcctgtcgaccgacaacgtgaaggtcgatatcaccaacaagcacgatccgcgcatggccatccatgccaagatcgaccccggccgcaacgccgagctgggcgagctgggcgcgaagctgcagaacgagatctcctcgaccctcgaggcgttcaccggctacccggtggactccgtgcgcatcacgttcgccggcgacgccgacgtggtaacgcccgcgttcacgcagcaggccacgaagtactcggaagacacgcaccgccagcaccagacgcagccggtgccggcccatgccgtgggcaagtaaggaggtgcgactatgacgcaatcggccatacgcatgcatccggccccgatgacgaaggccccgtccaaaacgggcgcgggcaaggcgaacgccaagcagagccggcttaagcagagcgcggcgcagcagggctccaccgcttcgggcgcggccaaggcctaccagccccagcagcaggccaaggcggtgcagggcgacccgtccaagccgaaccccgacgcccgcaaggtgggcgtccccggcgccggcaccaccatgagcgcggacaagacgccggggcccgaggcgcagacgccctccgacgtcatcacgaacgcggccgcgaaggcccaggaagggaagaccggcatgttcgcgagcatgcgcgctgccacggcgccctacctggaaaagcacagccacacggtgctctacggcatcgtgggcttcgtcgccgcggcgctcatcctcatcgtgggcttctggcccacggtgctgctcgcggtgttcgccgccgtgggcgtggtcatcggccgctaccgcgacggcgaccagaaaacccgcgagcgcatgaagggcatcctggaacgcatcagcagctagcagccccggcgtgtcgggccgcatgcccggcacgccgccccaaccggtttcacccacctgacgatagaaaggaaccaccatgtcccaagcaaccatgaccaagccctccacctccgccaagagcacgtacgacccgtacgcatcgatggacggccaggacgcaagcgccagctcctaccaggccgacagcgttccggccgagccgcagtacaagctcgtcatcgacgagaacgtcgttgagaagatctcctcgaaggccgcccagaagatcgacgggatcatcgacatgaagggcaacctgctctcccgcgtgcaagagggcctgggcggcaacgacaagacgaagggcgttgacgccgatgtcgtcgatgacaagaacacgaagctcgacctggacatcgtgctggagtacggcaagtccgcaaccgacgtgttcgaccagatcaagaaggttgtcggccaagacatcaaggacatgacggggctgaacgtcatcgagatgaccgtgaacgtggtcgacgtcatgacccaggacgagtacgaccagaagaacggcaacaacaccgacgacgggcagagcggctcctcgaacgaccagtagagactcccgcgcgtcgtgttgccgcacgcgtcccgtccgcgtgcggcgaaggcccgcctctcccttgggaaggcgggccttgtgctgctcggcggcctgcccactccgcacctcctacccgtccccgccgcgaaccgaagcgctacaatgggtggacagcccgcgcgcggagggagaggcccatgaacctgctcgactacttggcgacggagttcgccccgttcgaagagaagccgttcaacccggtggactcggccgtgctgtcgcagttctgcatggtgcgtgccgagggggtggtgccggcgctccgcgaacgctcgtcgttcctcgacctgggcaccatcgtggagaacctgctatcgcccacgcgcaaggccgtgcgcttcgccgacgcgctgcgcgccgagctctacccgaccatgttcaccggccttgacccgcagatggtgaaggagaacctgctggcactggccgccagcccgcgcttccgcgacatgcgcgtgcgcgactacctgagcctgttcgacaccgaccgccagacgcagttcgccgccatgacgttcgtgtatcggaaggacttcgcctacgtgggcttccgtggcacggacacgtcgttcaccggctggcgcgagaacttcaacatggcctacaccgcccccgtccccgcccaggaacaggccgtgcgctacctgcaagccgtcgcgcagcgcgcgccgaagcgcgtgtacgtgggcggccattcgaagggcggcaacctggccgtgtacgcggcgctcaaggcgccacccgccgtgcagcggcgcatcgagcgcgtgtacagccacgacggtcccggattcaaggcgggcacgttcgcgcccgccgattgggcgccgctcgagggccgcatccaccgcaccgtgccgcaggactcggtcgtaggcctgctcatggagtcgcccgtactgccgcatgtggtgaggagcaccgccaaggggatagaccagcacagcgtgttctcgtgggaggtcgcgggcgatgacttcgcatacctcgatgggctcaccgacggtgcccagctcgccgatgccgtgctcacggaatggctggcacggttcaacgacgaggaggcggccgtggtggtggacgcgttcttccaagcggtggagtcgtcaggcgcccgtgacgcgtccgacctgctctgcggcggctcgaaggcgctcgctcttgtctcggaggccgccaagaacatggaccccggcgcccgctccacgctgctcgccgcgctgaagcccctcaccgagatcgtcgcgcggcacctcgcgcagggcgtctccgtgctctggcccggctcgcgagcaccgtctcggccgcgggctgcggaacgcggcgaggacgcctagctccagcggacgaacacgccctccaggctgcggcagcgcagggccgtggccacacggggtgccagctgccccgccagccggcgtacataggcacgggcagcgccgtcgtcaacggcgagctcggcgcagacggcgttcgcggcgtcctccaacttccgcgccaaggcatgcggggcgctccctgcaagcccttcggcgatacgcgcgcagcccgcctcgtccagctgcaggctgcgcacatcgcagcctgccagcacgcagccgacggcgttcgcggcaaccggctcgaacaggttgagtatcagctcgccgtactgcgggtgcacggcgcgcagcaagcgccggcaccgcgcgacgtcaaactgctgcaggaaacggttctctatcagcagccgctccaggtaggcgttcacgtagtccacgccttgcagcgactccggcaccggctgagccaacgggtagtcgatgtcggccggcacctcatgtgcgaagaaccgcggcacgtagcgcgaggggaacccgcgcaggctctccagcgtatccttgagtgcgatgctctcgagcagcggcgtgcccaggcacacgtccctccacagcacctcggtgcgcgcagcctcgcgctcgacgcgcgccacggctcgctcgaaaacggcttccgggccctcatcagctatttgccgcacgagggctgcgtcgggccgagggtcgtcggggtctatgcccatcacaaagcatgcggaggcgagcagccgatgagcgtcgtattcgggcagcgagctgctctcccccatcgtgtagagcgcgacctgcttcgcgagcacctgccagagcgccagctgcacgtattcgacagaggatgcggcacgggccggttcgtcgcctgccgatgccgtgggacccaggccgtgcgtgcgctctccggcctcgggcggggtacctgcaccgcgcgcgccggcaacctggcacgcctcgtcgtccacagcctcgtcagccgagggacgagcccccgatgcggctgttggagtcgaacccgatgcggtacagatcatggtacccgtcgtagaagccgtcggcgtactcgttgccggggcgctcccaccgctcgtcgtccagcacgcggctgaactcatcccgcacgcgttccccggctccgtcatgggcagcctcctcctcgaatgtctcggcctgcgtcttctcgtcgtattcgcccgtccggccgcgcgctgcatacgtgcgcagcgttgggaccggaacatcggccagaagctccgccgaccctgccgcctcgccatcgaacgcgtggcgcagcgcttcaaccagatcgtcatcggctatcggttcacccgccgcctcggcgtcctccttgcggcggtagaacacgtcctgcacgtcggcgattgcctcggcatagttctcctgcgagaggtaaggcgaatcgcagaacccgcgcaccagctcgcgcaccaccccgcgcccgaactccacgcgccccgtcgcgcgcagcgcctctccgcgacgctcgaccagctccatcatctgcggctcggtcagccgcagcccatgtttcgccgtcgcctcgttgcagacggccagatcctcccgcgcagcggcccgttgcagctgtggcggtattgtcagatcgaaacccatgcgcatcacctcgcacagggttataccgcgaaccccgtgcacatgcacgactcgacttttcgcccgttttgtggtattatttccccagatgaaagcggagaattaatgaatcctccgcttttttgacgtcctaagcgaacccgtgcgccgcagccttaagccgcaggcatctcgagcgcttccacggtcttgccgctcagcacgaacttgagcggcttcctcgatacggttgcgatgaggcccttcccctccagctcttgcaagtaccggcgcgccgtctgcgtgctcacctcgaggttcccggcgatatccttgagcgaggcctcggaaaacgcgccgaacaggtggagctgggccatgacgaacagcacgttcacagccatgtcggtaagctcgcattccgatgctagccgccccatgcacgcgcaagcggcgtcgagctgcatccgcttcagctcgatgctctcgatgagcgagtcttgtgccaacctgatcagctctatgatctgcatcacgaagaaggtggcttcagcatggttcatcggacgttcggtcacatcgaacgctttgtaatacttgctcttgttctccgcgatcacgcgcgaaagggaaagcaccgtcgtctccgacaacggctcgctcaaatagagcgccagcagataccgccccgtccttccgttgccgtcgtagaacggatggatgtactcgaacaggaaatgcgagaggatagccgaatatgtttgcgggatgtcgggcgaggcaaccagctcgatcatacggtcgatcatctcgacgatcttgctttccggacccactcccgtgtgaagcgtcttctggctcgccgacttcacgtccacgagcccggcccggaacagcttcccatccggcagatcccggtcatcgatggcgtcggccaccaccttgtcgtaaatcgccctgatgtcggcaggtgtttgagggtacacgtggttcgaatcagtgagctccaggtaaaggctggcaaattccctgaaccgcttcgcctccttcgtcggccgcttcgcctccgcgctttcgagcgcctcctcgatctgcctccgggagctgtggacgccttccatctcgttggtgaacatgatctcgtccatgatgaggctgcgcaagtacgcccaccgcgcgatacccggcagatcgcgccagagctgggacactttgcgctccgcccgaagcatcttctcgttgaggagagacagctcgcgcggcgttgccaggaagagctcccccgaggacagctcgatgcccgtgcggaatgaggcggggttgttgagccgcctctcagcctcggccttcacatgctcgacgcgctcggacgacgagtcggaatagaaaagtttttccagcgttgggtagccgctcatatactgatcctgcccgattgttatcaaatacaagcgtcattgtactaccctatttgatcaaaatcgcgatttctatcaaatagcgacagggaatcggtttctatttgatacctttccgcacctgtgtcacaagaaccattcgaggtggccgcagtctttgcagacgaggaccgtggcgctcctgttcgcccaatcgaggtcgaggaacgtgaggcccatcgtgttgagctgcgccgaccgctcgtcgaacgcggtgccgccgcagtgcgagcacgccacctgcctgcccgcgaactcgtagccgtcatccccgctcagcccgcggttgaagctttcgagaaaacccattccgcactcccttcgccggagtctcgcctacttcttgagtatccgcttcaaatacgcggtatccagcaggttcacggtctcgaacgtgcccttgtagaacacggcccagttgttgaacacgcagggcaggtccttcgccgtttgcagcgaatcgacctggatcaacgtcagcgggacatcgttctcctcgcagtaccgctgcaccgcggcgatatgcccgggcacgtaagggcactggaaatcgtagtagatcgtcagctcgtcgcgctcgatcctctgcgccttggcgcgcggcgcgaacgccggcacggtgccgtcgaacgacagggcgagcagctcgtacccgtcgtccgtggcgtccactgcctcgaagccgaacttcttcgcgaacgattggtcggacagccacgacttctgcttcttcgagcccagcatgcacacgcccgacttgccctgctcgcgcgcatcggcaaggcagtactccatgagcgcgcgcccgtaccccttccccttggacgcgcccaacacccagaggcagtacacgtacaggtagttgtcgcccacgatgggaacccacgccgtctcaagcggggcgtactcgatgaacaccgggtccttcacctgcagcttgcggaacacgtggccctcgcgcagccggtcggccagccatcggcgcttcgcctcgacgcccggatggggctttttgacgcggatgaggcaggagaggtgctcgtcggcgaggttctccggcgtgaggttgacgaattcgggctccatgggcatcccgtccttttcaatcgagaaagcggcgcgccccgaaggacgcgccgctcgaacgtccccaatggggacgcttagtcggtgaagtagcccacgccgccttcgaacaagggctggaacaggtcgccggggacgttccggtacaggcccgcgccgcggcgctcgctgtggcccatcttgccgaggacgcggccgtcggggctcgtgataccctcgatggcccaggcggagccgttggggttcacgtccaggtccatggacggctggccgtccgcccccacgtactgcgtggctatctggccggcgtcgcgcagctgggcgagcagctcgtcgctcgcaacgaagcggccctcgccatggctcaccggcaccgtgtgcacgtcgcccacctcgcagcgcgagagccacggcgacaggctggacgccacgcgcgtgcgcacgaggcggctctggtggcggccgatgtcgttgaacgtgagcgtggggcagctctcgtccatcgggcggatgtcgccgaacggcacgaggcccagcttcacgagcgcctggaagccgttgcagatgcccagcatcaggccgtcgcggttctgcagcaggtcgcgcaccgcttccgtcaccgcgggggcgcggaagaacgccgtgatgaacttggcggagccgtcgggctcgtcgccgccggagaagccgcccggcagcatgatgatctggctgttgttgatgagccgcaccagctcggccgtgctctcggccaccttgtcgggcgtgaggttgttgatgacgaacgtgtccaccacggcccccgcctgctcgaaggcgcgcgcggagtcgtactcgcagttgttgccggggaacacggggatcaccacgcgcggacgcgcgatggttccgttgtaggtgaggggcgtggcgctgccgaaggacaccggttccacgcgctcgccctcggcgcggtacgggaacacgggctccagctgcgattcccaggcctcttgcaggtcggcgagggagatcgtctcgccgcaggcggcgaactggtaggcctccgccgtctcccccagcacgtcgacgcgcacagcatcgccggcggcgggcactgcggcgtcgtcggccagctccacgaggaagctgccgtaggcgggagcgaacagctcgtcggccgtcacggcttcgtccagcgtcagcccgatgccgttgcccacgcacatcttgaacagggcctcggccgctccgccgtagccgggcgtcgacacggcgagcgccgcgccctcgccgatgaggcgctccacaaccgcgatggcctccagcagccccgccgcctcgggcaccacgccgtcgtaagccgcgggagcgatgcgcgccacccgatgggcggctcccttgaactcgggagacgtcacgcggtcgatcgatcccacggccgtcgcgaacgacaccaaagtcggcggcacgtcaagctgctcgaagctgccggacatggagtccttgccgccgatggcccccacgcccaagtcgacctgcgccatcagcgcgcccagcacggctgcggcgggcttgccccagcgctcgggctcgtcgcgcagcttctcgaagtactcctggaacgtgaggtacatgtcctcgcgcgcgaaaccggcggccgccagcttcgccacgctctccaccacggcgacatacgagcccacgaacgggttcgccgccgtgaggtacgggttgaagccccaggccatgccgctcaccgtggaggtctcgccgaacacgggcagcttcgccaccatggccagcgccggtgtcagctggcgcgcgccgccgaacggcatgagcgccgtggccgcgccgatggtggagtcgaagcgctccgacaggcccttgttcgagcacacgttcaggtcgcgcacgagcgcgcccaggcgctcggccagcgtctcgccctcccacgtgcgctcgtagccgccgcccggcaccacatgcacgtcctggtgcttggccgcgccgttgctgttgaggaagtcgcggctcacgtccacgatggtggagccgttccactccatgcgcacgcgcgcctcttccgtgacctcggcgatgggcgtggcctcgaggttctcctcgtgcgcgagcgcgatgaacgcgtccacgtcctcgggcgcgagcgccacggccatgcgctcctggctctcggcgatggcgagctccgtgccgtccaggccctcgtacttcttcggcaccttgttcagatcgatgaacaggccgtcggccagctcgcccacggccacggacacgccgcccgcgccgaagtcgttgcagcgcttgatcatgcggcatgcgtcgccgcggcggaacaggcgctggatcttgcgctcgaccggcgcgttgcccttctgcacctccgcgccgcacgtctcgagcgattccagcttgtgcgccttcgacgatcccgtggcgccgccgatgccgtcgcggcccgtgcgcccgcccagaagcacgatcacatcgcccggggccggcgtctcgcgccgcacgtggtcggccggcgtcgcacccaccacggcgccgatctccatgcgcttggccgcgtagccgggatggtacagctcgttcacctggccggttgcgagccctatctggttgccgtacgacgaatagcccgccgcggccgtggtcaccagcttgcgctgcggcagcttgccgggcagcgtctcgctcacgggcaccagcgggtcggccgcgccggtcaggcgcatggcctggtacacgtagctgcgcccggaaagcgggtcgcggatggcgccgcccacgcaggtggccgcgccgccgaacggctctatctcggtcgggtggttgtgcgtctcgttcttgaacaggtagagccagtcctgctcctcgccgtcaacgtccactttcaccttcacggtgcaggcgttgatctcctcggactcgtcgagcccggtgaggatgcccttcgccttcagccagcgcgcgccgatggtgcccatgtccatgaggcacaccggcttctcgtcgcggcccagctcgtggcgcatggccaggtacttctcgaaggccgcccgcacggcctcgtcgtcgatccgcacgtcgtcgagcaccgtgccgaacgtggtgtggcggcagtggtcggaccagtaggtgtcgatcatcttgatctcggtgatggtggggttgcgcccctcctccgcgaagtaccgctggcagaacgcgaggtcggccagatccatggccaggccgcggtcggcgatgaacgccgcgagccccgcctcgtccaggtcgaggaagccctccaccgtctccaccatgggcggcacgggctgctccatgcgcagcgtctcgcgcggctcgagagaggcctcgcgcgcctcgatggggttgatcacgtaatgcttgatggcggccacgtcctcgtcggcgagcgggccctccagcaggtacaccttcgcgctgcgcacctcgggacgctcgccctggctgatcagctgtatgcactcgctggccgagtcggcgcgctggtcgaactgcccgggcaggtactccaccgcgaacacggccgcgccctccaccgccggcatctccaaagtggccacgtcggactgcggctcgctgaacaccgtgggcacgcactgggcgaacaactcgtccgagatgccctccacgtcgtagcggttcaccaggcgcaggccttcgagccgctcgatccctaagatgtcgcgcagctcgtgggcgagctgctgcgcctccacgtcgaagccgggcttcttctcaacatacacgcgagaaaccatgaagaatctcccttactttttcgaacccttaggggactggctctttgcggcatcggccgcggccttggcgttcgccttgccgcgctcgaacgctgcgttgccctcgccgccatcggcagcgtcggcctcctgcttctcggccttggcctgctcggccttcgaaaggcggaagccgctgccgaacaggccgcgcttcttcggcttctcctcttcggcgggagcctcggcggcttcggccttctgggccttctgggcggccttctgctgcttctccaaagcgcgctgctccttggacttcgaagcctccatctgctcttgataggcacggcgcaccttgcggatcttcgagaagtccacgtacagggcgccgatgatgcagacgtaggccgcgcccagcatgacgtagctcaccgcgtccgggaaccacgagcggcccacccacgacagcgccgtggccgcgatagcgccgatgagcagagcccaccagatcttgcgcaggcgcttgtactgcggcgtgggcgggttgtagtacttgcggtcgagatcgctctgcttctggcgggccaccttcttctcggccttcttctgctgcttcgtcttctctttaggctgcacgcgcaccgaggcggccgccttcgacttcggcttcatggccgctgcgctcttgcgcgtctgaccgcgatgctcgtcggtctggtaacggtcgttcatggggttgcgttgggacatggtatgttgctccttgttgaatgcttttgaacttcgcaggtctggcaaagtcagcgagaggcgctgaggtgcccgagattggcgtgaaagcttcgcgaagcgtgcttgcgcacgtgagcaaagcttggagcgccaagatcgggtgcctcggcgcctcgcagcgtcgaggagttccgtttgccgctaggcaaacggaacgaaggaccgaccggtgatcttctcgtaggcctggatgtacttctcgctcgtgcgatcgatgatgtcctggggcaggcggggcgggttgccctggcggtcccagttggcgttcagccagtcgcgcacgaactgcttgtcgaagctgggctggtccttgccctcggcatactcgtcgcccggccagaagcgggacgagtcgggggtcagcacctcgtcggcaaggatgatctggccgttcagacgtccgaactcgaacttcgtgtcggcgatgaccacgccgcgctcggccgcgtggtcgcgtgccgtcgtgtacaccttgagggccaggtcgcgcagctgggaggcgtcgtcctcgccgatgatctccacgaggcgctcgaagctgatgttctcgtcgtggtcgccgatctcggccttcgtcgacggcgtgaagatgggctcgggcagcttcgacgagttcacgaggccctcgggcagttcgatgccgcacacggttccctgcttctcgtactctttgaggccgctgccggccaggtagccgcgcacgatgcactcggcggggaacatgtcggccttcttcaccagcatgaagcgcccgcgcaggtagtcggagtacggcttgaactgctcgggcaggtcggccacgtcggcggatatcaggtggttctccaccacgccgtccaggagctcgaaccagaagcacgacagttgcgtgagcaccgcgcccttgtgcgggatctcgtcttccagaatgtagtcgaacgcggaaatgcggtccgacgccaccaacaagagcttgtcccccaagtcgtagaggtcgcgcactttgccttgcgcgtcgggcttgatgtccattccggtcatgctgctctgtcctttcatcgacacgccgcgcgctctcctcgggccgcagcgtttttcatgcgcgcctcattatcgcgcagtttggctatctatgccccttcgggcgctgtttttctttgcccttcgcaaccttcggcacctttgcctgcttgggcttctgctggcgcgccttgggcgtgcggccctcgtcgtacagcgggatgtggatggtgaagcaggcgccctcgtccttgcggccctccacctgcacccagccgccgtgtcggtcgacgatctccttcaccacggccaggccgatgcccaggccgccgctctcgcggttgcgtccggcatcggcgcgccagaagcgcgagaacaccatcttgcactcctcgggcgagagaccgattcccgtgtcgcgcaccgcgatggaggccatgaggtcgccccgcttcacctgcacggtgatgtggccgccctcgggcgtgtagcgaacggcgttcgagatgaggttggccgtggcctggcgtatcatatcggcgtcgcccagcacgcgcacgccctcgtcggcctggtactccaacgtgaggcccgagtcggtgacgaaggcgtcgtgcgtggcgatgatgccgctgatgagctggcccacgtccacgacctcctccttcatggggttcgcgcggttctccaggcgcgagagcttcagcaatgagtccaccaggcggcttaggcgctgcacctccgagttcaccgtctccaggtgctcggggtcggcctcgaacacgccgtccaccatggcctccaccgtggattgaatggccatgagcggcgtgcgcagctcgtgcgccacgtcggtggtcaggcgccgctccagctcgcggtccttctccaccgagtcggccatctcgtcgaacgtctctcccaggcgtgcgatctcgtcctcgccgtgcagatcggtgcgggcggacaggtcgccttccttgatggccttcgccgtcttggtcatgcggttgatggggcccaccaggttgcgggcgaacaggaagccgatgcacgaggccagcaggatggccatggcggccgcgaagaacatggcctggtaggacttgttgcggaactcctcgtcggtggagcgcagcagcgtatcggagccgagcacccacacgctcaccgagcccacggcctgggtcatctcgttgtcggggctcttcacctcgatgggcaccgtgaccatctgctcgggcttggcatgcttgggcacgagcgacaccccgccggcggcgtcctcgccattctcgacgagcgtggagtcgaacacaaccgactgctcgctgttcgcgggcaccgtgttgtccacgacgcgcatgccgatgctcggcgtgacgttgaccatgtagcgcgcgggcgcgagcgtctgcgcgtcgaacgtgcccgacttctcgtagttcgccgcgatgtccttggccactgactcggcggtcgacaccatgttctcgcgcgtgtacgtttggaaatgctgctcccacacgaacgacaccacgccgatggccaccagggcggtcatggccgcgatgaaggcgaacgccgccgtcacgcgcgtcgtatacgacaggttgtcccaacccgggcgcttgcgcttgcccgcaccggcgtcgtccgcgcccgccttgccgatgggtccggtcgtcgccgagtcttgcacgcttcgctcctcctgcacggttatgcgctcacgctcgaggcgctcacgcggtgcttactgctggactttggtcgggtcttcgaagcggtagcccacgccgtgaacggtatgcagccacttcgggctgcgcgggttgtcgccgatcttcgcgcgcaggttcttcacatgcgagtcgatggtgcgctcgtagccctcgaagtcgtagccgagcaccttctccaccagctccatgcgcgagtacacgcgaccaggatagcgcgacagcgtggtgagcagcttgaactcgctggccgtgaggtcgatctcctcgccgttcaccagcaccttgtggcccgacacgtcgatggtgagctcgccgaactccagcacctcgcgctgcggctcgctgtcggcgtgcacgcggcgcaaaagcgcgcgggcgcgggccacgagctcgcgggggctgaacggcttcaccagatagtcgtcggcgcccagctccaggccgatgatgcggtcctccacctcgcccttcgcggtgagcatgatgatgggcacgtcggagttgtcgcggatggcgcggcagacgcgctcgcccggcacgcggggcagcatgaggtcgaggatgaccaggtcgaagtggtgcttcgagaactcctccaaggcctcctggccgtcgccgaccgccgtcacccagtagttctcgcgctcgagataggccgtcaccgcatcgcggatggccttctcgtcttcaacaagcagtatacgtcgcgtctcgttgctcatggataccacctcaagtcgtcaccggctcggatcccacctggccgcgtatcccatacgcgctccgctccgagcgttcaggtcgtgtttgcgtttattgtagcaattacccctgaagcagctggaacctgtgcgggaaatgacacaatatccaccatggtaacccgcagatcaacacatgcccaccacgcgaaacccagccgtatcggcgcgcgcaacgcccagcgccgcaatgcgacgccaggcggcggcacctacgccggcggcaagcccaacccccgcggcggccacgtgggaaacgtgggcggccttggcagcggcggcctgggaggatcgggcacctcgcggcaagcagcacgcagaagcgccgcgcagaaggcctccgtcgggcccggcgatgcgctcggctccggaggcgtgcaccggcgcggcgcaggaggcgcaggctccagttccggcggtggcggcgtccacgttcccacgccgaacggcggggagatcctgctcacgcgccgccacttcctgttcggcgccatcggcgtgaccgcgctcgcggcggccggcggtgcggcctccgtggtcctcaagcagcgtgaggaggctgccggcaacgtgacggtgctcgaagtgcccgcctcggccgtgaccacgttgaacacgtccgattccgagagcgcgttcgccctcgtggaggatgccgccacccgcatgggcctgtccgtgcgagccgagctgccctacggatcgctcgtctgggccagcggcgacgacgtggccgcctgcctgctgcccacggaggaggcgaagccgctcgcgcaggtggggctgctgtcgcttggcagcggaaacctgtccacggtgctggaaaaggccgtgggccaggacgagggcttcgagatctacgacgtgcgcgccacggcgtcgggcctcgtgtggacggaggccgacatcctcgacggtctctggcgcgtgtacacggcgcgcctgaccgacggcgtggccggcgatccgcgcctggcggacgaaggcgacggccagtgggagacccccacgatcgcagcatccggcgcctacgcgttctggcaggtcctgcccaaggtcgacggcgactacagcgccgaggactccctggtcaagcgcgcttccttgggatcgggcgacgtcgagaccgtctacacgtcccacggtaggccgtgcacgccgccctacgcgctggccgactccgtggtcatcacgccgcgcgcggacactgcgggcacgtactaccagctcacccgcctggatgccgcatcgggcagcgtgctggacaccatggtgctgccacgctccatgcgcccgctggaggcgggctacggcgacaacgggttctcgttctcgttcgacgcctggtacaactacggcgacggcatctcccagatcggcacgtacacgcccgcgtcccccgttacggacggcaactacagcggcgcaccttggttctcgttcagcctcgcgcccacggcagcccccgcctggtgtggcggatgcttcatcgtcaagtcgaagcgcaccgtgtgcggcatcgacttggagacgaacgagtacttcgccctccagcccgagaacggcgccgacgactacggcgagtacctggccaccaccggctcgaacgaatccatagtcacctacgccaatatcgacgacaagcccatcgacggcgagccgaagaagtactgcctggtaagggtgtggaagccggtcgggtaagggaaaggcgcgcctggcaggaaggcgacgcaacgtcgctgcgcttcttgaaaaaaggagccctccgaatggaaagctccttgctcgcgttcgtgtggcgaaacgggacgcttagaactccagctccttgaggcggtcgaacaccacgtctttgcgggtgaggaagtcccaggggtcgaatatctcgtcgagcacctcggccgagagattcgcctcggggtcggcctcgaggttctcgcggtaggtggggccgtccacggcgttctggatatcctcccacaccttcatggcgttgcgctgcacgatgacgtaggcgtcctctcggctgatgcccgtgtccacgagcgccagcagcaccttcgagctgaagatgaggcctttcgtgcgccacaggttgtgctccatcttggcggggtaggtctgcagaccgtcgagcatccactgcatcttgccgaacatgtagtcgagcgcgatgaagctgtcggccagcgcgacgcgctcggcgccggagtggctgatgtcgcgctcgtaccacagcgccacgttgtcgaaggccacctgcgcgttggacttcacggtgcgggccaggccgcagacgcgctcggccgtgatggggttgcgcttgtgcggcatggccgagctgcccttctggcccttcgcgaacggctcctcggcctcgatgacgtcggactgctgcagcaggcgcacctgcatggcgatggactccagcgtagatgccgtcaccgcgaggccggccatgacctgggcgtggcggtcgcgcgccagcacctgggtggacagcgggtcggcctcaagccccaggcgctcgcacacgaactgctcgacgaacgggtcgatgctcgagtacgttcccacggcgccgctgatggctcccgtggcggccaccttgcgggcctcctccatgcgcgtctgggcgcgcttgagggcccaggcccagctgccgaacttcatgccgaacgtcatgggctcggcgtggatgccgtgcgtgcggcccacgcacagcgtctcctggaactcgaacgcgcggcgtttgcacgtctcgcccagctgcttgatgtcttcgaggatgatgtcgatcgcctgcgtgatctggtaggacagcgccgtgtcgcccaggtcggacgaggtcatgccgtagtgcacccaacggctgggcggctcttggccctccggcacgtcggcgtcgatgtactcggccatgttcgtggtgaacgcgatgacgtcgtggttcgtcaccttctcgatctcgtcgatgcgctcaacggtgaagtcggcatgcgcgcggatccacgcggcctcctccttcgtgatgccggacttccccagctcggcctgcgcctcgcaggccagcacctcgatctccttccagatctcgaacttgttctgcagctcccagatggcgcccattgccgggcgcgtgtaacggttgatcacgccggtccctttcccacgtcgtacctgatggcaaccagcataccgcaaacaagcccccgggcggcgcacttcacggaaagtgtcgagccttgggcgcgacgcccttgacttgcttatcctcgatcaagtagtatatatttcctatagaaatactaggcattcgagagaagggcgggcgagatggaggaatgcagggagggccgcgtgcggtcggtgaacacgtcgcggcgcaagggcggccggaagacgccgtgtgcgggcggtgccgccatcgaggcgaaccgcggcgtggcgggcgacgcgcatgccggcgactggcaccggcaggtgtcgcttctggcatgggagtccatcgagaaggcgcaggccatgggcctcgacgtggccgagggcgacttcgcggagaacgtcaccaccgagggtatcgacctcttggcgctgccgctgggcacccgcgtgcgcgtgggcggcgcgctcttggagctctcccagatcgggaaggtgtgccacacgaagtgcgccatctaccacctggccggcgactgcatcttcccccgcgagggcgtgttcttcgtggcgctggaggacggcgaggtgaagcccggcgactccgtgcaggtggtcgcgctgggcgacggcacctgcgcccacaccccgcccgaggccctcgaggagctgcgcgcggcgcgcgagggataggaggagcacgcccaggttgcgccgataaccaacggggccggccgcagcgtcggcagcgttccggcggccggcaggccgccggaacctagcgtcgccggagcctagagccccttgaacagggagcgcacctcgtccagcacttcggtgtcggctacgacgatggccttgtcgccggggtagagcacggtttcctcgcccaccacttccacgttgtcgtcgtctttgggcgacacggcggctatcaggctgttctccggcataggcacgctttcggccaaaatgccggcttcgttggaatggtagcgcatgcgcggcacggtgatctcggtgagcaccacgttgccgtgcgtgagcgacgaggccacgctcacgctgcccaacagcgtctcctcctcgataaggttcgcgatgagcgtggtggacgacacgctctcgatgcccacctcgcggaagatgcgcaggttcttcggattgttaacgcgcgcgatacagcgcggcacgttgaacacgcgctgggcgatctcgcacgacaccaggttgtcgtcgtcctggcccgtggtggccacgaacacgtcggccttgcggatgccggcatcctcctggtacttcgagtcgcacccatcgccgtgtataacgaggtagcgtccttccagcacgatggacagatggtcggccgtctgcaggttctcctcgatcacggccacgtcgttgccgcttcccagcagcacgctggccaggtactccccgatcttgccgccgccggcgataacgatgtacatggaattctcctagtcctgaatgtagcgagagaacgccccgatcagctcgtggcgcacgcaggcgagcacggaatctccctggtagaggatcgagtcgcgcgtgggaatggacgaagcggagccgtcggcacgctcgaacgcgatgatgcggatgtcatggtcgcgctccatctcggacacgcggatggtgggatggtcggtgtcgcgccagctcaggtcgagcgagaagcgcagcacctcgaactcgccgaacgtgtcgatgtgcgcgccgtggcccgacacgatcttgctgaacacgtcctcggcaacgagtgacgtgccgcacacgtggtcgatgcccagctgcatgtaggcgcgctcgtggtcggggttgtacaggcgggcgatgacatggggcacgccgtacaggcggctgcccacctcggccaccatgaggttcgtgttgtcgaactgcgtgacggccgcaatgacgtcgcagtcctccacgccggccttcacgagcgtctcctcgtcgaaaccgaggccctgcaccgtggagccgttgaagttgcgccccaggttcgcgaacgcgtcggcgttcttgtcgatgacgcacacgttgttgccgttgtccgacagcatgttcgccaactgcgaacccacgcggccgcagccgacgacgatcacgttgctcataccgatcctttcaccaagcgcccgtgcgccgatttcctgccatgccctagcatactgcaagccccgcgcgcgggaaagcggcgaaacccgcccgtagagcagctacaggcaggctggcatcatgggttccgaggcggaaaacagtttcgccggcccggcggccggcgaaacgtttagatcatctgcatctggcccagcgtcgcgttgaaccagtggtcgtagttcggcgggcagtacttcatcgccgcaccgtacgtgattgagtatccgtaagcgctcgcaagtccggccacatgggcgttgatggcctcttcccagctcccccagctcgactggccccagccccaggcgttgtaaggcttgaagcacacggcacccttcgagctctcggtgttggagatggcgggagaccaacgcgggtccacgccgtattcccaggcggccgtggcgaacgtcacgccctgccccgccagcggcgagccggaaagataggcgtcgatgcgctgggaccacgtggagatgaaggcctccttgcccacggagaagtccacatcgggcaagctggccagcgcggaggcggcgctgtcctgggcggccctcgcctgctgttcggccttggcggcttcggcggcggccacgcgggcagcctcctcggcacgggcggcctcctcggcggcgatgcgggcggcttcctcctcggcctctatggcctcgatgcccttggagatgtcgcgcttcgccgtgctggcgagcaccgtggcctcgtgcgcggaagaatcggtcgcgctctcggcgaacgtcgcggtatccgcctcggacacgggggcgctcatggcgtcgatgccgaacgcatcgacttcctgcgcgctgccgccagcggaggcgatgccgaagccgatgcacccggcgagcacgatggacgcgcacccgactgccgcgatcttcgcgacaatgctcgacttccgctgcttgtatcgtctgtcagtcaaacctcgattacctttcaatgaacagcgcacgaccacgccgccggagcggtgacagcgtagtaggttgtaaggggtggttgctgccgaaggggcgatatgctgttttgtcgaggtgtattttagcccatgggaccccgcgtaggcaaaaaagtgtggagacggcctccacgttttgttcgcttgacaaacaggaaagccgcagatgcgcaggtggttatgcatcctcggcaggcgctcgtttttcgaacagagccacggttgacggagcgcggaggcaagcgccaacgctagcgaacaaccgcaatgctcacttcgaaggggaaggcgaactcgcggccgtagggcaacgtgagcacgatgaggtcgttcggccccggcaccgagaaccacagcacccccaagacgcagaacgccacgaagcacagccctgccagcagggtccaccacggcgcatgcagtgcgccgccaatgacgaagaaccccgccatcatgagcagcagcggccataggttcagaaacatgagctgcaaggatgtccagcccactacgcccaggctgaagagcagcagcgtggcacccaggctgaagagcatgagaccgtccacgaattggagcatgcggcgccccgggacccccgggaccaccatctgcacgatgccgatgatggcaaggacaagcggccaaaactgccaccatgacaccccgtcgatgttctcggccaacagcgcggctatgccgaagaacagcaggaacgacccggtgaacacggccgccttcaccccaccgttccgccgtggctgctgcatcgtcacgggcggcggcacggccgcaccgtccggtgcgcgccagctgctcggcgccccggcctgcagcggatctgcgtagccgcccggcacctggggcgatcccccttccaccggttcccgtcctgcattcggcggcgcctgccagttgggcgactgccaactgggcggctgccaaccgggcgcctgccagccgggtgcctggctttgcgcccggtgcgcccacgcggcagcctcggccgtgggcggctcggggggcacatggcccgtgcccgcataggcgtcgtaggggaggtgctgctgcgcagccgccgcctcggaggcggcgcgagcggcgtcgtcggcgcggttccgcgatgcgccgacatccacggagccgtacgtgtccgagtgcacggaatggggctcgacctccacggggccggcctcgttgggagccaggggcaggatggcccacagcgccgcgtatgcgacggcgaacaggcccgccgtggacagcgtgagcgccaccgtgaggatgcgggcgaccagcggatcgaagctgaagtactcggcaacgccggcgcacacgcccccgacgagcgcattgcgcgagcggtagagtcgcttctcggtgttcacgctgcctcctggtcgaaccttcggcgccgcactatcagtgggaggcaggatgctcggctttttcggcaacggcttcggcaggaccgcggcccgcgtcttcctcggcctgcacggccgacgcattgcccgcacccacctcgcgcgtcatccggatgttcgagatgcgcctgcgccgcatggcctggatcttgaaccggtacccaccgaactcgaactcgtcgcccacctggggaacgaagtcgatcatgcccatgagccacccggccatggtctcgtagtcatccgactccgtgacgggccagccaagcttcagcgcatcctccacggggaagcgcccgtccacgagccacgttccgtccgacagcggcgtgatgaacttgttctcgatgtccgactcgtcgatgatctcgccgacgatctcctccacaatgtcctcgacggtaattaaaccatcggtgccaccgtactcgtcaaccacgatggccatctgttgcctattcgtttgcatctcggaaagaagcgggaagaggtctttcgtctcgggcacgaacagggcctcgtaggcgtaggccaccaccggctcgttctccttgccgtccatgaggggcgcgagcaggtccttgtagtgcacgatgccgacgatacggtcgatgtcctcgtggaacacgggcagtcgcgagtagccggtgccgcgcatgcggtcgacggcctgacgcacggtttccgtatcctccacgaggatcatgtccacgcgcggctgcatgatctcgtgcacggtcatgtcccctaagtccaagatatcgtggatcatgcgcttctctgcgggcagcagctcgtcattgtccgtgaccatatacttgatctcttcttcggacacgctctggcgctcgtcggcgttcttgatgcgcagcaggcgcgacaggccgttggccgaggccgaggtcagcgccacgagcggacgcgctaccttctggaacaccatcagggggccggccaccgtcttgctcacgcgctcggcatcggccagcgccatgcgcttcggcacgagctcgcccaccacgatgctcaggtacgacacgatgagcgtgatgagcacgggggccaagccgggtgcgatgaccgagagccagccaacgccgaagccggacagccactgggccagcggatctgacaggttcgtggccgccgcagcggacgcgaagaagcccacgagcgtgatggccacctgaatggtggccaggaactgccccgagtcgcttgccagtcccaacgcgcgctgggccttcttgtcgccctcgtcggcctctttctgcagcagcacgtgcttggcgttgaccagggccatctccgacatggagaagtagccgttaaccagaacgagcaaaaacgtgacgacgatgcttatccctatgtccatgaaagcgaaactcactccttctaagcgatgcggatgcatgcgaagccgcctctgcggcccgcgttcgcgctttcgcgcctcgccggaggatgggaaggggtacggagccgcttccaccccggcaaccgtggggctgtcatgcccgcgcgctcgtgcacgcgccgcttacataatatagaaggcgatggccaagaactggcagaccgttccggccagcacccacaggtggaagatggaatgcatatagggaaccttcttcaacacgtagaagatgcagcctatcgtgtagcacacgccgccgcccacgagcagccacaggcccggcccccacagcgctgcgacgagcggcggcaggaaccagacgacgcaccaccccatgagcaagtagagcacggcggatatccagcgcgggcggaacacccagaacgtctcgctggccacgcccgccagcgccacggcccacacgaacgcgcacagccacaggccacccgaatcggcgagcgagatgaggcagaacggcgtgtaggaaccggcgatgaacaggtagatgcagctatggtcgagcaccttgaatacctttttcgccttgtcgacggcgatggcgtggtacagcgtggacatggtgtactcgagcagcatggagtaggcgtacacgagcgcggccacaagataggtgccctcgggatgggcggctgcgcgcacggccaggaacggcaacgccgccagggcgagcacgatgcctatgccatgcgagatggagttggctatctcctcccccacggtgtactcgcgaacgacgtggccctcgcccaacgcgcttaccgaggaatgggccacggcgggcgccgtggccgcggcgggcttgcaacccgcgggggtttcatccggaggctccggcaaaggggaagtactacttcggctgtccgatgcatcgggtgttacctgtgcgctcataatgcctcactctaccacatttccccgcggcttgagccaatcgagccagctgcgggcatcttcttcacagacgtcgatcaggcgaatcgtggtgccgccgatgccggccgcggttcgggcgctcaccgtggccgtgcgggcgcggcgctggaacgggttcgtcttcgtgtagccgaactggatcttcttgcgcgggaagctcacggtctcacgcgcgaagccgccgttgctcacctgcatgaaatgctcgttgtacgcgaacccggagcctcggaaccacagaacggcacccaccaagtccaacacgaacagcacgaggcacagcgcatagccgatgaaggcgccggtgttgatatagaagaggaccgtgaggccatcggcgtcaggtacgatgaatgcgttcgagcacacctgcccgatggcgatgacgacggcgagccacagccccgttccctgaatgatgccgcgacggatgagcgcgcggcgcagggccacgggcgccacgggcgtgctctccaccggcacgccggcgaactcgggcaccagccctgcgaggatctcgggcacgcggctcatcttcacgaagggatgcaccaccaggccctggctcaggctcttctgctgctcgtcggagccttcggccgccgcatcgatcttgccgagcgagagctcgcagtatcccagcaaacggcggatgaagctctgcttcacgatgaccgattggacgcggtcgacgctcacgccctggaactggtgctgcagcaggccgcgctccacctctatgcggttgtcgcgccgacaggcgcggaagccgccgaacgagatggcgctgcccacgatggacagaagccacatcacggctgcgaccaccagcaccaaggccacgccggcagccacgaggttgccgccgaacagctggccgcttaaaagcatgaactgaccgacgatgggatcgaccatgccggtgagaaccggcgccatctggctggcgaactgggcagccccgcccaggatacccaagatgacgagcacgaacgccgtgttgttcgaaaggccggtgaacaaaagctccttgttgctcaagccgtactcgtagctcaccttgccggtgtcgacggccgacccgccgaacacaccgcgcacgtccgtccatatctcggccggcgcgtccagcacgttgtggggagcctgcccggcggctcccgctcccgccgccgccgcttggccggccgctcccgcctggggcagcaccacgccgcttgcagccgccacggccacggcagcctcctggggcgccatgccctcctggacggccgtcgcgtactgcttgcgcgcgaacagctcggtgcgcagctgctcggcctgcgatttctgcacgtagggcacctgaacggccttgttgttcgagccgcccgccgtgtcgatgctcaccgtgcacacgccgaacaggcgctggagcagcgacgcacgctgatcgaccgactgtatgcgctggtagggcacgtgaacgcgcttcttgttgaagatgcccgagtacaggttgaactcctcggggcctatgacgtagtacaggtgcttgtacgacagccactggaaaagcgccaccaagccgatgatgagcacgaggcccagcacgatggcgccgatgaccagcatgagcaggggaaggtcgccgccgatggtctcgccatcggccaacgcccccacgaacccggagaagcccgagacgagcaccacgaagaacatggcggcccctgcctggatgctgccgagccagatgtagctgtgatgcacatggtggcgcggcggctcctgcggcgggtacggttggccaggatacggcgccggctgctgcgggggatacggctgccccgagggcgcaggcggttgccccgtgacgggatcgttccagcagggctggccgggatacggctggttcggcggctgctggttgaaaccgggctgaggctggccgacagggggccgtgcaggttgctggttgtcggccatcacacgtcctcctgggcgaggcgcgcaagctcggccgccttgtcgcgcagctgctcggcggtctggctgtcgagccccggtatctcgtgctcgcccgcagcagtggccaccgtaacgctggccaggccgaacgcgcgcaggatgggcccctggcgcgtgtcggtgttctgcacgcggatgaacgggatgacgaagcgcttgcgccacacgatgccgcgcgcgatgtccaggtagtcgtccgaaagctcgtagcgccaccgcatgaagcggatgggcggcagcacgaccagccatacgaccatgcccaccacgtacagggcagccagcgccgccaacacgacgaacatccacccggccgactccaccgccacagcgatggcgaacggcacgaagcagcacaggaacaccaccgtgagccatatggcatcgttgatgcgccacacgttctttatcttaggattaagctggtttgcaggcaggtctctcatgaacgtcctccactcgaactatatgcgtccttatcataccagagcacccgtttgcgaccgatgcgatcgcccagcttgtaacgtggtttttgctttacccgccgatgcggccagatcccttcgcacggctcccgtgcaacggagcaggtggcgccgagccgtagggtccgacgcagcccgttcggcagcgccggcttccacctaaacgaaggcgctacgagaacgagcgtttcacgtgaaacattcgttctcgttttttggcttcgcgcgtcgtgcagtatactttgaactcaaagcaaccgcatgacgaaagcgagggcaagatgaagtacgacgaactgaaagacgagatcaaggccgccatgaaggcgaaggacaaggttcggctgtccatcctgcggcaggtgcatggcgagatcaagaacatcgaggtcaacgagcggcgcgacatcgaggacgcagacgtcgacgccatgatcaagcgactcataaagcaaacgcgggagacgctcgacggatccatcaaggccggcaacgaccaggagcgcacggacatgctgtccgagcaggttgccatcttggaaggctacctgcccaagcaggtgacaggcgacgagctcaccgcgctcatcggcgaggtgctggccgagatgggcgcctccacgaagaaggacatggggcgcgtcatgggcgccctcacgcagaaaacctccggcaacttcgacaaagcggccgccgccaaggagctgggacagcgcttggcgtagccgcctgcgatccaccggcggcggggtcgcctgtggcgggttgggcgcgcaacaggatggtgcaacggattgcggcaggggccagagcccctgccctacgggatgatccccaggcggggcttgcgcttgggggctttcgttgcggcccctaccggcgctcggcgaatttgtagcccacacgccatacggtgatcaggtacttcggctgagagggattctcctctatcttctcgcggatcttgcgcatgaaaacggtgatgctgctctcatccacttcgctgtccacgccccagatatgctcgaatatctgcgcgcgcgtgaacacctgcccggggttcgcggccaaaagcgccaggatctcgaactcttttgccgtgaggtcgaccttgcgcccgtgcagacgcgcctcgtactggttgaagaacacctccaggtcgcctgtggtagcgcttccctcgcggttcacggccttcgcgaacgcgaggtcgtccttgtggcggcgcagatgcgcctcgatgcgcagcaagagctcgtcggggctgaacggcttgaccacgtaatcgtcgcccccggccttgaagccgatgctcttgtccacgatatcgcccttcgccgacaggaagataatgggaatgcgccggccgtcctcgcgcatgcggcggcacacctcgaagccgttcatgccgggcatcatcacatccaacaggagcaggtcgggcttctcgtcggccagcagggtcagcccttcctcgccgtcgaacgacgcgcagaacgcatagcccgcatcctccacgatgcgcctcatgagcacgtgcaagctctcatcgtcgtcgatgagcatcactttcgccgcattccccatacggttcctccccttccgctcgtgctgcgcacccgagcagcccatcctgcagctctccctcgctccgcgaggcgctgccccctttaggacgcgccgccagaaacagcgccgcgttcacgctcgggcctcggtaggcccgtccaccgggatgcgcaccgcgaacacgctgccgcgccccggctcgctttccacggagatggtgcccccgtgcatctcggcgtactccttcgccagcgagagccccagcccggtaccattgtagcggcgcgacgccgacgagtcggcctgcacgaaacggtcgaagatgcgccgctggtccttcttcgcaatgccgatgcccgtgtccgcgacgcgcagccacacctggccgcattcgggatgccagctgatggacaggcgcacgtcgccgccctccggcgtgaacttcaccgcgttgccgcacaggttctccaacacgtggcgcagcttctcgaaatcggctgtgatcagcggcacgtcggggtcgatctcgcaggcgaacgcgatgttctttcggttcgccagcggctgcaccacggcctgcaccatgcccgcgatgtcgcccaagtctaccgtttccctattcatctcgatccttccggcgtcgagccggctcatctccagtatgtcgttgatcatgagcaggagcgcgcggctgttcgcctcgatctcgcgccgcgtctccgcctccttctcgtcggcgggctcgctgttgcggttcagcagctccgtgaacgcgatgatggacgtgagcggcgtgcgcagctcgtggctcatcatggcaaggaactcggacttgtagcggttctcgtcgcgcaggcggccgttggcctcctccagctgcgcgcgctgccgctcgagcacggcgttcgcctcggccagctgcgcggtgcggacctgcacctgcgcctccaggttgctgtagatgccggccagctcgtgcgccatctcgttgaactcggtcatgagcgtgttcatctcgcgcgacgactccgtgtgcgccagctccacgtccagatcgcccgtctggatgcgctcgacgcccgcctggatcttgctgagcggccgcgtgacgaggtaggtgagcgccaggtacatgataaccaggcatgccaccagcatgcccccgaagaagatgacgtcctgcaccacggcgctcttctcgttgtccatgtacacgtcgagcggaatgacgatgctgatggctccgcccacgtcgcccgagcgccaaccctccttcgcatagccggtcacgtcgatctcgccggccggctcgccgtggcagtcgaggcagttcttctcgatgcgcatgggcgccaggtagcggaacacctcctcgccctggtactgcgtgatctcgtagaactcgcggcaggtcgggtcggcgtagaacgcgtcgagcgcgcgggcctcgaaggcgtccggctcgtcagcctggttgcgcgggttgaagttcacgaaccgcgtggtgtagctggattgcgacgtgaagagctgccctatgctgcggccggcgatagcgcagtggaggccctggtacacgccgtcgtcggtgtaggatatctgctcgaggcggtcctggttcgaggccatgaactcccagacggcgtccatctgctgggtcagcaccatgcccttttcgcgcagctcgttttccatctgggcgcgcttgttctcggacgtccaggccaggttggccacgagcgacacggcgatcagcgcgatgatcaggcccgcgaacttcgtcttcagctttatgttccccatgacgctccccctcccctcaagcgccttggcccggcctcacgcggaggccgcgagctcctccagcacgtcggcgtcgcgcgcgcagacgagggctgccagctccgcgaaccgcggatagaaggccccgtcccctgcgctgcccgccaaccgctcagcgaacgcggcgacccacgtgagcaggtgctcgcgcaggaaatctcgctgcacggcgagcaggttagcgcagcgctcctcgtcgcccgccccaaacgcggcgctcgcatcggccgcaagcgtggccatgaagtcgagctcaaccgccagatggtcgtcggcctcgtggggataccccgcagcggcatagcccgcccggcggtaagcatccctcacggcaagcgtgctctcctgaaaaagcagcggctccccggtagcatacaccgattcccacggcggtgcggggagcttcgccgggccgatgaaaagtttcgtgtacgcactgcgcagtccatcggaaccacttgcaaccgcctcggcgatcgcatcctgcaggcgcgcgccctcgccgccctcgccgtcgagcagcgcgcattcctctcgcgtgtgcgcgtcggccacgatgccgagcagggcgtcgtcgggctcggccgcgaaggcccgccaaaggtagcggtagagaaaacaccggttggcgagcacggtgcccgccgcatcatcgaagcgcatatcgtcccccttacgggcaagctgcagcgactgggagggagagggccgctgcagcttgtcgtcggatgttacatgagcgccgacacggggtcgggctcgagcgccgccggcttggccacgatggcgatgctcggctcggtcttcggctcgggcaggatcgcaacggcgttcaccgcatcgggatgcgcggcgcgcagctcgtcgatcggcccgaactcaagggcgcgcatcgggcacgccgccacgcaggccggctgctcgccgttcgcgcgaagctcgatgcagccatcgcacttgtgcgtcttctggatcgactcgatatgctggggcacgccgtacgggcacgccttcacgcagtattggcagccgatgcacttctcatcgtcgtgctgcaccgtgccgtcttcctcgtcgatgtacatggcggcgttggggcaggccgccacgcactcgggcttctcgcaatggttgcacgagccggagtagtggtaggtctgcacggcggggtactcccccacctcgaagtccgacagcctcctgaagatcacgcccatctcaaggtcgttcttgtccttgcacgcaacctggcacgtcctgcagccgatgcaggcggtcatgtcgaagtagaatccgttcctcatcgtcgatcacctctcctacatctgcgcttcggggatgcgcgggggctgctcgctgtcgggtgcgagctcttcttggtacttctcgatgttgcctatgcaggtgttccaaccggacactccctggcccgactgtatctgccccgtaaggatgttgtccgatccggcacggtcgatgcccttttcctcgtccatatcgacccatgcaccgtggggcaggccgataacgcccggcatgaagcgctgcgtggggcacgcggtgcggaggcacttgccgtgggggcttgtgatcagcaccgtgtcgccttcctggatgcccttctcctgcgcgtcctgcgcgctgatgaacacggggttcggccaggtctcgcgcagccattgcacgttgtcgaacacggtgtgggagcggcgcaggtaatgggggttgtacacctggtagggatagtcgcccttaacgcccgcctcgaagtcgctgaacgtggcctcgacgccttcttgcggggggacgtaggtaggaatggcctcgatcttgctgtagccgatgccgttgatggcgtcacgcaggggcgcgcagtatatctcctgcttgccgctggcggttttcaacggattcgcctcggggtcctgtacgaacttctcgtaggcgatgtagctatagccgtcgtcgggcgagcggggtatctggtacatacccttctcgatgagctccttcatcccgatcacgccctcttgcggctcgccctcgcactcccattccttgatgtcgtcctcggtgatggtgacgagcggcttcttctcgcccgcctcgtcgacgatgtacgctcccacgaactggttgaacaactgttgcttcacgccgaaggggaacacttcctcggggttgagtcccaagcgctttcctatctcgctggcgatctcctcgtcggaaaggcattcgtacatccggtcgatcaccttagagtggtagatgagcgcctcgcggttgccctggaggaacccgccctccttctcccagtaggactcgatgggcagcacgaaatcggagtaggcggcgttcgtggtcatgaacagggagtgcgtgaccacgaggtcgaccttgcggtgcgcctcgatacccttggcctggccgtcggtggtctggagcttagcgttcatgctgtcgtggtagatgagcttgatatccacctcgcgcggctcgccgggaacctttttcgtggaaccgcccgcataggtgtacttgccgtcgacgatggcgttccacatctccgtgtcgttaatgctctcggtggcagcgagcgggttcttgatggacgggagctcgctcgagccggcgcctatcaggtacgtgccgccgttgaacgagcgcgaatggcacgacaggccgcacatgtggcccgacttgccgaagtggccgcccatcgcgcccagcgtcatgaccagctggggaaggcagtcggcgttgtgcgtgcgggcggaggcccaggccatgagaatggcggccttgttgtccttgcccatgagcccggccaggtagcggatgttctcggggctcacgccgcagatcttggaggcccactcgggcgacttcggggttccgtcgtgggttcccaggacgtagtccttgaagttgccggccgggtcctcgccctcgggcatgtggtcggcgtcgaaacctacggtgtgggtgttcaggtaatcccagtctatcaggcccttctcgccgtcaagctccaacatggcgttcgcgatgcccaagaacaacgccatgtcggtcgagggacgacagggaatccactccgcgtccacgagcgcataggagtcgttgtaaaacggatcgaccgcaacgaacttcgcgccggccttcttcatctgcagcagatggtaggcggggttgccggcggacgaccaggccggattcgtgccgaacatgaccacgacctcgctgttgcgcatgtcgaggcggtcgttgatgccctcgttcggctgcggggcgatgcccaccacatcgggcgtgtacgtccacgcgccgcgcgacgtggtgccccagtggccgatgtagccgccgtagaggcttaggaacttggaaacggggccgccgtcggcgaagaacgcgcggttgccatgggcatccttgatgcgcttgatctcgtctgcgatgtaggtatacgcctcgtcccaggagatacgctcccattcgtccttgccgcggaggtctccgtgtgcattctcgccgccgccgggctgccaagacttgcgcttcatggggtacttcaggcggtcggcggacagcacgtggttgcgctgggcgcggccgcggacgcaggctcgctgctgcgggtagtcggggctgtcctcgtgggtgtcgtcggtcttctggcgtatgaccacgccgtccttcacgagcgccttgttgaggcaccgaccgccgcagttgtgccagcaggccgccgtgacccaggtgccgtccgtgatgttgcgcgcgtcggcggcctcgtccttcttcgccggctccaccttgttgggcgcgcagccagccaggccgcctacggccagggcggccgtggcggcggcgctggctttgacgaagcctcttctgctcagctccgaagactgccgaaccttctccatgtagctcgtcatctcttccctcctttttcgtgctttccccttggagcagcaccttatcggcgccttgcgatgagactacaaaccggcggcgttaatagcaatggccgccaccttgagtgtttcttaagaagatgtttcccaattattaatgattcccctggtcgtgttatccctgaaacgcgggaaggcgggccgctgggcccgccttcccgcatggtcggcgttcgcggtccgcaaaggacggccgcgcggggagttttagaggttgccgaacagcagttccgtctcatcggaccaggactcttcgtctacgacccaagcatccccttgcttcaccaggtcaacaccgatgtaggtctcggtcgtgtccgtggtcttctccatggcggcattgaacagctcgccgagcttggccttaacggccgcctcgtccatcgagcccgcctccgtggagcgcgagaacgccgtggcgtccgtcatgaaggcgccggcgaacgcgtacacgtcgcgcatggtcacgtcggcatacgtggtgccggtgccatcgctgctcgtgtaggtgccgtcaagctggtagtcgaagtcggccagcagccactggacgaacgcaaccggatctacgcccagctcggcaaggctgtagccggcgctgtcggcgaactcggcatcgagctgggccgcaagctgttgcacgaatgccgggtcctggttcttcagcttgtcgagctccgcttgggccacggcctcggcctgcttctcgtcctcggtggcagcgagcccggagttcgaatccgaatagggtgcgttgtccaccaccgtcaccgaaccgggattcgccgcgatgtaggccatggcgccgaagccgatgaccagatacagaatgaacgacagcacggagagcacgatgccgatgatgccgcataccttgccgccggttgccttgccgtccttgccggcctccttcacggccttcaccgcaagcacgatggcgacgatgctcaggataatgccgaaaagcggcgcccacgccagcaggatggcgaagatgccgcacacgagcgcgcccgtggccttgccgctcttggcgggctgctggtagtagccgggagcgggctggccgtacgggttaaagggctggccgggagctacaggctgctgcggctggccgtaaggcgcggctggctggtacggctgcgcaggctggtcctgccccggagcgggcgggggaggcggggtgggcgatgcagcggacggcgcggtgggcgtcggctcgggagcggatccgggagcaggctcggcagcgggcgtcacctcgccccccggctgctgcggctcggagttctcgggcaagggaaccgtccgatcttgatcgtctgccatagtcgttcctttctgatcaggctcgttattgcacaatactctatcacaatactagagtaaagcaaggccggcccgcaaatcgggccggccttcgattccgcttttcgttgaaggttccgcagctttcgcgttagtagtgcgccaggtcgtcgtcctcgatgcgcccgcggaacgtgcgatagatgatcacgtggtacaccaataccagcggcaggcccacgcacgtgatgatggtcatccacatgagcgagagctcggacgacgcagcgctcatgagcgtgatggacgggcccgcgctgccggccgacgccaccacaaggttcgggaacatcgaggccgccagaagtcccaccaggcaaaatgccgaaaccgactgcgcgaggaaggcgcccttgtcgcttcccttgctgcgcgccagcacgatggacgccacgatgccgcccgccgccaggatggcaaagagccagcgtacgatgccgagcgctgggtccatggccggctggatgacgaagtgcccgtacaccgacaccgccaggaacagcacgagcgccgcgatttgcagcggcagccgcaggccggccgcacgcgcctgaagggcggacggcttcggggccttgagcgcgatccacgcagcgcccgccgccaagaacatggccaggccaagcaggccgcacagcagcgtgaacggcgtgatgaggcccagcaacggaacgcccacgtaatcgccgttcatatccatgggaatgcccgcgtagatgttgcccacggccacgcccagaagcagcgccggcaagagcgatcccacgaagaagcagccgtcccagaccttgccgtacttcttgtcgtgcccgcggtactcaagcgacaccgcacgcacgataagcccgaacagcaccagcatgaccgccaggtagaacccgctgaacgtggtggcgtacgcgggggcgaacgccgcgaacagcgcgccgccggccgtgagcagccacacctcgttgccgtcccataccggcccgatgctgcggcgcacgacagccttgtcgtgatcgtccttcgccacgaacgggtacagcacgcctgcgcccaagtcgaacccgtcgagcacgaagtacccgccgatgagcacaaagatcaggaagaaccacagcacgttgaagaaggtcatttccatggctactcaccgcctttcgcagcaaccgccggatcgtccaccggcgcgaagccgggcacgacgtccttgcgcttggcgtcgtcggatgcggcattgtcggcttcggccggcttcgccaccgggccctccttgatgaagcggcccatgacgcgcgcccacgcgaagataaggaacacgtacaccaggaagaacagcgccatggtgatcagcagctcgggagccgacaccgaggccgaggccgcatcgccggtggcaagcgccacgccctcggggccggtggccgaagggtacacgacccacggctggcggccgagctcggcggtgaaccatccggtttggatggcgatcaccgggaacacgggcgagatcaacacgaggcgctgcagccacttcatgttcttgatgcggccgcccttgcggtacgtgaacacgatggccaggatagccgtgatcatgatcaggccgtacatggcaaccatgatatggtatgtctggaacacgaagttcacgggcgccgtctcgggatcgagcgcgccgtactgctccgtctcggccagcgagttcagaccctggtactcggtgtcccaggtgcccgtagccaggaagctggtgccaccgggaatggcgaacggggtgatgacctgctggctctcctcgtccacccagccgaacaggtacagcggaggaacctcgtcgtcgtacatgccctccatcatggccagcttcgtgggctgctcctcggccacgaccacggccgacgcgtgcgccgtgaagatcatgacgcagctggtgacgatgcccaccacggcgccgatgcgcatggtcttcatggcgaagtcggcgtgcctgcccttgatcaggtaccacgcactcacggccatggcggcgaacgcgcccatgatgagcagcgcaaccaccacgtggctgtagcgggccatgagcgacgggttgagcgcggcgcctaggaagtccgtgatgacggccttcgacccgtcggccgcaagctccgcaccggccggcgtctgcatccacgagttcgcgatgaggatccacagggcggacaggcacgagccgaaccacacgagccaggcgctcaccaggtagaacttcggcgacacggtcttgcgtccgaacagcaggatgcccaggaacaccgactccaagaagaaggccagcagggcctcggccgcgagcggcgccccgaagatgtccccgacgaagcgggagtagtccgcccagttcgttccgaaggagaactccatcgtgatgcccgtggccacgcctatcacgaacgtcgcggtgaagatcttcacccagaacctcgaggccgctgcgtctttctcgttgcgcgagcggtagtacctggtttcgttgatggctaggatcaatcccaaacctatggtcaacggcacgaagaagaagtggtaggccgccgtcagggcgaactgcacacgcgccagcaacacgggatcggaaaagatatccatggcacaccccctttatgtctcgccttgcccttcgcgccagccctggggaatcggcgcgcttttaattgatactatattagcaccatttatccacaagcgctacgtgttttgaatatttttgttggcgtgcttttcctcggcaagcagcaggtcgaacatctcctgcctgccgtgaatgcccagcttggcatagatgtgggagatatgcgttttgatagtgccctcggataccacgagctcctcgctgatataagctcgcgaacgcccttgggccagcaacatgaagacctcggtttcacgcggggacaaaccatgtgcctccgctatccccgcacgccgatccaccaagagcgcagggggcacgacagtgctcgcctcttgctcgttgcgatcagtcagccacattaccaacgccacgatggcgaacgccaccacgatgatcacgccgttattcaccacgcccaagctgaagaagcacatcacccacacgatggagacggcgtcgtagagccccgccgaaagacccaccacgcgaaacggcgacgcgtccttcaggcgaatggccgtgaccgcgatagtccagaacagcgcatgggaaagcgcctcgatagccgtgatgaacacctccaccaccgccgcgagaaatccgtggtacgaagtccccgtggccgagagaaagaacgcgaagataactacgagaaaagccggcatgaatcgcttgctcaaatgcaccttcgccctcctcaccagcagtatgtacgaaagcgcaacgagcaccgcgccaacggccacagagcccatagctgccgacaaggcaccggtgaacaggtttagcgggtcgccgaaaaagccgaggggcgtgagcacacgcgtggtagcaaccgccagaacggctaccacaatctggggcgcaagatagcgatagaccaccttgtcactggcagccggtttccattcgtcgtcggctatgcgcgtgtccacgccgcgctccgccactagcgtgaagcctactatgaccagcggaagggcgatggcaagccccacctgtgccgccgcatccaaaaagccggtgaaccagctgccaagcactgttttgagcgcgaggcccgccacgatgctgccgacagcgtacgacatgcactgggttttcgccagcatgccgcagaacaggcacgtgaaccacgtatagcccgcgcccgccactgcgatgccggcaagcgccaccggctcgggcgggaagaacgtctgatggcaagccaccgcgaatgccatcgtgccgaacgaggccgccagaggaaggcaatagaacagcgtgcgttgggtccgttcgaaccagcgcgggaacagggccatgctaaccgcgagcgtcagcaggcccgccagccagtatacccgcatgttgcccaagccagccagtccggaatagggctcggcgaatcctggagaatggccgaacagatcggcccaagctgcaagcagcccccatcccgaggccacgctcgcagccatcagatatcgtttgaccccgctaatagcgcgtcctccttcggagaaaagccaagccggcccggcaccggtcgccccataatacggccgcgcggtcgacagcgcaacatcgtccattttggggatgccccccacctgcaaaaatatgccatttcggcgatgttcaaaccccgtgagaacaaggatgatcaggcagatgctttttcatcgaacccaaggagggaatatgagcaacagggaaatagatcttcggggtcccgcacagtcacgccgcggcttcgtgaaagcggccggcgtggcattggccggcgccggcgtggcggccttcgggctggccggctgcgcaccccaggcaccggcatcgggcaaggtcgacgcgtcggcagacggaacatgggacgaggagttcgacgtagtggtggtaggcgcgggcatcgccggacatgcggcggcgctgacggtggctaccgaggggaacggcgccacctgcctactgattgagaagggctcgagccccagcggcaacagcccgttttgcaagggcgacgctatctggacgaaggaacccgaaaagctagcgtcctacctcaagcagctggcgcacggcacaactcccgacgacgtgctggaagcctacgcgcagggctgctccgagatctacgactgggtgctggaaatgggtgccagcaaggatgagatgagtattaccgaacccgccaccgacccagaggagcgcaacgccgaataccacgagtacgaaaactcctacgcgttcggctacttcgccatcggcaagaactcgaaggtcgaggtgaagggcccgaaccatgtgcaggtattcctcgagcaagccgtagctcaacacgccgatgtggttgaatatcgcacaagcacgccgctcgtggaccttgtgcaggacgaatcgggcgccgtgctgggtgttgtggccggtgagaggtccccgaagcgcatccgcgccaagcgcggtgttatcatgtgcctgggaggtttcgagcactcgcccgaaatgatgcagaactatctgggccaaggtgctgccgtacccgctgccggttcgctgaacacgggcgacggccatcgaatctgcgcggagttgggcgctgatttctggcatatgaacaacgttgcgggcttctggatggcaggccgcgacctgcaaaacaccgcttacacgaatccccccatcttcaagccggcgcccaagggtttcggtatcaccgtgggcgtgaacgggcgccgcttctacatggactgggacggatacaacgttcgcgagaagtacccctatatgtccgacataagcctgcacgtgggctcgcgccacggccacatgcaattcggtggcgaatggcctcatctgcccatgccgtcgaaggcgtggttcgtgttcgacgcgcagggccttgcgcagggcgccatccctccctcggccgacggctccacgcccgatgcgaagggctatgcgcacgcagccaacactatcgaggaattggccgcgaagatggaggtgccggtcgacgagctcacgcgcacggtgagccagtggaacgagtgttgcgctcatggcgaagacgtgtatttccaccgcccggccagcacgctcgtgccggtgagcgaaccgcccttctatgcgcagctgtgcgcgccgtctttcctgaacaccgacggcggcccggtgcgctcggcgagcggcgccattctcgactacgagggtaatcctattcccgggctgtattctgcaggcgagttcggctccatctggggccactattacgagggcggcggcaatgtggccgagtgcctcgtatttggacgcatctccgccaagagcgccgtggcgaaccaagcctagcgcgcacgcaccgcttgctccggcctttgggcctggtagcgtccctcccagagcggggagccggatctcggctccccgctcgtgattttcggggccggggctctttcagagtcggcagttatgaactttagcagtatcgacaatacgtcgcgcagctgccctcgctcggcaccatggaaggggcgtcaacttgtgctggctcatgcgccggaagcactcgcaagcgcctacagcattcgacagcaggcaccgatgcgcatgcccacagcctatcgccaccttgcgtgagctcatcgaggtccgaaagggtgatcgtcttcgtgtcgacggccagttgggcatcgaccttgcgatacgggtcgctgaacacattgtcacccagcaccgactcgttgccctctagcgggtaaaggtaccgcatgatgctgctgggcagatggagcggctcctcacgccccctccgtgcgattaagcaagggcgtctcttggaaagctcgtcatcccgcgtgacgacgatggcctccaaaatgtcggtcttgcggaagagttcgttcatgatatttgaaacggacggctatctttggggaagtcggattcatggagtaatcccctgccattgcgggtcgagaaggcgtgagcaagacaaaccctcccactcgcgatctcaatagtaccggtagtacgcggcgcagctgccctcgctggacaccatgcaggggcccacgggattctcgggcgtgcacacgcggcggaacagggggcactcgttgggagccatgatgccgcgcaggacatcgccgcagcggcagcccttcgggtcctgcgtgggctcgatgtcgggctggaagcggcgcacggcgtcgaactgcgcgaactcctcgcggatgcggtagcccgagccggggatctcgcccaggccgcgccagagcgcggtgcacgtctcgaacacctcgtcgatggcggccatcgcaacggggttgccctggggcatgacgccgcgcgcgtaggcgatctcgatctcggcgcggccctcgtgcagctggcgcatgatcatggcgatgccctgcagcacgtccaccggctcgaagcccgtgatgacgccgggaatgccgtacttttcggccaggaaccggtacggctccgcgccgatgatggtgctcacgtggccgggcaggatgagcgcatccagcttgagcttcgggtcgttgatgatggcctccagcgcaccgggcatgttcttgtgggcgccgaacacggtgaagttctcgaggcccgccgcggccgcgcgcttgatggccatggcaacgagcggcgtggtggtctcgaagcccacgcccacgaacacgatctcgcggtcggggttctgctgggcgagcgccagcgcgtcgagcggcgagtacacgatctgcacgctgcggcccgccgcctgctccttgagcaggctggacgtggagccgggcacgcgcgtcatgtcgccgaacgtggcgatggtgacgttgtcggtgcgcgcgagcgcgatgacggtgtcgatgtcgtggttcgacgtcacgcacaccgggcagccggggccggacgccaggcggatgccctcgggcatgaggttgcggatgccgttgcgcgcgatggccaccgtatgcgtgccgcacacctccatgagcgtggcgccgcccgcgggcgcgagcttctggatggagtctatgaggccgcgcgcgagctcgggatccttgaacgccgcgagctcggcttccatggcggcgccatcgactacgggcttttcgtgcgcgggcgtttcgaccggcgcggcggatgtttcacgtgaaacatccgttccatttttttggttcgctggagcggcgctcgtcgggccgctcatcgggacgcctcttcgacgtcgggaatgtcctcgccggccagctcggggaactgcttgatgaggtcgatggtctcctgggcgtagccgggatccaccacctcgatggcgaagccggcgtgcacgagcacgaagtcgcccacgccggcctgcggcgtgaggtcgacggcaatgtcgcgggtgacgcccaggatatcgaccgtcgccaggttgccgtctttgagctcggtgatcttagcaggtatggccaagcacataagttcatgccttctttcaggttgcggcgcggctccgcggcggatcgcgccttacgcaccgcgctcggcggcgccctcttcgttcgaggcccatgctaccacagcttggccgaacgagatgcagccgtcgttgggcggcagatcgcggttgacggccaccgtgaacccgacgcgctcgagcgccgccagcgcatgctccaccaggtagcggttcatgaacacgccgcccgacagcgccaccgtctcgatgccgtacacgctgcgcgccagctcggccgccgtggcaacagcctgcacgaacgcgtcgtggaagcgtcgcgcgatgacgggcacgggcacgtcggcagccttatcgtccagaagcgcacggaacgcaggggccgcgtcgaacagcacgaccgaggtgtcctgcgccgtgctctccgcagtggcggtgttcttgacgacctcgatggcgtagcggtcggccgcagcggcatcatcctcggcgttcgggggggcggccggaagggcagctgctgcatcggccgcggcatgcgcggcctcccgttggccggcttccgctgtttcatgtgaaacatttgtttggtttttgtccatcgccgcttctagcaagatggccggctcgccctcgtacttcggttccgtgcagatgcccagaagcgcgctggcggcgtcgaacaggcggccgacagacgaggtcataggcgtgttcaggccgcggtcgatcatctgctcgcacagggccgcctgatcgcccagggcggcgagcgcgtcggccgcgcccggatgctccagcaggtcgaacgcccacagggcaccgtaggccatgcgcaacggatgcctcaccgccgccgcgccgcccggcatgggcacgtaggcgaagttcgcgaaccgctcgaacgcgcgctggttgcacagaagcacctcgccgccccagatggcgccgtccacaccgtagcccgtgccgtcgaacgcgatgccgcacacagggccgggcagcccatgctcgcccataaccgacacgatgtgcgcgtggtggtgctgcacctcggtgaggggcagtttgcgcgcgcggctctcgtcgtgcgcccacttcgacgtgaggtactcggggtggaggtcgcaggccaggcgcgtcggcgtgatctcgaacagcgtctcgtagcggtccttcgcctggagccacgcgtcgtaggtctcggcgttctccatgtcgccgatatgctgcgacacgaacgcctcggcatcgcgcgtgagcgtgaacgtgttcttctgctcggggcccacggcgagtatcgcctgcgaacgaacggatgcctcacgtgaagcatcgtgggaaccctcgggcccatcggggtcagcgaggacttccccggtgcccgggatgcggtcgttgacggaggcgccgcgtacttcggtacgcaagctctcgtcagcggacgcagatcgggtgccacgggaggccgcagcgtcggctcgttccgctggctggccggccaacgggatcggaaggggcgcgaagccacgggcgcggcggaggaactggagggcctcgcccgcgctgccggcatcgatgacgcgcaccaccgagtcgtcgtagcgggcgcgaatggcgcggtcgtggccgatgaacgcgtcggccacggagaacagcttcgcgtaagcatcctcgtcatcgatgacgatgggctcgtcgtggatgttgccggacgtcatgacgagcaggggaatgtgacagtatccccgtccctttgtctcatcggcgaagtcgtggagcaggaggtgctggaggggggtatagggcagcatgacgcccagctcgggcaggcggtcggccagaccgggggcgaaggcggcgcccgcgcgcttcttcagcagcacgatggggcgctgcgagccctcgagcgcggcagcctcggcgtcgttcacctcgcagacgcggcgaacgtcggccgtcgaggcagccatcaccgcgaacgccttgccctcgcggcgcttgcgagcgcgcaggagcgccacggcgttggcgttgttcgcgtcgcacaccaggtggaaaccgccgaggcccttcacggccaaaatcttccccgcacgcagcagctccacggcgcgcgcgaggatggcatcgctctctgcacgcgttttcccccagatcaccgggccaagtggcgaagcgatggcgtcgggggcgtcacatgcttcacctgcagcattcgtgcgctcttcgaggcctacggccggcacggaggcgtctacgctggccagcgcgcagggcaggccctcgtgctcgcgccagctcaggtgcggcccgcactcgaagcacgcgtcgggctgcgcgtggaagcggcggtcgagcgggtcgccgtactcgcgggcgcaacgctcgcacatggggaagtccttcatagacgtgctcttgcggtcgtagggcagcttctcgatgatggtgaagcgcggcccgcagctcgtgcagttgatgaacgggtagcggtagcgccggtcgttggggttgaacagctcgcgcacgcagtcgtcgcacgtggccaggtcgggcgacacgagcgtggtcttctccaccgcgccggcgtccgagaagcggatctcgaaggagtcgaagtcctccaacggaacctccttgagcgtcacttcttcgacgcgcgaggcggccggcgggttctcggacagctcgatgacgaactcgtcgagcagcttcgcttcgccctcggcatggatgaacacgccgtcggtagcgttgagcacccaaccgtttatcaggtacttcttcgccattcgatagacgaaggggcggaaccccaccccttgcacgatacccttcacctgtatgtcgagcgcttcgatcatggtgcgccttcccgatagctttgcgagcggaacctacctagttcaacgttgcgagtatccccgtgataacctcggacagggcgcgcagcgtcacgccggagttgtcggggaggtgcaggtgcacgcagcggcgaccccggtcggcgagcgtcagcaggtctccggaagcctgcgccttcgccagcgttcccaagctctcggcctcttccgacagcgggatgtccttcagctcgtcggccgacaggatgaggaacacgccgttgttctggccgcccttctgcagctggcccgtggagtgcaggtagcgcggccccacttccaggcacgacaccgtatggcggctggccgccacgccgtggcgtatgagctcgagcgcctcgcgccgcccctcgcccgtgaacggcagaaacgcgttgagcgcgaagtaatctcccggttggatgctggtcagaagcgcgcggagggcgccctgcacgtcggtgcagtccttgaagcacggcgccaggcgcacctccacctcgcccatgtgcacgtcgccgatgtagtcctgcacgaagtcgggcgccggctggccctccttcaggatgtccagcaccacggccttcgcggaggccacgtcgggctggtcgaacgggcacacccgcatgaggtagccgcacatggccacggcgtactcccacatgacgaagtgctcggccagctcctccaccgagtcgatcttgaagttcgcgcgcgggatggtgggatcgatgtaggacaggctcatctcgaagttcttgcgctcgtcccacaggtcggtcttcgtctggtacatgatgacgctgcggtcgccggggtcgttcgtgagcagcagcgagtctatctcgatgttcggcaggatgccctggccgtccttgcccaggctctcggccaccagctgctctatccacaggcccagcacgcgaccgcgcttcggcgtgaggaacgagaacttgttgcgcccctgcaggtagttgtcgtacaggaacgccgccagcccgatggccgggttgtcgatggcgtcctcgctgcagcgcttctcggcctccacggcgtgctccagcagctcctccaggtcgatgcccacgagtgcggcgggcagcaggccgaacacggacagcgccgagaagcggccgcccacggacggctcgccgggcagcacggcagcccagccttcctcgcgcgcttgacgctccaagtcagagccggggtcggtgatggccaccaggtgctgcaccagctcctcctcggccagggcatcgcccaccgcgtcgcgcacggcgcgcagggcgaggcgcggctcgatggtgccgccgctcttcgaggagataacgaacagcgttgtctcgggccgcgcctcggccaggatggcgcgcacgcgcacgggcgagtcggagtcgagcgtcttgaacacgatgcgcgacgagtcaggcttgttgtatttcgtgatggtcatgggcgcctgcgtggagccaccctgaccgatgagcacgaccgtcttgagtccctgctcgatgatggaatcggcgaacgcctggatgtcggcgagcgggtacggcgggttgctggcaaggtccgtccatcccatgtaccgttcggcgcaggcctgggcctgttcggagaaatcatagagtttcgcgtccttcgcgtggacgcggctggcaacgcattccttcacgagcgtcttcgcggagggatacagcttttccatatcacccgaaatcatgaaaccttctttcagcggagttccgcccattctagcaaacggcggcgagaagtgcccgtgcccacctcggcttgtgacggagttgtgtacgtgagaccgcccagcggctccttcctgaaagtccactaattcgattatatttcttattgatttttattacttattgatataaagtatcaatcattagatgagcgcagacgagagcagcgctcacgcggatcgggcggcgcagaaagcaccgccgctggaacaggaggggtttccatgtccgatatctcccggcgaagcttcatgaggaacgcggctattggagccgcaaccgtcggtacgctcggcctgctggccggctgcgcgcccaagcaggaagagcccgcgcctcaggcgaacgccgacgctcccgccgacggcgctacggcgaacgtgctcgacccgcaaaccatgcccgacgcggctacggccagcaacttcaacgtggttgaggaaagcgccaccaccgtgggcacgacgctcgacaacctgaagacggccatcgagggcgagacgggcgccaccacgaagtacgccgcatgggcaaaggttgccgagaaagcgggctacgaccacatcgcgcgcctgttcaactgcacgtcggatgccgagaagatccacatcgagctggagtacaaactggcacagaaactggagccgggctatgagaagcccgagccgcccgaggttcccgagcacaccgtggacctcaacctcattgctggcgcgaacggcgagatctacgagacgtcggacatgtaccccgcgttcatcaaagtggcgcaggaggagcagaacaacgaggccgtgcaggtgttcacccgcgcgaagctggccgaggcgtaccacgccgagcgctacctggacgcgtacaacaccatcgacacgcccacggatgacaaatactacctctgccccatctgcggctacatccacaagggcgagaacttcaccgcctgccccatctgcctggcacccaaggcttctttcaaggaatactaggctttcgacctgcccttaacgggatctctccctcgaaggcccggatgcgcccttggcgtgcccgggccttcccttccccatcccccttgcctttcttccgccttcgcgaccggccaaggcgagccttgggccttgccgcattggggcggaggcggggggattcgaggcggcttacatcaccgggggtgtcatataagtgatggaggggttgtggcgcgaggggcgcaccggcctgctgcggcggcttgattcgctgcttatcggttgcttgacctggcttttttcctatggtagtcaacttgatggcgcacggctgggctcgagaggcgcttctctcgcacgaccctggaggcacgcggcgaacgcggactatactggttgcgctcatttcactactatatagaggagttgcaactatggctttggaactggcgctgcctcagctcgattcaatcatgacgctggatgatatcaggaagatgaaggacagcgacttcgtcaagaacgtgcagagcaagcgcgtgaagatggtggtgacgaacaacgaggtgtcgagcgttatcatctcgccggacctgtacaacgtattcttggaggccgtcgacaagctgaaggccgcccagacgactgcctctccttccgcctccgcctaatccgaaacctccgggcgcccgcaaggccgaaacccgtccctctccgctttgacttctggtcgaaaagctgcgaggggcgggttttcttttgaagcgggcagccaggcagccgccgaggcagtggagcgcgatgaggctatgcctcctcgccaagggctaggaggcgcgcatcggcggtgttcgccatgatcagggcctcgtaggtcttgcggtcgatgcgctcggcgcgcatgtcgaccgtgaacaccgcgttgccgccctccaccgaaccgcccgaccacgaggagccgaactgctccttcgcctcggacaagagcgcttcggccgcctcgtcgctctcggcttggatggacagggtactgctctcggccaggccgtcgtctccgaaggccaccgattcccgcgcgttgcgcagctggccgtcgggaccttgcaccgtgtaggcgaaagcgagcgcaccagatgccggagcgctggagagcgcaggcgcctcgtgcgtgtcagccgacgtccaaacggcaaagcacgtgctcgccacggccaaggccagcagcacggcgcacagcacgtaccagcgggtggtgggggatgcgtcccgcgccgacttgcgcttgaccggccgggcaggcgaacggtcctctgcggagggcgcgaccggcaaagccgcctcgagagcggagccagacggaggcgcgggggcaggggatttcgaggcggaggtgcccgacggtgacgcgaagtcagcgccttctgcgggtgcgggtaaaacgcctgaaacgccaagggaggcgaccatgggtttcgcggaatgcgccgaaccggtgccgcgcgcgtccttggcggcttgcgcggaaccttcgcttgcggaaccctcggcggctgcggtggcggcatccgcaacctccgcaactagcgcggcaccggcggcaacgtcggccgcttgggagaggggaagcttttccgcggccgtggaaggccctgcgtccttcgcgtccttcgcgtccttcgcctgttccttccgcttcgcctgttccgtgggctctacggatgcggaaggcccagcggccttggcatcctgcagagccgccttcggctccaaaggcccggacggcttcgcggctggggcaggctcgcccgacggcaccgtgacggtcttcgccgcatcggagtccgcgacgcttccagcggccggagcggcatcctccctccccgcaggcaccgcagccttcgcgctcgccccctgcttgccgacaacaccggcaggggcggtcgcaggctgcggctcacgtgcggaaaccggcttggccgccgaagtccggccggcggcggggcggaacgcgcgcgcatctgcgtaacggctccttaccgtatggggagctggctcgacggcggccgtcttcgcggcgggaacgccggacgccaaggcggcgacggcctctaccgtgagcgcgacatctccgcgccggccgggctcggcgggctcggcctcgcgcggaacctcggcgacgagggcggccaaaccgctcacccagtcgtcggccgcggcttggggttcggccgggacggcctcggcctccccctctgcagacgagcctcccagcagcgaccgcaagctgtcgacgagggccgcatcgccctcgccggcccgctcgcccccctccttccggcccgccgcatcatcgaacgaaatggagaacgtcgcaagcgaggcggacgcaggcgcctgcgctgcctcctcttgctcgccggcaagcccgaggagcatcgaaaggtcgacggaatccgaacgaggagaagcctcttcggcagattcggggcccgacgcgtccccgtcggcggcgcccagcagcgcctcgagcgacaatgcggagtttacaggcatagcgatccctcgttctctcggttaacggtacggagcggcgtgcgcttgccgcagaggttggaggccgacggggcggaggcgcgccgcgagcgcccggtggcgaagcagccggcggccccgcaggcgcaggcgagcgcgagcacgcctgcgcctgcggacggcaaaggaatgccggcgcgctcgtcggccgactcccccgctgcggcgctcgcggtggactcggcggccgcgagcgcctgcgcatcgcgcttcgccatccaagctcccagtccctgaaccgcaccgctcgctgaaaaagcagggccgccgctctccccgccttcggcctcggccggatcggctgcttcgccgacggcggggacatcgcccgcgggggcgtccccttcggcgccgtccgcagtctcgcccccgtctggcactgcagtcccagccacgccgccatcaacaccgaccgtcgcagcaacaccctcgcccgccggcgcctccccgccggcgccgtcggcgcctcccgcgatgcagcccgactcagatccggcgctcgacgcctcgccacctgccgatgaacctgccgcacccggccccggcgcgcttgcccaggccgatgcagtgcacagcgtcgcaaggcacccggccagcaagcataccgccagccaaagcaccaccgagcgcgctttcctcatcgaattcgccatcctcgcctttcttctgcgcatgggaccgcgtgcgacccatccgcttcaacacgccaaaagcggggccgcctgaaaagcggccccgcatccggcccatctcatcgaatcgtttccaacttgcgcgcttcgcgaagcagcaatcttcccctcgatgtcagcgcgtagccgttcgccagttgtcccccgtcttccgcataacggggcgtggacgccaccaaaccctcttcctccaggcgcatgcttagaaaacgcacctgctggatactcagccccaacccgcgggccatctgcctatacgagagcggcgcgacgtggctgcgggcacgcgatgtttcctcgcgaatgaacatcagcatcctgagcgcgttctcccggatgaccttgtcgctcgttctggacatggcattctacctcagctttcctccaagtctcccgttcttctgcggcgacgcgaccatgcggccgctcccagcacagccgcggccgccaaagccgcaaaacctacggttaccgcaacggaaattaggggatcccccgtcttcgtaaccgttgacccacccaaagcactccatggcgaggctgctccggaacccgtacccgagctgcctccctctcccgtgccgccggggtcgtccggcgtgggcgcaggtgtcggagccgctttgaacgaaacggcgagcgtatggtcgccgcgcacgtccaagaacgcgtagcttgcgcgcgaccaggctaggcgtgccccgtccaccgttacagcccccactgcgtagccctcgtcgggatagaagtagaacgtctggctcgcaccatgggcaacctccaccgcattgctgggcgacacgcgcccgtggccgccatccaccgttgccgtgatcgtatgcagcgtaacgggcgggtcgggttcctccacgggagcgaactcggcgtgcagcccatgggcggcctcgacgttcgccaacatgaaggtcatgttctgcacctgggaagtcacatcggcatcgtccaaggtcacgcgcgagagcttgtagccctcgtcggactcgagcgcgaacaggacctcctgcccgcgcaccacgtccaagcgtccggacggcgtgaccgagccgccctccgaggccgtggccgtcaccgggaacgtgtcgggcagcaccgggtcgggatcgccggaggcgcgcaggcggaacgtggcgtgcagcgtcgtgtccgccgccacgtcgtacatcgtgtaggtgccgtcgacgggcgtgaccgtgcgcccgcccgcctccaccttgtcgagcacgtagccttcctcggggaagaacgcgaacgtctggcagccgcccgcccgcaccggcacgtcgcccgacggcgacacccggcccccagcggaggacgtggcccgcacggtaaagggcgccgcaggaccgggttcctccgcatcggctgcgaacacggctctcacctgcgtgtcggcacgcacgttctccaaggcgagcacgcctcccgaaagccggcccgttgcatcctgcccgtccacggtgagagcagccaggtgccaacccgtatcggcccgcaccgtgaacgacgccccgccgccgctgggcacccgcacggcccctgcaggcgagatcatgccgctgccctccgcactcgccgacacctcgtgcaccggcaccggcgagggagcgggctcgccgtccgcgagcctcttgaagcggacgctcacctgggcatcctcggccagattgtctaccgtgaagcagtacgcgctctgcggcagcaccgcgctcagggatcgcagcgtgggcgccaccaccgcgtgcgccggcacgggctggccgttcaccagcacggcgtccaggccgaaaccgggctccggatatgcgtagaacgtctgcgacgagcctgccaccaggcgcagcgagcccgagggcgacacggtgccaccctcgccgctgtcggacgtcacctccacggccacctcgacgctcaccagggtatcgtccggcagcaaatgctttcgctccttgaacgtgacctccacgcgcgcgtccttcgccacgtccgccaagcggaacgagaagcccccggactgcaccacagcgccgtccaccagcacctcgtccacctcgtagccctcgtcgggcagcagggcgaacagcaccgagccgccctcgatcacccgaacctcccccgacggagacacggtgccgtgcgcggccgcctgcgccgtgaccgtgtaggcgcctggctggggccgcggcacggagcctgcatcggagaacgcgacggaaagctcggtgtcggcctgtatgtcgaacagggtgtagctggagccgttgaacgcgaactcgcgcccgtcaatggaaagcgcgctgacctgcttgccctgttcggggaagaaggagaacgtctgcgccgaaccgcgcggcaccagcacccctcctgctgggctcactgcgccgcccgcgcctgcgcgcgcctcgaccgtgacgcagtcgggagcggccgggtcgcgcggcaccggctcgaacgcaacctccacgcggtggtccgccaccacgttctgcaacgtaagcttgccgccacgcacctgtccggttacgtcgtcgccgtcgagcataaccgcgttcaggcggtggccgtcctcggccgccagcgaaaccgtggcggtgccgccgtggggcacgtcggcctgagcgggcgacacggtgccgcgaccgtccacgacctcggccgtcacggtgcgcgttacgacgggaagcggcgagccggaacggaacgtgaccgtgacctcggtatcgtccagcacggccggcagcagcagctcgtcgccgaacaccaccgctcgttcggctggcacattgcctttgcgaaccagcacttcgtccactgcgtagccttcggccggcaccagcagcacgcgcacggcggtgccatgcgcggccggcatgctctgcgaggcggacggctgcgcgccgcccagagccaccaggccaccctcgccctgcacttgggccgtcaccgtatgctggcgcccttcatccaccacagcaggagcgaagaaagcgcgcagcacgtgatcgccctcgaggggcgggaacacgtaggcgttgcccgcggcctgcacggccgccccgtccacctcaacgcggtcgagcacgtagccctcgtgcggcaacaacgcgtacaccggcttggcgcccggcgcgaactccacggttccggccgggctcaccgagccgcccgctccggcctcggccgtaaccgagcatgtcccctgggcggggacggccaacgcgaacgccccgagcgcccccgtcttgcccagcgccctgccgcccacaacctgcgcggcgatctgctcgaccgcgcccgatgcccccaggcgcagcactgtgacctctgcgccgtcgggcaggtcgacggggaacgacacgcccagatcgccgcggtacgccggcgttccgtcgggggcggtgggcagccccacgtgccatgctccctccacgcgcatccccgctgcggcctcgagcaggaacgcatacgcagccgagcgctcatcgagcggcgtcgccgcgaggtcggcgtcggcaagcgaacggtgcagagcgccttgcacggtcacaccggcggcgctcgcaagcgtgcggtccaggtactcgtcggacagcgtcacgtccatcgacgcgctcgccgacgacccgctggccggatccgcaacctccacggtatagcggtaggtgcggccggtttcaagaaggcctgccgcaacatcgtccgacaggggatgctgcgggcggtcgtcggcgaaggcctggtcgggcgcaacggaaccgtcaacgcccagcacgccgcgcgtccacgagtaggagcacacatcggggttggcccccgacaccacaaccttcagcacataggtctgctggtcgaccggctttcccatatcggctcgtatgtcagccagcgaggcggcgatgtcgtctgtcttccccaagatggaaagccctaccaccagcacgctcaccgtggttgaggcctcttcgcccgcaaacggcacggccggccccgccgacggcccggagggcgacgacgcaggttccgcaatggcggaaacgggggtggtaagcaggcatacgcacagcagcgcagccagtgacttgtgtatataccttctcatacctgttcccttttcccttgtcagcctgccaccacgatggtcatcttcgcggcggcctgccccaccggctcctccgtgtccgactcgaaggcgtagaacacggctgtgcacgggtaagaccccacatccagatccgcgtccagccgcgcacgctggatgtgatggttgggctcgatcatgcccgtgcggtacacggattcgcccgtgtcgtcgcgcaccacctccacctgcatgaggtagtggttgctcggcacgttttctatacgcacctcaccctcggcggttccctcggggaactccacgtaggacgctatggatatgttgaacatgccctcttccacgatgcggtcgagctcggcctgcagctcgtcgggcgtcttgccctccagctggccgagcgccgcattcgggtcgcgtccctggaggctatggctccccaggttgaacgcgagcacgccggctaccacgagcgccgcagccgccactgcggccataatccagaaaaggggcggcagcgattggcgggcagcggccgaacccggctgcgcctccccgcgcgccgtggacatgcccgtctcggaaggacgtgcgccttccggattttcgttgttgctagagactgacatataccctttccgatcgttatgctgacggcgccgttttgcctgttagtggttttgcgaggccgggccctaacgagcccggcccgcgatccgtttcctaagctgcgctgactttgtacgtgagcttcacggcttcgactgccttgtctgctgaattctgagccgtgctagaggctttcgacatggtgccggaaagcgcgatggcgagctcgttgttgctcgcgccggcagcaacggtccagcctgttgcaggtttgaacgagttgttggtgacaacgctccatccagttgtgtcatcggtcgtggcgatcttcatttgaagcgtggcgatttttccgtcactcggagctgatgcagttgcctgattgtcagacgaaaggccccatttcgacgcagcatcggtcgtctgggtggccaccacttcttccaccttgatatcgaacgccgagttgttcacgatcttgtacgtgccatcggtaggaccagtgaatgcgccgccgttcgccggagccccgaccgtcaaattcaacggaagcgtggcgctaatattgctcgtatcggtaaaaatcgacacctttgtatcggcagagttattgctaaaagattctgcaaacgccgggacagccgtgccgaaggcgagggccgcagtgaggacggcggttgccagtactttcttcttcatgttcgttacctccttgatcgttgccaactgcttcttattgttcgaggtcatcgcttcatcaaccacctcgatccttcgcttcgagagcttccatgcactcaccccttcacgatgagggtcaccttggcggcagccttgcccacatcgtcgtgggattcagcgtcgagggcggtgaacatggcggtggccgggtaggttccggcgtccaggtcggccgagagcgtgatggactcgatgtagctgcccggcttgatggccttggactcgtagacggtctcaccggtgtcgtccagcgtgatggccacctgcatgaggtagcggttgccgggcacgttctcgaggtaggccgtgccgggcgcagcgccgtcgtcgaactcgatcacgctagcgatggagatgccgaacatgccctcctccacgatgcggtcgagctctgcctgcatctcctcggccgacttgtagggcgcctgtcccgatttcgcgttcggatcgaagatgtccgccggacgcccgagcgcgaaccacagcgcgaggcctaccacgatcagcagcaccacggtggcagcagccgcaaccaggcgcttcttcttagacgagccgtcgccttccgaacgcggcgcaatcgagggccgcggcccgcgagacggatgcacctcgtgcacaccggctgcccggtgcacttcatgcagggagggattctggtctgtctgctgttcttcggtcatatcccctgtctttcatcgatcaatgcgccgaagcgcaaatgggtaggtttcgcccggcgcccccgagggagcgccgggcatcgaatgccaggttttctcacgccgcaggctccatcgtgtacttgaggcaaaccagatcagtgctccatccatcgcgccacagcttcaccacggacgcatcgggaatgtccaacccgatggaatagttgagcacgccgggagcgccgggctgcgcagcgggcagcacaagcgacgagagcgttcccgattcgccaacccccagcggcagggcgcgcttggcaccctcaggaagtatcgttgccgctatgttctgaatatccgccgggcccacgatctcgctagccgcattcgccgcgtcgcacgacacatccgttaccttgagcggcacgggcgtgaatgaccgcatctgcacgtccgccgacgtagtcttgcccgtggggtcgagcttcacttttgccttcgtcggtatctgatacatggtttgcagcgtgtactttccgaagagcatgagattgccgtcaaccagcatcgcgttgttttcgtcaaacatcactttcgagtcggccgtgaacgaattgttccgataccaaccgtcgaacgcatagccatacagagcagggtcggcggggcgcgagatttttgcattatcggtactaaccgacatccacgtctcggcctcccctgtcgcaggatcgaccaagacgaagcacaccgtatgcgttccagcaggcttgcttgctgcggtaaagagggcgcgtccgtagttgctcagccaatatgtcgatgcgtcggcactagtgggaccgagcttggagaggtcttcgccagcgtagtaggtaggaagcccgttctccgatccgtatcctgccgccccgacgccaccgaacatggtgccaactccagctaccccgcccatgcccgccaattcgagtgttgaaggaagcgaagtcaagctggtgcaaccaccaaacatcgacgatacgtcattcaggttcgcggcattggagaatgcaaatccttcaggcagagccttgagcgaagtacagccttcgaacatgctgaccgtgctcgtagtcccagccggaatggaaaaaccatagggaagcgtctcgagagacgacgctcctttcgcaaactctttaagcgaacccacgccggccggcaaggcgaagccggaaggaagcgcctccaacgaagagcagccgcttataaacccattagccgcatttaccgttgacggcaaagtaaaaccaaccggaagggtccgcagggccgaacaccctatgaacatgcagcggacgtcttttattccctcgcgaagcaggaagctcattgggatctcggttagctttgcacacgcatcgaataggtgattggcagtgaccactgaacgagggagctcgaatccggatggcagcttcgaaagctcgcggcagtaggcaaacatgtccgaaacgcattcaacgccttcagggatatcgaactcatcgggcacttccaccaaggacgtgcagcggaagaaaagcctcctcagctctttcgcttgcgtcgatatgcccagtttcgaaatgtcgctcaaattatgcatttcggcaaaccagcagttcatgttgatggccgatgcgctggaatccatattcacgctccgaacctcgtctcgcaaaggaccccagtagccgttattccactttccttcggagaacgaggcgtctgcatggttccaccccaagtagcctatgacctcccccggctcgcaccagatgcgcagcgtgccgtcgtccgagagcgaccagccggcgacctgcgggtcgtcgttgccgggagcgtccgtcgtcggcagggcgccgctggtagcggcgtacttggcgtacagggaaagggggccgtccaccgtcagcgggaagctcgccttgctcgtgcaggccgcatcggtgtaccagccgaggaacgaggcaccctcgcggccgggggcaacgagcccgcgtatcgtggagttcttcgcggccgattggcgcgtccacagcttttgaacgccctcgccatcgggcagatggtaatccacgaatgccgagccatcggggatacctatctgtaccgtgcgcttgttatcagcccacttcgtgtacttcataaccgcggattctgcaccgccgttgaaacacgtcggcgtctcttccttgcattggaagggaagtgtcgccttggccgcctcggccacggctacggggaagtcgaagccgtcggggagcaccgtcagcgagctgcaatttgcgaacattccgtccatgttcccaacgctctcggggaccgcgaatccctcgggcagcgacgccaaggccgcgcagccgtagaacatgttgtcggcgtcggtaagctggtaggcgacatctgggtcggccgtcaggtcaacagccggcatgaagtctttcggaagcgactccagttgcgtgcacccgttaaacatggacgaggcgcgcgatacggactttggaagggccaagctttccggaagcgacttgagctcggtgcatcccctgaacatcagtgacgaatgctccgtggttgccggcagcgcgaagccctcttggacctcttcgagcgccgtgcagttctggaacatgccgcccaggttcgtggcgctttccgggaacgtaagcgacgcgggcaccttcttcaaagccgagcagccgtagaacaagccgtaggcgccaatcgagtcctcgggaacaaatacgcccgacgcgtcctcgaggcttgtcattctcttaaaccaatagttcatgtggtatgcccgcacatcatcgcccatggcaattcgcctcaccgacgcgcgcacgccgctccagtgccccgagctctggccttcccacccccaatgcaggtcgtcgatcgtctgacctcgcaagcacgtaatcgacagcgtgccgtcgatgccgagcgtccagccggcaagcgctgggtcggtgttgcccttatcggaagtcgtcggcaacgcgccgccgtccaccgtccacttgccgtagagagtcgtgggctcgctcacgggttgcgagaagtcgaacggctcgaggcagtcctcgtccgcgcaccagccggtgaagccgtacccgccgcccagaggcgcaccgatgtcggccaccatgccgtccgtgtcagtgagcgccgtcgagcgcgtggaccacgtgccgtctatgtttaccagcttgtacgtgacctcgaacatgccgcggtcggccgagtcggcgatgagcacgcggttctggctagcccagtcgaagttcaacacggctggatcgcagccgccgtagtagagggggacgagcggggcgccgctatcgatcgaaacgaagaaaggccttctgttctttcctgtgtcgctattcaccacggtttcggccgggaagctgaaatcgtcgggcagcatggtcagagcgtcgcagccatagaagatctccggcatgttgccaacagtcttcggtatgctgaatcccttggggagagacgtaagattgcggcagtttttgaacatgtttgcgcaattgtttatgttgaccggtaaacaaaagtttgccggcagcgaagcgatgggcgtgtccttgaacatactgaacgtccagccgaccgatgtcggaagactaaagttttctggcaggttcctcaaagaagtgcaattggagaacagatcgccggtacttaccgtgccttcagggattaccacgccctcgatgtcgaagagattctcgcacccggtgaaccagtactccatgatctgcactttgcatgaaggagccatggcgactttctttatctgagaacgcagcgtcgaccagtgcagatcgaccatgccgactgtcttgtcgtcccagccgatcttgtcgatgacgccgcctccgcgaatgtacagcgtgccgtcggcatcaagcgaccagaaggcggcgccgacgttgtccttggtcggcagcgcgccgccatgcatgcccggagccagcacaccgtagagcgtcgtgttgcccgcaaacggttctgagaaatccacgcgctgagtgcactccgagtcggagtaccagagcgtgaacaccatgcccgggcgggaaggtgcaaacccaggttcagcaagcttgccagaagcatccgtataggcggttgtccagtatgagccggggcctgtctcatccccagcctttatgttgagagcgacagcgtgggcgccgacgggtttgctcgcagatgagaccaattcgcgattcgccgcttcccacacataccccgtaacgttcccatttttgccgtcatagtacatcggcagcttagtacctttcacctgaaataccgttttattactcttggctgctgcaggaatgctgaagtccttggggagccgcagcagagagtcgcaccccgcaaacatattgttcaagctgcctacgccatcgggaacagagaaatcagcgggcagcgagactagagaagtacaattctcgaacaggccaggtgcctccgttaccgtaactggcaacacgaaactggcggggagctcgacccgacggaagactgattgaagaaagtctcgtacaagtgtccgccgcactggatccgatacttgtcacggtactcggaacctcgaaatgtcccgtaaacccaccgggaattgcaatcaggcttgacatatcgaccgggtaaagcgcaccggtttcatcggagcggtaggtggtattaccttgagcgacctcatacgcctcgatcttcgcattgccggcgaatgggtttttttcaatgagggtcactgttgcgggaatacgaacaacaccactgatactgcaccatgcaaaagcagcttccctcactgtgcagatagtctccggcaacgtaatagaacccaaagtcaattgattcgccaaatccatgaaggcggatttccccacttcggtcacggtatagcgcacaccgtcataggtcacctcgctcggaatggagagatccccttccggcctcttggccggatcatcgctcctggagaccgagaccgtgggaatgccattgtcgacgccgccggtaacggtgtacttgaaccaggtgccatctgccgattgctgctcgaacgtgcttccagcggttatcctgatgagctcgcggttctggctggcccaatcgaattcgagcacggacgggtcgttgcccgtgtagtaggtggggacgagcggctctccaggtgcgagttcgcacatgaaagagttttcctttccggcttgcaccgggaatttgaagttttcgggcaaactcataagcgacttgcagccgtcgaacatgcgccacattccgtaggtgctttcggtctttaccgtcgacggaatatagaaaccctttgaaagcatggcgagcgattcacaaccgttgaacatatagtggcattgcttgattccttcgtggagaacgaacgttgaaggaagagagacgatagccgtcctttggaacaagtaggcgcaattctcgacgctctgcggcatcgagaacgtttcaggtagctgtcgcaacgaggtgcaagccccgaacatcgactcaatccactttatgccttggggcaacacgaagctatccggaacctgcgtcaaggaggagcaggtgctgaagagggcgtgcgcacgctctaccccgctcggtatgaacacttccgaaatatctacgaggctgggcatcaggcagaaccaacgatccatgtcgaccgccttaaggcccggattcatggatatcttcttcacgtagtctcggaacggcccccagtaggtgcgacaagcctccgcctcgctcaccttgctgaacccaagattggctaccgtcgcatccgacgtgcacctgatatagagcgtaccgtcatcggtaagcgaccagaacgccgagtccatgccatctgtcgtgggcagcgtgccgcttttcgtccccggagccagcacgccgtagagcgtggtgtcgcccgtgaacgccttcgagaagtctacgcgctgcgtgcaggcctcgtcggcataccagagcgtgaacaccatgcccgggtgggaaggtgcaaaaccaggttcagcaagcttgccggaagcgtcagtatgcagacgagtccatgtcaaccctgcccctacctcgcctcgctctttaatgttgagcataacagtcttgacaccctcttgctcgaccgaaggagtgaccaagaatctgttcgaattcgcccaaggatagttttttactcgctgatcaggcccgttgtaatacatggggatagcttggtcggtcccttcaacaaggaacatattcgtagtggccgccgggctcgtggagaactcaaagctgtcaggtagcgaaacgagcgatgtgcaatccttgaacaccgtctgcaagtctttagctcctccggggatggtgaatccatcaggcaaagacgcgagggcgctgcagcctctaaatacgctgaccatctccttcacataaggaggtagtcgaaaacttgtaggcagctctttgagcgatttgcagttgacaaacattccgttgagatacgttacagactcgtcgcagccatccatgctcattccagacggcaacgccttaagtgaattgcactcccaaaacatgttgttgaaaccggtaccgtcgacaacggattgcggtagtttgaagccctcaggaaggtattcgagcgaacggcacccagaaaataacgatccgcatttttccacagaagtcggtaaagaaaaattatcgggcaatttgacaagggattcgcaactagcaaacattgcctcgaaattgactgcggcagcaggcaagttgaaatatgcagggaaagactcgagctgcgcgcactccatgaaaagccttctgaggttcgttattccgtcatggagaacaagagtatcgggcacttgcctgatacccgaggcggcaaacatcgcctcaatatcagtgacgccgtccggcacctggacacttgagacgtccgaaagattcttcatggtggaaaaccaaaaccgcatgttgacggcgtcgaccgagtcctccacgacgatacttttgacaaaatcgcgcacagggccccaatgattctggaagatcgaaggctgggagggaccccatgtcgtccatcccagatcttggatcaccgctccatcgcgttcacaccagatgcgcaggatgccgtctgcgtctaaattccaatgaccatattgcgtgttgccatcggtggggagcacgccttccgaaacgacaacttttgaaaagccgtggacgtttttccacgtctcggccatagcggcaaaatcgtcgccgcttccatcacgagctatcgggggcaggacgacggtaacgccggagtcgcccttcatagcatcagggaaagcagtggaaatgttgctgctttccatctttccatacgcgaacacgctgtcaagttcagggcagccgttgaagaccaatttgccatctgccacaatcgaaagattgagctcgacgctcttcagggacttgcagctgccgaaagcccccgactcaagcttggtcaagccctcgggtagcgaaacggattcaaggcccgagccattgaaagagttcgcaccgatcatcttaagccccgtggaaaacccgaccgagcgcagcgaagagcaggaggaaaacgccacgtcgtagatggtctctagcgagtctggaaaattcacagcagcgagtttcgagcaacccacaaatgccgcgctttgaatgatgcggagactcgagccctgttcgaattcgagcgcctccaattcagtgcagcctccgaaagccgctctgctgatgttcaccaaacttgccggtagcgatagggccttcagcgcagtgcagttctcgaacgcatctgcctcgattattccgagcgacgacccgacgccgaacacgatctccgtgagcgcttgacagtctttgaatgcacggacgtcgagaacctcgacactggagggtacccgcaccgaggccagctctttggcgaaagcgaatccataggatgcgatctcgcgcacggggtagttgcgaccggcaagttcgaccgaggcgggtatgtcgagactctccgggactgcggacggatccgctgcggcaaccgagacgctctcgccatcagaccgcatacgatagacgagatttccctcttgggcgtcctcgatccattcggccacgagagtcatatcctgctctacggcggaagagaaactccaacggggaccggaaatatcttgaacatgccatccggcaagtccaaagccgtcccgtgccggcgctgcaggctcggagagaggcgttcccttctcgacaaagcgctcgaaagcagagaaccgccattggacggctcgaaccgaaccgtgcacaactcgcctgcaacaacgatgttcgcgggatcgaggccgaatccgttcgcatcgttagcctctgtccacaaggtctgctgggcttttgtcgatacgcgcacgaccatgccacttgcatcggccgaatcgaacgcagtgggatcgaatgcctgaatggttccgagaacgacgatgtcggtcaagagcgggcagcgcatgacaaagaggccgggaatgctgtcaacacccttccccaccacaaggctggcgagactcgagcaggactcgaaggccctggctcccagtgtcgtcacagaatcgggaacaaccatgtcggccaaagccgcgcaaagcgcgaacgcccgggagccgatggatgtcgttcccgcgggcagttcgatggcgccgagcaccctacacccgaggaacgcattgtcgccgatgatcgtggcacccgatccctcgaaaacgacttcgcgcaaccggaagcaaccgtagaaagcgtcattgccgactgtttcaatagatgacggtagggcaacgctctcgatttccgagtagtagaacccgcgataagccacttcgactaccttgtactcttctccgccaccactgacggtagcgggtatctcgagcgctccctcgcacgaagtcgggtcggcggccgcaacggacacacgcctatcgctcgtcccagccgtagaagagaggactgtgcagatgagtttttgcccagttggagcatcgacctcgaacgtctctgacgttccaagcatggccgccatggagagcatggggtactcctcgccaagcagaacgagatcgtcctcgtgagcctcggatggcaagacctcgttctgcacggtttcgcctgcgggcttgtcgtcagctcccctccctacttcgtcggagccttcgtcctcggtttcctcagctgccgcctcgcacacttccacggtgcgggtggcgcgggcgagctcgatgccgtcgagcgacagcgtggccgtcacctccgaggtgccgggcttcttgccggtggcttggccattgtccacggaaagcggagtggcgggataggaataggccagctcgcagccttgaggaacctcgcaggtgccgcctgcgaacaggtcggcgctctcgcccatggcgagcgtcagaggttcaggggcgaatgacaggccgtaagcgcagcggtggttgccggcggccggcaggccgatgttccaaggataggttccgtcgggcgccaccgggcagtacaccgagacgccggagcagccggccaggacgtcgggtgccacgtcagcggcattcgagaacgtgaggatgcgcgaaagcgcggagcagtcggagaacacacgctccccgacgaaggagatgctggccggaatcgccacggactcgacggccgtaccggcgaacgcgccggcaccgagggaggcaacaccctcctccaaggtaacggacgacaggttcgcgcagccggcgaacgcgttgtcgcccaccttggtaataggcgcgcggatctgcacgttggtcaggcgctcgatgccggcgaagccaccgggggcgatggccgacacgcggtagctcacgtcgttaacctggccggacgtgggaatggtcagatcggcatcgggctcgcccgagccgccgctccacgagaccgccaacgtgtagtcgtcgagcagctcgaacgcgaagccgccctcgccgggtgcaggagcctgtaccgtgcccggatcggccggctcttggaaccgcgagaagccagcgcgctcccacacggccttgcgcgcgtcgtaattgtcgccggaggccagcgccacgacaacgtttgcgaacgcttcgaaggagaacgcgcctccctccaccgtctcgaccgagcccagtgacagcagggaagccaggccgtcgcactgcgcgaacgatccagcggccacggtcttggtctcgagggccagcgcagccgcaaccgtgcgcgcgggcgcatgcagcagcgtggtatggtctttgctgtacaggatgttgtccaccgtggcgaaagcctgattgtcggggccagcttcgatgacggccagctgggcacagccgtcgaaggcgccctcgtccaccttcttcgccgtgtcgggaagcagggccgtgccgcgcttgccctcggggcagcgcacgagcgtctccagcggcgcgtcgaacagcatgccgtcgaaggcggcgaacgcctcgttgcgctcgcccaccgcgaacgactcgaacgcgggacactcggcgaacgcgtccttgcccatgttctccaagctgtcgggcaacgcgacggttcgcaggtcggtgcatcccttgaacgcctcgtcggcaacggacgtcaccaggtaggcatcagccccgctcaccactttcgccacgatggccaaatcgccagcaggaacggccgtgtcatgccagcccgccaccgtggccgtaacgccatcggcgttcacgacgtacttcacgccgtccaccacgatggttcccgccttcgcggcagacgggccgtcggacaacggcatgtcgccggtcacgcgatcgtccgccgtggtttgcggaggacgcgccgccgtgtccggggcaccggccgccgactgcccgcccgcggtgccgccggacaggggaagctcctgctgaaactggccggtgccttccggatcagccgcgccgccctccgccttggcgtcgctgcccccggtactggaagaaccggcgtcatccgtcgtcgttccctcgccgccagcagctccctgctcctcgggcgaggcggcctcttgcaccgcgcctccttcgttcgcgtacgcgcgcggctccattgccaacccgtccaaaacggggctggccgctagaaggcatgacaagaaggcagcgcaggctgcctttccgacgttcgttattcggctatgtcgcatcgttttccctctgctgtgcttctgcttgtgcgtttgaatgttcctgttcactacccatagagcgcctgctcggacaagatggtgctcccccaagtatccgtggtgcggttttagacaccccccggtagtggcatgcagtatagcgatcccccctgtgcaaaatcgagaaaacgaatggctaggttttctctgggtttttttcgcgcaacgcgctggatgtacggtcggcgtgcgatatggccttgtcccgcaacgttttcccggtagaaggaacttggcgaatactttcatatttccttcataacgaaggggaccgagaaggttttatataacacccccactgagttaaaatagcatttcaactgcggttatatgatttcgtgactcggttttaccagaggacccagacccgcttaagacggcgttttatcgtgctccggcttctagcttcgtgcccgaaacacatcactgccccgcacttagacaagcgtgcacacgccggcacgcgcgaccgtggaacatacggagccaaaggggaaaacggggatcggtaacccgatacgaaccgctcgattacatcaccccgctgttgtaaacgctgggtgattcggatatatcagaacacaaaccggccgcagctgccgagcaccactcaggacttcctcactatggaaagatcctctacgctgtcccgcagagcgtcctcgtacgcctcacgatccagcttgttggcgctcacgtcgagcgtggccgtggccgtggagccttcagtcgcaccatcctcgaacgcggggccgtagtcgcgccgtagggtttcgaggaacgcctccgcctccaacccgtcggcaaaggctgcctccatggtggacgtttcgcaaagaccatcccggccgaatcgcacggtttcaaccaccgtgctgcccatgccgtcggcggagagcgccgtgtagcggtacaccaccgtaccggaacggtcctcggttgccgtctgcggggcgccggcctttcccgaagaggcgggcgagccggatccggattcgcccttggcctcgtcgctggaggaatcgcctgcggccgagccggttctgccttcggaaacagcgccgccggcatcggtttcggacggagccgtcgaaaagacggtgtcgccgggcaggctcgggaagccaaagggcgcgcccgcaagaccgaatgccgtcgccagaaacgccacgagcacgagaacgcccgccgtggccgccgccactttcaggcgccgcgacctggacggagcgcacttcgtcggacgggcatgggcggggcccttcgacggacggtcggccgcgttctccgatgctgctgccgggcgcatcttgttcgcggcgttgccagtggcaagcgtctcccgtcgaatgcgctcacacggcgtcgatgtctcccccgccgcgagatcccgcatacgccgttcgagctgctgccgcagggcgcgcagctgcgcgccgcgcgcgtcggggcggcgcggctgctcgggcgccgccgccgaggcaggtgagggaagaggctccacggccgcggtcaggtcggacagggtgagaggagcggacgcgagccgggcttcgtctttcggcaccgtctcgcgctgcgaggcgtgctcgcgttgggcagccgccgccggtgactgcggtgcgggttcggacggcgatattggctcaagcgcgagctggaacgacggttcgggctgctttggcgactcgagcgccgaacgagagaccgcctgctgccgctctgcctcgcggcgacgcgcacggctggccgatgttccggcagcatgccgtcccagccgacgggacggccgctcgcttgactgccccgtcggctccccctgtttggcggcgggtttctctaccggcgacgaagtgcaaggctccttggccgacacgcgtttgcgcgttctctcctcggctggccgctcccgcagctcaaccgctggctcgactggcagttcctctgtcgaggccttcggcgagagctcctctgccggttgccctcgggtcggcgaaccgtcggcggaaggcgcacccgcagattcctcgccagcaggcgactttccaaaagacaccgtatcggccggaggagctccggccgacgattctccattcgggtcgtcagcaggaagatctccggacgattcatcggaggcgggttttgcggcttgcgaatcttcgaacggcatcgcgttagtcagaggcgcttccaccggcaccgtaccggcgagcgatctttcaaccgccggctcggcggcaggctgtttgccggaggcgtggccggcaggtggctcgccggccgcaggttcgtccgccctctcctccggcttttcctccgaaggcgcggcggcaacgggaatgcgcggcaagtcctgcagctgctctaaaaggcctccgtcatcccgcgactcatccgctcctccgcccagcaggtcgcgcagaagatccgacaccggctcgtccggcatcgcgccatcggacacgtcgaggatcggcgcatcggctgcatgcagcagctcttccagcgtcagttttccctgtgacctctcgcccatgccgtccttcgttttgtcgcgccgcgcgccatgcgcgggcccccgccgcggcgcctcgcacgcgggcctctcggatatggcgtgatattatacgtcttttcccgcgcaacgcctaaaccgcatgcctacgggaaacctcgatcgtctcgcgccacgtgcgctcaaaggttgacagcctcaacagaaagggaggccgcagcctccctcgcattcaaatatatgactgaagttctttacagtcccaacgccttcttaagcgcggacacgcggcggcgggacacggggatcttctcgtccacggcgttcagcgtgagcagaagggtgccgccggacaccgactctatctcctccaccatcgacaggttcaccaggtagccgcggtgctcgcggaagaacccgtggccgcccaactgacacctaggtgaaactcgaatctccgtccaccctaccgtatatgcctgagccgctcgggcacggcgcgcacgggcttttccatgctcgtatcgcccaccgggctcgccaacctgcgctcgaagatgttgaactcgttgatgacctcgggtatctcgaacacccggttgcgcttctgattgcccagaggcttggcaatgcccgcatcgatgcaccgctcgatcgccgccgagacagcgctcgtcgcacgccccgtggcctcgacgaccaacttcaccgtgaacaccggcatgcccaccagctcttccaacatgaggtcgagcgcggagttcttgcgaacgcttcccagccgatcgcgccattcgaccagcagcgcgtcggcgcttcgctcgaagcgctcggcctcctcgcacgaggcgaggcacgcgccggcgaaaaaggacacccattcgttgatgccgccgcggatggactcctcccgtgccgagtcgagatagcggaagcccgtcaacccctggacgtagctctgcgcatgcgtagcgagcacgagggacaccgggggcacgagctgcggtgcaagaccccgtcttcggagaacaaggtgaatgagcgctctgccagtccgaccgttcccgtctatgaacggatggatggactcgaactgcgcatggacgatcgcggcttgcacaataggggaaacaacctggtcgttgcagtattctgcgagatcgtccaacagggcgggcacatgctggggtgcgggcgggatgtaatcggccgcgagggggttgtacgagtttccgccaacccagttctgccgatccctcaccaccccgccgaaccgctcgatgcgcgtgcccgcgcaaagcgtccgatgaatcgcgaggatcgtctcggtcgtaaccgtctcgtcagcctgggctgccgcgagcgcgctctgcatcgcgtggatgtttcccactacttcggccgcggactcatcatggcgaaacgcttcttggctgcccaggttcatttccgcccgcaaaagccttcgcgtgccgatcgaaaggccttcgatgaaagacgacgagaccgcctcggcgcgcagcaaaagccgggcgatgccctcggagctgcgaagcgcggccgtgcgctcgttcaacgcaacgatagcgtactcagctcggctgacgtcgcccacaacgtcgggttcgagagctatgtgcatatccctgagccgcgtaggcaggtagtagcgatacgcgccgctctgccgttcgcgccgcgtccttcccaagccttcgctcatccagaactcttggtgcaacgttcccatgctgcctccttattgcaggttactataacccgaaacaaggagtgaagaactgcgggcaacctgaaacatggcttcttcttatttcaggttactgattaacctgaaataatgatgaccaatcaagggcgatcttggagcaaaaggagcagctcgaacgctgaagcgcgcctttcgctcgaagacagaactggcatatttggcggccggccagaaaaaagggaggcctcagcctcccttgctcgttcatcgtatgcggcgccagttacagtcccagagccttcttcagcgcggacacgcggcggcgggacacgggaattttctcgtccacggcgttcagcgtgagcagcagggtgccgccggacaccgactctatctcctccaccatcgacaggttcaccaggtagccgcggtgcacgcggaagaacccgtggccgtccaggcgcttctccagctgggccaggctcaccgtggagaagtagcggtccgtgtcggtctgcaggtaggcatagtcgtcgcgcgccatgacgaagcggatcttgtcgataccgatgagtatcttcttcccgcccttctcgacggggatgcgctcggacttctgggcggccacgtgcagcgacacgtgctcgcgcacgcgggagatggcctgcgacaggcgctccgtctccaccggcttcaccaggtagtcgatggcgctgaccttgaacgcctcgagcgcgaactcgctgtacgccgtcacgaacaccacggcgggcgggaacttcaggtgctgcagggcctcggccagctgcaggcccgtggcctcgggcatgttcacgtccaggaacatgacgtcgaccgggtattccttgagcttctcgatagcctcgcgcacgctggcggcctcggcgaccacctcggtctgccccaactcgtccagcaggaacttcagttcagagcgcgcaggagcctcatcatcgacgatcatggccttcaacacgtgaacctcctcgcttccgaaccccgacatacttttcgcctctttcggcatcattataaatcaaggcaggcggaaactgcggagaagcccgaatatacgaattaactcgacggtttcaagcggcgaacgtcatgcagaacgggaggcggctcgacgcgaggcggcgcggggccgcagcgaaaacacggcggcagcgcgcgcgtcggctcccgcgggccccaaggcgccccctcctgccttcgcctagcctctcgggtcgtccgtcaggtagcgggcgcgcaaggtgtcgcgcttctcgtcggtgatgcccacggctttctccacgtaggcgtccaacccgccgaactcccggtcgatggagtcgagcgccgcctgcaggaaacgcgggtcggccgaattgatgacctgaatgctcttgtccagctttccggccagatggtaggttgccagcgcgtccataatgtcctcggtgcgcgacgccacgtagcggttcgtggcctcgtagtcccgcatgatgtcgtcgtgcgaggcgcccagcacgtgcagcagcagcatggcggccagccctgcgcggtctttgccgatggtgcagtgccacagcacggcgccctcctgggtgtccagcacgtcgtcgaagaaggaggcgaagccgcgctggctggcctcgtccagcaccatgcgctcgtagatatccctcatgatctgggctgggtcatcctgcacggcgcgcagcatctttagcgcgcccttgatgccgccctcgcgcgtcacgccgagggtggccgtgttcagcaccggagcgtcctcgaagcgcacgccttccacgccgtcctcggggtcgggcttctcgcggcgctcctcctcggtgcgcaggtcgatgaccgtgcgcacgccgaagtcgtcgagcaacacctccaggtcgcgttctgtcgcaccggcgagcgcgcccgaacgcagcaggcgcgcgtgtttgacgtagcgaccgtcggccgcggggatgccgccgatatcgcgcgtgttcggcagcccctccagctcgatatggccgtcggataccttctcgagcccttcggcatcggctatgccgagcgcgggggagaaatcgtcgggcacggtgtcgaccatggcagtgctccttccaaagacggaagcgccccgcgcgcttatccggcggcggggcgctcgcgcaggcttctacttcaggtcgagctgcatgagcttgtccaacgtgagcgcgtagatcttgaaggactgcttgagcagttcctcgctcacgccctcgtcgggaccgtgcatcgtgccgacccagtccggattcttctcccacggcttctcggggccgaagctcgccccgctcttgaactcgcgcgcgtaggtgccgccgcccatggtgaacggcttggcgtcctctcccgtggcctcgttgtaggcgttcagcagcgcctgaatcacggggctgtccggcttcaccaggaacggctccatgagcagggtgttctcgaacgaaccgccgatctcctcggccagctggcgcaggcgctcggtaatctcgtccgccgtgatggacgtggggaagcggctgtccaccgtctgcacgaagcggtcgtccttgagggcgatggtgccgccgataacggtgagggggccgaagtactcatcggagctcttgatgcccacgccgcttccatccgtgtggttgagcagcttctggtccaactccaggaacgcgcgctcgtcggcgccgcacagaccgttctccagcaggtagtccacgatgaggccgatggcgttgacgccatcgtcgggcattgaggcgtgcgcgcccttgccggtggcctcgagccgcgcccggccggggccggcctcggtcacgacgatgcggtcggtgttcttcagctcgtgggcatcggcgttcacaatggcgtgggccaggcccggcaccgcgttcgtggccgcgccgccctcgaactccacgacgacgcgcgcgcacggctcgatgggcttgctcatgagcatgccgtcgtagccgcccttctcgccgtagcacacggggaactccgcatcgggcgtgaacaggaaggccgggtcgtcgtagtgcaggtggtagtaggccacgtcggccatgccggattcctcgttcgcgccgaacaggaagcgcacggtataggggaactgcggcgcctcgccctcgtcctgcaggtccttccagaacttcatagcgtgcagggccatgacgctggggcccttgtcgtccagcgtgccgcggcccacaaggtagccgtccttgcgcgtgacctcgtagggctcgaaggtccagccggggccggccggcaccacgtccatgtggccgatgatgcccagctgcgtgtcggaggcgccggggaagtcggcgaagccgatatagccctcggcatcatgggtcttgaaacccatgccgcccgccagctcgagcgccgcttcgagcgccttcttggggccggggccgaacggggcgccgtcggccttcttgtcgtcttcctggaagctgggaatgcgcacgagcgtggcgatgtcgtccaccatggcgtcccagttcttctcgaggtatgcgtcgatcttattcgtcagttcggtttgattcattgcgtgtccgcctctcgttccgaagatgcgtttgcaggccgcagcggcgctagcgccgtccggcgacgttgccaccattatgcgccaagcggcaacggcgcgccagaccgtcatgtatatgttgaccgtttgccgagcgggcgccacaaggtagcggcgagtgcgcagcgcgaagagccttcttgcgattcgcgcgcacaattcgcaccagtttgccctcgacggcctacggggcatccggtatactttcacggtgcgcccgagtggcggaatggcagacgcggcggtctcaaaaaccgttgtcctagacgtgcgggttcaaatcccgcctcgggcaccacttcgcatatccgagaacgatcccgtcaagggatcgtttttgcattggggagcgaaaacgcggagagacgggcggggtattcgtctcgtcacctgcatcttgagcggaagcatgcaacccaggatgacaacgagcagcggcgcgccttgcgccatgacgccctcacgccaccgcgtcgggctgggcgcagaggccggcgaacagcgggatgccctgacgcgtgcggatctcgtacaggaacggccgatccaaattgaactccagctcctcgatcaccgacgggtcgggcaatgccgacatctccatgatgtccaccttcgtgtaggcgctcgcctccacgccgttctcgtcaaggccgatgcggctttcctgcgacacgctcgacacgtaggcgggagtgtcggaaagattggagaagtcggcctggtcgccgaacgctgcgacgacgcccagccgctcaagagcggggatcaagccataggagctgtcgaaggcgaacttcggcacacggtaggtgacgaatgcctcgccggtggactcgcccgcgaacgcctcttcgagcagggccccgtcggccagcaggtcctgcacgcccctgccctcggcgggcagcacgaacgtcatctcgctgccgtccacgaacccgaggctcgcgcgcgtgtaggcttcggtctggcggatctcctgcggacggtcgagccgctgcaccatgaaggccgcctgcacgtcgccgcgctcggccgcgaacgcgccgggcacagtggcctccgcgtcgaaggccttagcccactcgcccttgaagtacacggtatcgatcaacgagagcagctggccctcctggcttttgaacgcggggttcagcgtgccctcggtgttgtcggcaatccactgcgccatggccttgtcggctgcaccggtgccgaaatcggccaggaacaacgaggcgtagaactggtcgcgcatggcgtcgacgaacggctgcttgaactgcgcgtcgggacgcatccacacggagttcgccagcctgacgtcagaaaggtggtcggtggccagcaggcgcatcaggttgccgcactgctccgccgtggccgcagcgtcggaggagctcagcgccgccgcgatctcgtcgcgtgtctcgccggcggcgcccatctgcgtcatagcgagcgccaggtacaggctggccggcgagaagttaccgttggcctgcggctcatcgccgagcaccgcggatgcgctgcggtaggagaacgccgagaggccgtctacgaacgacccgtccagcgcattcgcgcccaagagctcgtcttgcgcttcgtagtcgtcggccgccggcttcgcggggagctctgcgagcgcaacggtggtcacgccctcgtaggagaccgatcccgaaggctgcggtacatcgcctgcctgggcgcaggcggccagcgcgaaggcggccgccagcgcgagcaccgccgcaagcacggccttccgcaggggcctcgccttcgcctgcgcgtgcgatcttgcctcatgcaggcttgcctccgactgcgcgcgcaccgcacgcacgctcggctttatctgcgtgtctcttttcctccgcatgctccccgccttccccaaagcgcagcgcgccggtcgcgttcgttccttcgcagggtaacacgatccaacgcgcccgattgtcgggaaaagctagaacaggaaggcgaggaacgtcgcgatgccgccggtcaccaccatgatcacccacacgatgagccaaaacaggcaaccgaaccaagcgaacagcttgccgccttcgctccagccccagccgtccttgcccatgaaccacgcggccagcacgccgaacaacccgccgaacaatcccacgcagaagtacccgaacttggccaaacccgatatctcgcgcatggcggctcctttcgcttgatgaaagagccagcatacgccaagccgtccaccgtgccacgcgcatcccccaaccgtgtcgaacccgatctcaacccgactaccgcttgaaggatacgtctctatcaattctcactacaatttctcacttgtcactgcatgtcgtcactgatattttcagtgacgacatgcgaaatgggctcgtcgaattcgacgagcccattttcgatggcttgatgaaaggctgccctcttcggatgatttacgcgcgcacctcgccgccgatcttccgggcggggacctgctggccggtggcggccatgcgctcctcgtgggtcatctgcgccagctcgtgcacgcggttctcgtccacgcccagcgcctcggccaggcggtcgccgtattcggggtcggccttgtagcagtgggcggcgtggcgcaggcggatgttctcggtcacgccctccatgttgcgcgcggtgttgccgatgagcgcagcgcgctgcggctcctccatcaggcgatacaggtcgcccggctgatagaacgtgtcatcggtcgggtcgtccgccgggtcccacgcgtccatcggaccgaacaggtccagcggcggctcggccgcgtcggcctgctgctgccactgcccgtagctgttgggctcgtagccgatggttccgccgaagttgccgtcggtgcgcatggccccgtcgcgatggaactcggcgtaggggcagcgcggacggttcaccgggatgtggttgtggttgacgcccaggcggtagcgctgcgcgtcgccgtatgcgaacaggcggccctgcagcagcttgtcgggcgacaggccgatgcccggcacgaggtgcgtcggagcgaacgcggcctgctccacctcggcgaagtagttctcgggattgcggttcagctccagcgtgcccacctcgatgagggggaactccttctggctccacgtcttcgtgatgtcgaacgggttctccttgtggttcttcgcggtggcctcgtccatcacctggatgcagaagcgccagctggggaactcgccgcgctcgatggcaccgaacaagtcgcgctgatggctctcgcggtcgcccgcgatgatctgggcggcctcgtcgtcggtgaggttcttgatgccctggttggtcttgaggtggaacttcacccacacgcgttcgttctgctcgttgatcaggctgtaggtgtggctgccgaagccgtgcatgtggcggtagctggccgggatgccgcggtcggacatgacgatggtcacctggtgcagcgcctcgggcaggctcgaccagaagtcccagttgctctgggccgagtgcatgttggttttcgggtcgcgcttcaccacgtggttgaggtcgatgaacttcttcggatcgcgcaggaagaacaccggcgtgttgttgcccacgaggtcccagttgccctcgggcgtgtagaacttcatggcgaagccgcggatgtcgcgctcggcgtcggccgcgccgcgctcgccggcaaccgtggagaagcggacgaacacctcggtctcggcgcccggctggaacaccttggccttcgtgtactggctgatatcgcccgtcaccttgaaggtgccgtacgcgcccgagcccttcgcgtgcatgcggcgctcggggatgacctcgcggtcgaagtgcgcgagcttctcgatcatccagttgtcctggagcatcatggggccgcgctcgcccgccgtgagcgtgtggttgttgtcggcgacgggattgcctacctcgttcgtgaggcgcgtggtgtcggattcgctggccatggtatgaccccttcctggcggatgccccgatgggcatcgttcacatctatcggttgccgcgatcatagcacccgaggagctcacttcaccatattattgataataattctcaattagatcacagtttcatcaagcgaattgatttttgaatttcgaaataaatcgcaaatgttagaggtggagagacaaggagaggagcgaaaaggcggggaatgagccgtggaaggaaggggcgagccgggacgagacgagctagggggaggctagtcgggatggggtgtttcatgtgaaacagcgtgatgagcagggatatcagagtacgtttccctgagatcgtccatgattcgctgcaggtgggtctcgaaggtggggccaagggcgctccccttctctcggaccgcggtaggcgtataaaaaggaaacggacgccgaagcgcccgtttccctgttcgcgatgggagcccgaaaccctacagagcgaaatccttctcgccgttgaacacggcaagggcgtcggcgacggagtagtcggccaaggtgatggcgctgatggccttcgtcaggcggacagcctcgtccagcgagcgctggtggatgttgcgaccggtggcgttgcccacggcgccgcccgtgtgaatctggtcgtagagctgggtgaggaacgtctcggcgtctaccgtcgatccgccggcgcacacgaggcccgtgcggccggacgccatcgtggccaccttgagggcctcggccggagccgtgccgtcctcgggcttcggcgggttcaccttcacgaagtcggcgccgaggcacagggccacgcccgccgcaccggcgatgagcgccgggtccttctcggccgtgacggccttgccgcgcgggtagatccacagcacgaccagcaggccgttggcatgggcctgggcgatgagctcgccggcttcggccatcatggtggactcgtactcgctgcccaggtagatggtgtagccgatgcccaccacgttcacgccggcctcgcgcatggcaagcacagcgtccaggtcgtagagctgcggcgagtaggggtcgtcctgcttcgtgcccacgaggttcgtcttcgagttcatcttaacgaggtagttgatctcgggatagtcggccgcgtactgcgcgatgagaccgcgctggccggcgagcacgccgcacacgccctggcggccgatctcaaagaggtgctgcggctcggcgtcggcaatgtcgatgccctcgccgtagaagtccttgttgaggtgctcgatcttctgatcgcaggcgaacagcatgaggcggcccgttccgcgggtggccttcaggtagttcgcgatgtactcgtcgcgggactccggcatgacgtcggccggcaccctcacctggtcacgagtaatttggggcatgatttcctccttataggatctcagtcgcaaggcaacgctgccttaatcgatgaagttattctagccaatggacggaaccgcccgcgttgctccaccgaaaaaccggggaactatcaggcgagcgggcgtttggcagttggacgatggcagacgcccggcaaagcgcttcgtgcaggggcgctccgaggcctttcggctgtcgggaggccgtcggaaccttagaaccactcgcgcttgtttaccacgtacatctgctcgaactcggactgggacttcgtcaggtagagtatgccctcgatgatgccgatgacccacatgacgccgcccgccaggccgaacgtgaacaagctgcccagaatggtgacggcaagcatgatgaagccggccgtattgtagcccaggtagaacttgtggatgcccaacgcgcccaggaagatggcgagcaggccggcggccacatgatccttcgtcgcgatgacaggctgctggtacggctgctggtaatagggttgctggtagccgtaatacggctgctgcggaggcacggctccaggacccgcatggggcgtctggccgtagggtgcggcataaccgccgtagggttgctggggctgcggcggttgctggggattctggtaggagccttggccaggtgcaggaggcacgggaccggacaccgtcgagccggtgggcggaacgtacggcgcatcataggatgcacccgacgggggcgtcggctgcgaaccgagcgacgggtccgctgcgggagccgtcgtgtagggaacccattcgggcgtcggctcgccttgcaccggaatggcggccgtgtcggccggggaggccggcgccggctcgggcgcatcgttcgaggaaggctcgccgcttgcaggctcatcgaagccggaataatccggagcgtcgccagccgcaggcgtatccgcctcgtccaccgcgcacgcaggcgcatcgccagcatcatccgaagcagcctcggcaggcgtatctccgtccgccacggaatcgccctgcacgtcatcgtcagccgcggccaccgcctctgcctcgaagatgacggcctcgatctcggcggtatcctcgtccacgacgacagcggccacgccgaaggcctcggcgggctccccgtcgccggcggcatcggacggagcggcacccggcttgacggcggggtgctcgcccttgagctcggcaaggcgcgcgcgtgccgcctcgagcgtttcctgtgcagcgcgaagctcggcttcagcagcggcgacctcgtccgatgcgctgccgttctgttcgttgaggttcataacatgcctctcttatcgtgaggttccaaggtgatagcgccatggtatccggccgtacggctctgacggtaaaccgtcaccgtgtcgttgccctctgtataccatcgttaaggtttccgttgccgaaagttccgaaagcgcgcacccgtcgcgccgtacgacgtggctggtgcgcgctgcgcctacttgtcgcggtgcgaccgcttctccaggaatttcatgatgcgcttctggaacacgatgcccagcaccgcgataaccgcggccacggcgaacaggacggcgctctctgcgaagcgcccgtcgatgagcccgtcggcagcgtacgtcgacacgaggatgccgggtatgcgcccgatgttcgacagcagcaggaacgtgcgcatgttcatgtccgtgaggggcaccaggtaggtgaacgtgtccttcggcaagccggggataaggaacaggatgaacaccacgatgctcagcttccccgtcttctcgaaggcgcggaacttttccaggtacttcgtgggcaccatgctctgcacgaacggcgcgcccagcttgtgcacgagcgcgaagatgaacgcgctggaaacgacgcagcccatcaggatgatgagcgcgcccaaccacggcccgtacagcatgccggccgctatctgcacgacctcgcccgggatgaacgccaccacgatctgcaggaactgaagccccagcaggatgaggaagcccaccggccctgcgccgcgcacgtccgcgatgacgcggtcgatgccgcccggctcgaagatgtcggccacatacggccagatgagcaggcagataatcaccataatggcgaagaatgcgatcaggccgacgaacttgaagatgtcgcccttctccatcttgtggccgtgcacggtcgtctcctgctgcgccttctcgtgcagctcgtgcgtgcgttcggccgccttctgcttcagtttgccggtatcgaattcatgcgttggtttctgcgtcaatggtatgcctaatcgtcgtggcgcgctttgtcgtactcttctttgaatgcggagaacatgttcttcttgggcgccggtttcttggcggactgcttcttggtcgcagcttgcttggcgggggctttctcggcctgcgatgacggttcaggcagttcatccgcttcgagctcgcctgtcttctccagagccttttcctgcgagggcttcgggccgcgcgccttgtcgtattcctccttgaagccggagaacatgcccttcgtggcggcgatctgcttgcctgtggcgtacgcgcccttgttcaccacctcgccggtcttcttggcggcggcgctggcgacgggctttgccttgtcgacggcggtatgggccttgtccactaccacggccgtggcctcgccagccttctcggccaggccgccttccacggcgatgtcgcgcgcctcgtcggccacgaggatggcgccgagcaccacctcttcggactcctcgccctcctcgcccgtttgggcgagagctgcgcccatgccgcgcttgaagcccttcacgagattggccggaatctcgcgcttgcccagcagcgcattggccgtcgcaccgctgtcggtggtgacggaggcgatagcccctgtcctgcgatcgaacgccacggaacccaccacgccgagcgtatccccgtcctcggtcatgacgggcagccccacccacagcacgcacgcgtcccagtcaacgccgagctccttgcaggcggcgcggttggtggcagccggatcgttgctcaccacgatgcggccgtcctctatctcgtagccgttaacggccacgaacaggtctttgcgacgaaacatccacagcaggtcggggcgcttcaccacgaagcccacgacgcgcttctccttggggtggaacacgaaacgacgcaccttgccgatgcgcttcgtgcccttcttcccgccgacgacgcgcacgcccgtgagctcgtcggtcgtgataagtttgttggccatgttcgatcttcccccaggcgcgcagctgtgtagcggcgcggctctctcaggccgcgtcggccgctgtcttcctgcgtgccgatgacgcgaagggggcatgcggaagccggacggtcatcgccgtccggcttggcgcggtgcacccttcattcgtgcaggctacttagttctctttgctctcggcagggcccttgtcgaccgggacctccgtgtcgccggcgatcttgccggcggccgactcggcggcgttcgtcgcggtatcggcggcttccttggccttgccggccacgttgtccaccgcctcgtgcgcgttgtcggcggctacggggatcttgtcgctcacggcgtcatgcgcctgctcggcgttcttggccacctgggccgcgatgcgctggcgggcagcctcgatcttctcgcgcaggtcgtcgttcttctcggagaacaccggcttgatgttgtcggcagcttcctgcacgcgcgcactggcggcgccgtacagctcctggcccttggtctgggcgtcctgaacggcctgctggcccttggcggccacgtcgtgcacgacctcctggcccttggacgtggcgtcctggtacacctgctgcgccttgtcagacgcctgcgcgcccaactcctgggcctcgccccacgccgcgttcatcttgtcggtgaccatggcgcgcgtctcatagcccgagcggggagcgtacagcagtgcgacggcagcgccgaccaaaccgccgatgaggaaggttcctaccttgttgcccatatctgcctcctaaaggaatgtcctggacgtttgtcgatcagcccattataggggcacccgccaaccaccagtagggaaaacacgagcgctctatgattcagttgccgtttcgttgccagaagcgaaagcgccgcgatactacttcgcgtactgggataccagctcgttcagcacgctggagagggacaggccggcggcggcgcaggcggcggggaacagggagcgctcggccatgccgggcgacacgttcacctcgaagacgcgggcctgggcgccatcccagatgaggtcgacgcgggcgaggtcgcgggcgttgtaggcccggtagacctccagcgcggcgcgctcgatctcggcgcggatggcctgggcgtcgccctcgtcgtcggacagcgaggcggggcgcacgggcgcgatgtactgcacggcgccgggctccatgcgcgcctcggtgccgaagaagccctgcttgggcacgatctcgaccggcggcagcgcgtaggcgtcccagccggtgccgagcaccgacacggccatctccacgccttccacccactgctcgatgaccacggcctcgtcgaacgagagcgcatcgaggatggcctcgcccagctcgtcgacggaatccacgcggtgcactcccatggcgcttccgccgtgcgcgggcttcaccgccacggggtagccgccaatcacgcgttcctgcaccaggtcgagcgccgtggcggcgcccatgtccttgaaggcgtcgcgcgccaggtagatgccctgcggccacgaggcgatgggggcatcgccggtaatggcgcggtacgtagccagctcgtagtgcatggagtccttgttccacgtgcggtggcacacgtgcgacggcgagccgacgaacgggatgtccaggaactccagcaggctctggatggtgccgtcctcgccgtgcttgccgtgcagggcgctgtagcacacgtcgggacgctcggtgcgcagcgtgggaacgaggtcggccgtggtgtccagcggcaccaccttgtggccggcctcctcgagcgccgcgcacacgttcttgccactggccagggaaaactcgcgctcgaacgaagcgccgcccatcaacactgcaactttcatgcccatttcggtagctccttattcggccttgatggcaccggcgtcgatgaacgcgcggtacagctccagccggtcgttgatcacggcggcgaggcgcttgacggcctcggcaaggttctccgggctctcgtagcagaacgcgatgcgcatgcagttcttgccggcggagccgccgggatagaacccgtcgcccggggtgtacgtcacgccgttttccagcgccacggacagcatggagccggtatccacgtagctcggcagcgtcacccacacgaaaaacccgccctcggggcgcgtccaggtggcctcggccgggaagtgctcgtccagcgcggccagcatggcgtcgcggcgcgtgcgataggtcttcacgaacttctgcagcgtcttctgccacggggtgtcggtgaagtagtgctccaccaccacctggttgaaggcgctgccgcagaggtcggtgccctgcttcaccaggtttatcttcgccagcacgctcttaggcgccacgatccagccggtgcgcaggccgggcgcgaacaccttcgacacggtgcccaggtacacgacgtcgtccgagagcgccttgagcggcagcacgtggccgccgccgtagcgcaggcggccgtaggggtcgtcctccaccaccatgaagccgtactcctccgaaagctccagcaggcgcttgcggcgggcgggcaccatggtcacgccgccggggttctggaagttcgggatggtgtagaggaacttgaggcgcgggttgcccttgccgatgcgcgcgagctcctcttccaggaggtccacgcgcatgccctcgtcgtcgaacgggatgcagcggatgtcgggctcgtaggcgctgaacgcctggagcgcgcccaggtaggtggggccttccgccagcacgatgtcgccggggttcaaaaacgtcttggcaatgaggtcgagcgcttcctgagcgcccgtggtgatcatgacgttctcgggcttggcgcgcacgccgatgtcgcgcatgaggtcgcagaacacctgcttcgtctccacgcggccgtcggtcgagccgtactgcagcgccacggcgcgctcgtcgtcgcaggcggcgcgggtggccgtgcggatggcggagtggggcagcagcgacacgtcgggcatgccgcccgacagcgagatgatgttagggttcgacgcggcggcgaacaggtcgcgcacggcggaagagcgcatcttcacgacgcgttcggcaatcttgtcgcccgtctggtcgaatgtgaggtgtgccgtagtcattgcgttagagtaccaccgcaacgttcagaaagcgcacagcatcgcgaaaagcccgcaaagcgaccaaatcgtcggtgaaactcacctcgatgtgcgccctcccggcgttttcgtccgtccacctggtgacgcccacgtaagcggtgtcggggggagcatcgggtggcgccgcctgcgtctgcaggtcgatgacgaggtgttccagcaggtgcggcagcgacgtggcgcccatgacggcgccgaacgtgtcgcccgcgccgttcacgcaggcatggcgcggcaggttggggaacgcggcgcctacgcgggcagcgagcgcgggatcggtggtgcgcggcgcatgcggggcgagggccacgtcgcagccgatgcggccctcgcccaccacgaggcgctcgatggcgagggcgtccaatcaggcccccgcgtcgttcacgtcgtccaagtcgaaccgattgtccggcgcgggggagttcgagcccgagccgccggacggggaggcgttcgtccccgaagcgccggcgccggcggcgctgtcggaaccgctcgcgttgccggaggcggccgcgttgccgccatccgcgttggcgccgctgccggcgtccccgctggaacccgcatcgccggcgggcgcattggcacccgtgcctcccgcatccgcggaggagccgccgttcgaaccggccccggaggcgccgtccgttgcgttaccggcccctgcggcaagcccctcgtcgttgcgcggctgcgccgcggcgtcgtgcgagacgcgcgcgagcacggtgacgccttctcctgcctccggctgcaccggggcctgcccctgcacgaggcgcacgagcccgtcccacatccagccgatatcctcgaacagcgtggacagggcggagtacgaggacccttccatcaccacgagctgcgaccggtcggccgagaagcggtagcgacccgatccttccatgcccccgaacgtgaactcgatggtcttggccgtggggtcgatggtgtaggcgtaggccacgtcgtcggtgagcttgatggacgcgccgtccaccacgaccacccgcgtcgtgccgtcgacctgccactccccttgcagctcgcgcgcatcgtcgtagcgcagccaacggtcccacgagaacccggccgcggcaaccagcagcaccgcaagcacgccgagcgccacgtaccagggccagcggcgccggcctcctgcgtgcttgcgcggcgcgccctcgcgggacggggccgcctccgcgtcctcgccagttccagccgcggcgctcgcctgctcctcgagacgcccgctctggcttggcgaggccttccgcttcgccgccttcttcgaccgcgcgccagtcgatgccgaggctgccgccggcgccggcgccggcggaacggcaaccttgcgcgcagaggcaacggacggcttgggcttcgcgccgcccgccttggccgcgccctcggcggaacccttggcaggacccttcgccgggacctcggacgcggccttcgccgagcttctggccgcatccgccgaggctgccttcgccggggcctcggcaggctccttctccgcgcccttcgccgggcttttgggcgcggccttaaccgggcttgcggcagcagccttcgccggggcctcggacgcggccttcgccgcgcccggtgcgctggagatcttcttggcgttctttaccgacttgcgtttcgttaccacgcgcttcgcccctgaccgagcccgccgcgcctattccggcgcgatgacctcgacgccgcccatgtagggaaccagcacgtcgggcacgcgcacggtgccgtcgggctgctggtagttctcgatgacggcggccatcgtgcgacccaccgccaggccggagccgttgagggtgtgcacgtagcgcgagcccttgaaggcggcggggtcgcggtacttgatgttcgcgcggcgcgcctggaagtccgtgcagttggagcaggacgatatctccttgtagccgttgtagctgggcagccacacctcgaggtcgtacgtcttggcggccgagaacccgatgtcgcccgtgcacaggctgatcacgcggtacggcaggcccagcagctgcaggatattctcggcgtcggccaccatggcctccaggtcgtcgaagctctcctcgggcttggcgtacttcaccatctccaccttgtcgaactggtgcacgcggatgagcccgcgcgtgtcgcggccggcgctgcccgcctcctcgcggaagcacggcgtgaacgcgcagtatttgagcggcagctggccggcgtcgagcacctcgccggcgtggatgttggtgagctgcacctcggccgtgggaatgaggtacaggccctcggtggtatggaacaggtcttcctcgaacttcggcagctggcccgtgccggtgagcgtctcggcgttggccatggccgggcaccaccactccttgtagccgcgcgacgcatgcgtgtcggccatgaagttgatgagcgcgcgctcgaggcgggcgccgaggccgcccagcaggatgaagcggctgcgcgcgagcttcaccgcgcgctcgaagtcgatgatgccgagctccgggcccaggtcccagtgcggtttcatctcgaagccctcggcggcgaaatcgcgcggcgtgccccagcggcgcacctcgggattgtcgtcctcgctcgcgcccacgggcgtggagtcggccggcatgttcggcgtggccaacagcaggtcgcgcagggcctcgtcggcggcttcgcgctccttgccgatcacggccagctcgtcgttgatggcgcgcacgcgctccttcgcagcctcggcctcgtctttctggccggcgcccatcatggcgccgatggacttcgaggcggcgttgcgctcggcctgcagcgcctcctccttcgcgatggcggcacggcgggtctcgtccagttcggagaagcgagcggcatcccacgaagcatggcggttttccatcgcctcggcgacggctgcctggttatcgcggacgtacttgatgtctagcatgacgcgctccttctcggtaggaaccggttatcgtttcagtataacttcagtatatcgcacccacgagcgcctcccgcaatccttcactcgctcggcatgttcccgcgcagccccgttggcagcggctcttccggctgcacgcccgctagctgctgcgcttttggaggtggatggctatctccctcagcacgcggcgcatgtcgatgggcttggacaggtgggcgtccatgccgcactccagcgaggcgcgcacgtcctcggcgaaggcgttcgccgacatggcgatgatgggcacatcggcggcatcggcgcgcgggagctctcgaatgcaacgggtggcctcgtagccgtccatcaccggcatctgcacgtccatgagcaccacgtcgtagtagcccggctcggactcggcgaacaggcggcacgcctcctcgccgttctcggcccactccaccaccaggccggactcgcccagaagctcgcaggctatctcggcgttcaagtcgttgtcctcggccagcagcacgcgtgcgcccgccaggctcgccgccgtgggcagcggagccgtcgcggggccgtcgggccgcagcagaggcgccttcgtggccgacggaagcggcatcgacgtgagcgccggcacgcgcgatgccgttccgtacaggccatcgaaagccacctcggtgaagttcgattgcggctgcttctgcggccggcccgaaacatcgagcgagctctcccatgcgtcgcccgcccgctcggccgccgccagcgcgcggcgctcgggctcgaacgccagccgcaggttcaccgtgatggtgaacgtcgtgccctggtcgaccgcggtgcgcacgtgtatgtcgccgcccatcatggtgacgatgttcttcacgatgggcatgccgaggcccgtgccctgcacgttcgcccgcccttccataacgaacggctcgaacaggtgctcgcggaactcgtcggtcatgccgatgccgtcgtcggccaccacgaacgtcacgcagcggtaggccacgatcgagtcggcgccgatggaggcctccagccgcacatggccgcccggccgcgtgtacttcacggagttcgtcagcaggttgatgaggagctggcgcaggcgcacggcatcgcccacgaacacctcgtcctcctccggcatgaccacctcgaaggcctgggccttctgctcgcattgcgggccgatgacggcggccgcgcgctccaaaagcaccgacaggcggaacggctcgctcgtgagcaccatcttcccgctctcgatcttcgagatgtccagcacgtcgttgatgaggttgagcagatggtcggacgccgcgccgatcttccgcaggctctcctcggtcctctcggcattgtcggtatgcagcttcgctatctgcagcatgccgatgatggcgttcataggcgtgcgtatctcgtggctcatacgcgagagaaactcggatttcgcctggttggcggcctcggcggccgtcatggcgtccttcatggacagctgcagctccttctcggtggtcacgtcgcgaagcaccaccaggatgcgctgcttgtcctcgtagctcaaggagctggcagaatacgctatccacctcaccttgcctgtctgcaggtgcacgaacgagaactggccctgctgcggggcctgcaccgcgccttcgcgcaggcggtccagcagcgtgcggccctgctccgacagctgcagctcgtcggcaacacgggggtctgcgatgatctcgggcatggtgaagcccaggatgcgcacggccttcgccacgatgggcgtgacggtgccgtccacggggcagtacaggttcaccgccatgtccaggctgtcggacagggccttgtacaggtgcgacttcatggccacgttgcgctcgagtatgcgcttgcgatacgaggagaacatgagcgcgatgacggcgacgaagcacagcaccaccacggcgaacaccacctggaacgcggtgagcacgacggatgcctcggcgcgcacgttctccacgggtatgacgttgcacacgtaccagctgccctcgcccaccggcgccacgcacacgtagctgtccttgccgtcgacgtacccgacggcaagccccgtctcgcccgccgccaccgtctcgtccagcgagggcaggttctccgcatcttcgccgaacgacagggccatcacctcggccatgccgccctggtcgggaggtcgctcgtagtccgctgcctggtcgaggaacgagtagaccgtcatgccgctgttcaccggcgttttcgtgtcctcgatgggaggcacgagtatctcacctgtggttccctggaacagcatgaagtagtcgcggccgtcgaacatgtccagctgctcgtccatggagaacagggacaggggaatctgcacgtacagcgcgcctatctgctgcccatcgaggtagaggggacgttgcgccaggcgcacacgacggccgtcgtccagctcgaacgtggaggaatacgagtccttgccttgggagagggccgtttcaggctgggccatctcctccacggagaacggcgtgccgtccgagaggaccccgcggccgtccttgtccgagaacgcgacctccgcgaagccgaaccggtcgcgcaggccctgcagcgccggcacgacggcagccgggtcggccgattgcacctcgaacgcgccgatggcgttctgcacgatgaagatgcggtccgtaacgttggaggcagcttgctgcgtgaacgtgaccacctgctgctcggctccctgcttgagcttctggtcgatgtagcccataagcccgagcgaggtgcccaagacgaccaccgcagccaaggcggcgacgatatagagagcgagccgcctgccgcgtcccgcctggtttccagcgcgcatgcgcccacctttgcagtcttcagttggtgcgttcacgtatataaaggattctcgtcgtggaggtatcccgaatttgcacgggcatagtatactctacccgcaaaactaaatcggaggagtgccgcctgcgggcggactttgcatagataggacgaagagactgccatggacttcggtcaactgtaccatttcctgttcgagacgttcgaaggcatcggatgcctgatcgccatcgggctggtcatcagcataatcgcctgcattatcatggagaggcgcacgcgcaagcgcttcgtgagccgcgaggccgacgaggacgactggtcgttcttcgacgacgatgacgacgaggagaagggcaagtagcggaagctcccgccgcatcggcttgagcagaggaccccacgggcgcccacggcgcccgttttcaacttggcaacgattcggaccgctcatccaccgcaccgtaccattgccagataacgagccaggcttcaaccccttcgagaaagagcgaaccatgagcgaaaccaccctgtacacccgcaatggcgactacatcccgcgcgttgccgccgtgcacgacctgtgcggctacggcaagtgctcgctgggcgtggccatcccggtgctctcggccgccggctgcgacgtgtgccccgttcccaccggcctgttctcgtcgcacacggcgttccccggctggtacatgcacgacaccaccgccatgctgaaggactacctgacggcgtggaagaacataggcgtggagatcgacgcggtgtactccggcttcctgggcgcgcccgagcaggtggaccgcatccgcgacctgtacgcgatgtaccccgcggcgctgcgcgtggtggatccggtgatggccgaccacggcaaggtgtaccccacctacacgccggaactgtgcgacgcgatggccgagctggcctgcggggccgacatcctcacgccgaacctgacggaggccgccatcatcctgagcgagcccatcggcgacgagtgggccggcaccgacatctccgacgaggaggcgcaccgtctggtggacgccctggtggcgaagggcgcaaagcacgtggtgctcaagggcatccagcgcgagggcgagacatgcatccgcaacttcgtgggcggcttaggtatggagacggtggaggtgcacaacgagtatttgccctacatgctgcacggcacgggcgacctgtacgcgtcatgcctgatggcggccgtcatggcgggtcgcacgctggaggaggccgtgcgcttcgccggcgacttcgtgcacgacgccatgatcgtgagcgccaagcagcccgagttccgcgaccgcggcgtgagcttcgagcccctgctcggcaaggtgtgcggactgctgtagagggacgcaatcgcaccacgcagctgacatgcgacgccctcgggattgggttcccgagggcgtttttgcgtgatgctccagcgagcggtcggggcgctacacttccaggtcgacgttcttcttcatcaccttgtgcagcacgaaatagtacgcgatgccggcgacgacccagatgatgcccatggtcttggacgctgggtcgaggctgatccacgtgtagcccacgatgatgaagcccagaagcggcaggatgaggtgtgtgaacaccttgccgtcgcgctccttgatgaagaagtgccacaccaccgtcacgtgcagcacgcagaacgacgtgagcgcgccgaagttcacgagacgcgagatggcgtcgatgcccagctgctcgaacacgatgaccagcacgagcgacagcgcgcccacgaacgcggccgccacgtagggcgtctggtacttccggtgcaccttcgccaacgccttcggcaggttgccgtcgcggctcatggcgaacaggatgcggctgatggccgtctgcgcggccagcgagttgaagatgccccaggcgatggccgtggccagcgcgcacagcacgtagaggaacttgccgccggcaacctcggccaccaggtagaacgcgttgtcgggatcgttcgcgaacacggcgccgtcggggctgatgcagcccgcgatgtaggtttgcagcatgaacaggaagcccacgatcaggagcgaccccaccatggccttcgacgggcccttcttcgcgtccttcgcctcctcggacagcgtggcgatgccgtcgaagccgaggaacgacagcacgcccagcgaaacggcgctcatcaccaggccggggttgaacgtctcggggttgtagaacggctggatggtgaagccgtttgacagcgggtcggtggcgatccacagcgcgcccatcaccacgaacacgcccaggcacagtatctccagcaccacggccacgcggtcgacgatgacggtgagctcgatgccgcggatgttcacgaacgtgttgatggccacgaacaggatgccccagatgagcgcgggcacctcgggcacgatgccgctcatggcctgcgcggccaccacgtacagcagcgtgggcaccagcaggtagtccagcagcatggtccaaccggtcacgaagcccaccggcttgttgataccgcggctggtgtagccgtacaccgagccggacacgggaaacgcctgcgagagggtggcgtaggagaacgccgtgaacaccatggctatcatgcccaccaggtacacgagcgcgggcatgccgcccgaatcgccgaacacgccgccgtagatgccgaacggtgcgatgggcaccatgaagatgagcccgtacaccagcatgtcgggcacggacatggcgcgcttgagctcctgcttgtagcccatggcctccagcgcggcctcggaggcggcgctttgggattgggccgcatcgttggcggacgagaccgccttctgctcttcagtcattgaaaatccccctgtttccttggtttgtctttgccctacagcgcgaagccgagcgcatccagcacgtacttcggcaccatgaagcgcacggtcttctccgggtcgaccatctggcacacccgcacgtctgccacaagcgacagcagcatgacgagctcgtcctgggctacgccggtgcggtcgtgcagcaggtccaccatctcgtgcacggcgcggtcggccgccgcatcgagcgtctcggccgaggcgatcacgccgaagtgcgtgtcgttctcgatgagcgggtcggagaggtgcaggtccggcagcgccgtgagcgtgaccgtggcccagccggccacttccgcgcccgagacgctgatctcgccgtcgcccatggccgcgtgcatgtcgccgcagccgaagagcgcgccctccacggccaccgggaagtacagcgtggcccccgtggtgatggcggtgttgtccatgttgccgccgtggctgcccggcgtgccgcagttcacaggctcgccctccggggcaacgccgataacaccgatcatggggttgagcgggatagacagcttgtcgctccacctgagctcgccgtcctcgatggcgcacaggcgcgtgctccatgcgtcgaagcggtcgccgcacacgccctcgtccttgccggtgcacgaagccgtctgggcgtccagctcgatgtcgtcgatcgtcaccttcagcgcgccgccgggcacggcgccctccacgtacacaggccccgtggccggattgatggcgtcccagtcgatctcgtccagctcgtcctcgggcgtctgcacctggttgccgaagcagtcctgcgtgcggatgcgcaccgtgtcgcccgacgctaccctgagcgccggctcgaggtcgcgcgcgaacgcgaacagcacgcgctcgtctcctagctgatgcatgggtctccccttccttcgtctcgcttgtctcgtgctcgtctgctgccttggccggagcgctcttgcgcagtagagcgctctgccttcggcgcatcacacgatactccagaaggaacgcgaacgcacgaggtatttggaaggaaatgccggtcagccttcgctcggctcggcttcctccccttcttcccacagctcgggcgcgggcggctccaggtagctggcgatggcgaggccggcgacggccacggccgtggacgcgatggccgcggccgagggcatccaggtgtgctggcccgaggcgagccaggccgcggcgcagatgccggccacgagcgcggctgcggccagcacgatgccgagcacctcgaggatgcgcgacggacggcgccgacaagcggagagaaccgcagcggcagccagccagctgacggccacgcaccaggtagcgggctgcaagagcagcgcgcccaggttcgcctgtacgtcgattccggcgaagtcccagcgggcgagcgcgtcccaacccagcaggttgccggaaccgaacgatgccagcagcgcggccacgagcagcgcgaacgccgtggtgccgagcgcgcgggcgggcggcaggaagaaccccgccgccacgggggccagctggttgccgcccacggcgccggcgaggggcacggcgaacgtggcattcgccggcgcgttgcccagccggccggcgaagtaccaccacaccgccgtcgctgccagcagcaccacgccggcggccggcgcgccctgcgcgatgagcgccgcggccagcgagaagtaggccaacagcgcacccaggtgaggtttgagcgcgccggccagcgcaatgagcgcgaacagcccccagaacagcagcgcagccggccccgccaggccgaagatgccgtccaggccgcctacctgcggcaggttcgccagcgccacgaaggccacggctccgctgcccgccgcgcccacgacgcgcgccgccacggccgcctgccgtcgcgtgatgcgctcgcgcagcggcacgcgcggggcacggggcgggcgcggggcttcctcttcctcttccccgtcgttgtcgccctgcgcatcgcccacgatgacggccagctcgcgatggcctgtccgggggtcgcccaggaacttctccatctcctcggcgaagtcggtcacgttgtcgtagcgctgctcgcggtcggggtcgagcgcgtagaacaccacgtcgtcggcggctgggtcgagctcgtcccaacacagcgagggcagcacgagctccgcatcctcgatggcggactccgcgcgggccaggtcgggcgcgaggaacgggttctcgccggccagcatctcgtaggtgacggcggcgagcgcccattcgtcgcagcgcgcgtccaagctcatgccgcgcatctgctcgagcggcatgtagccgatagtgccgccgcctgccgcgccgaacccgcccgcatccgcgagcgtggccaggccgaagtccgtcaccttcacctgcccctggcgattgacgagcacgttgtccggcttgatgtccaggtggagcacctggttctcgtgggccacctccaacgcgtgcgcgacggagccgaacacggcggccgccatgtcgagcgtgaggtagtccgcatagtcgcgcagcagctccgtgagggtgatgccctcgatgtactccataatgaggtaggccgtctggccctgcacctcgaaatcgtacaccgtgacgatgttcgggtccgtgagcatggcggccgtgcgcgcctcgtccaagccggggatgcgcgcgagcgagcgcaccggcggcaggtcgtcgtccaggtcggcggcggggtcgcgataggccggggcggccggcgagccatggcgcccggcgagagaggggcggcgcgtggcggcggctgcggcggcctcgtcccgcttgcggaaggggctctcgaagtcggggggcggcggcggagcggcgggcaggtcctcccagggcggaacgtcgtcgggattgcgcaccggagcggcggcaccggcctcttcccgtggcggcagatcgccgggcgtttcccaagggagcaggtcttcggcttcgtcccacgaaggcgcgtcgtcccagtcgacctcgtcgaagcgcggcatcgcgccggtgcccgcctgttcggaatagctgcgagcgtcaacgggctcgggagcgggagcgggggcagagggctgccgccgcaccgcatcggcacccggcagcgccgcgcgcgcggcatccacttcgtcgagctcaatgcacttgatggccaccttacgctgaatgcgcgtgtcccacgcaacgcgcaccgtgccgaagccgcccgagcgcgactccccgatgggtcggtaccgatccaatatgagctggttgcatgccatgcgccttctctgcggtcgttgcgggttcgtttcagaaagcgacaggcgacacgagcgcctgcaccgatcatgatagcgcatttcgcccctccgctgcatgctccccacccagaagcgccgaatggacgagcggcggtactcctcgaaaccagcggtcatgcttctggtctagctggacctgtttccggaccgcagttccctgcctgaccgcagttccctgcctgtcggcaaaaacgcctgctactgtcaaaaaagagccggtttggcaaccgctgccactccgaagctcgtgcagtgttgaacgcgacctggcctttctccagctcctcgcagggaagaccttccaaggccgacatccagattgccaaaccggctcttttttgacagcagcaggcgttttcggcgtcagatgacgaaccgggcgaacgggccgcaaacgcgaggcttcaggaaacagcgccggacgcgcgaatgcggcgttgttccacagaggtttcaacttgacgtccgaaaacggctagttccctccagcctttcgcgctagactcttgtcggagaggcagttcggtgccgcaactggcggcgcggcgctgcatgatacggcgactttagaggcggctcggcagctgcaccgcctctcgcagtgcggatcactcggaaggagggaggcaccccatggcagaagcacaggagagcaccctgcggcaggacctcaaccatcctgaatcgcgcaagcgggcgctgtacgcggcgttcgcgtcgaaagatgcgcgattcgacggccaggcgttcgtgggcgtgtcctccacgggcgtgtactgccgccccgtctgccacgtgcacatgccgaagtacgagaactgcacgttctacgagacagcggccgaggcggaggctgccggataccgcccgtgcctcgtgtgccgcccggagctcgcgcccggccactccatcgccgacgcgtccgcgaacctcgcgcggcgggcggcctcgctgctgcgcgagggctgcacgagcggcgagagcctcgagcgcatggcggagcggctgggctacaccgaccgccacctgcgacgggccttccaacgcgagttcgaggtgacgccggtgcagtacctgcaaacctgccgcctccttctggcgaagagcctgctcaccgactcggaccttccggtaagccaggtggccgcggccgccgggttcaagagcgtgcggcgcttcaacgacctgttcaaggagcgctatcggctcacccccaccgccgtgcgcaagagcgcccgacggcgcacgccgtcgggcgaccgggtggccttctcgctgagctaccgtccgccgtaccgcttcgccgaactgctcgcgttcttccgcgcccgccagctggaaggcgtggaagcggtggacgagcacgcctacgcgcgcgtcgtgcgcatgcagcacggcgacgaggaggtgctcggctgggtgcgcgtggccgacgacgagcggcgaggcgcgcttgccgtcacgatgagcgcgtcgctactgccggtgacgtcgcaggtcatcgcccgcgtgcgccgccagttcgacgtcgactgcgacccacaggcggtgcacgagggcatcgcctcgctggatgacgcggttccgggcgcggcggtcctgggaacgcgggtgcccggctgtttcgaccccttcgagacggccgtgcgggccgtcctcggccagcaggtgacggtggtggccgcgaaccggctggcggcgcgcatcgtagagcgctacggcaagcccatggacaccggcatcccggggctcacgcacgcgttccccacagcggcggaggtcgccgcgctcgaacccatcgaggatgcgctcggcgtgctgggcgtcatcaagacgcgctcgcgcaccatcgccgagatcgcgcggctgctggaggccggcgacctgcgcttcgatgccggcgccgtggtggcggagcagatggaacgcctgctggcggtgaagggcatcggcccgtggtcggcgaactacctggccatgagggtgctcaatcatcccgacgccttcatggagaccgatgccggcgtgaagcacgccctgccccacctggaaccgaaggaacggctggagctggccgagcagtggcgcccgtggcgcagctacgcggtgctgtgcctgtggaactcgctggccgaataggaaggaacgcgcatggtttatcggactaactacacccaccccggattcggagagatcacgatcgcgagcgacggccagaatatcgtggggctgtggatggccggacagaagcacttcggcggcacggtggacggcgagatggagccggccgacgacctgcccgttttcacccaggcgaaaggctggctcgaccgctacttcgccggcgagcggcccgcgatagacgagctgccgctggcgcccaacggcagctcgttccgccagcgcgtgtggcgcaagctggcggagatcccctacgggcaggtgcgcacctacggcgacctggcacgggagatcgcgcaggaggatggcaaggagaagatgtcttcccaggccgtgggcggagccgtggggcacaaccccatctccatcatcatcccgtgccaccgcgtggtgggctcgggcggcagcttgaccggctacgccggcggcctggcgcgcaagatatggctgctggagcacgaaggcgtggacatggagggcctgttcgtccccgagaagggcacggcgctttagcacagggaagggaatcgcgacctcatgctttactcgaccgtgtacccccacgccgagctgggcgacctcatcatagcgagcgatggcgaggcgatcgtcggcctgtggatagaggggcagaaatacttcgccggcaaggtggcgggaaacttggagcgccaagacgaccttcccgtgttcgctcaggcgcacgcctggctcgaccgctacttcgccggcgatccccttcccgtaacgacgctgcccctcaaaccaggcggcaccccgttccagcagcgcgtgtggaagctgctggccagcatcccctacggcgagctgcgcacttatgccgacctcgccgcgcagatcgcacgcgagtgcgacgggaagaagacctcggcgcgcgccgtcggcacggcgaacgggcgcaaccccatctccatcatcctgccctgccatcgcgtggtcggctcggacggcagcctgaccggctacgccggcggcatcacacgcaaggtctggctgctggagcacgagggcgtcgatctgaccggcctctacgtgccgaagcgcggcaccgccctgtaaggagcctccgcggcgcgtacccggagagcgcagcgcgggaggcgcgtgaaagctctgcgattgctcgctatcggccgtttttctccgcaggagcaaatttcggtcttgcatagccggatgaagtcctgtatcatctgttcttgctttcgaccgaggtcggagagcagatgcgggtgtggcggaattggcagacgcgtacggttcaggtccgtatgggggcaaccccatgaaggttcaagtcctttcacccgcaccatttgaacttggaagagccccggaatccggggctcttttcgttgtcggcgaaggcagctttgttggattacgttacgccagctcggtgatctcgaacagcggagcggtaaggcgggggtcgtcgtcaggacaaccttgctcgcgattggcggccatacggtcggcgaacacctgctcgaagttctcgacgggcgcgatgcggtatcggcgcgtgagggtggtgccgtcggtgaacgtggcggtggccgaaagcgtcgcccggccgatcttctgggcagcctcgcaggatgcttcgaagaagagctcgtccatggcggcgtagcgcgcatcatcgccttgaggaagtgcatcgaactcgccgttaatacgatcgttttgttcgtttgagagctcgatcacctcgttgttcagcgcctccagctcggcggggtcggtcgctgcttcccgacgcgcgaggacgtcatcaaggcgagcacgccaatcgcgctcttccggtgtgcgcagatcgaccttgatcgatcgacggaggttctcaggttgttggttggcgtagtcaagggtgaattcctgcgagggcgcatacgtcgacggcacgaacgtcccatcttccagcgttttcatttctatcagctcgaacgacacatcctcaccgtcgatggcgtaggtcacagactcgatgccctcgcccacgcacgcgaggttcagctggtacgagagagcgctcggccgcggccccccttcgctacctaccggcacgataccttcatccgccgtggcgatgctcaccgtctgaccgccctcgtcggcatcggcatagagcgccaggccgaactggtcggccagcgaggacgcaggagccccggcccccgagcctccccatccgcccagcgtcccgggcagcagcgcgggcacagcgacaatagcgcccgccatcaccgcggcggccagcgccccgaccagcaccttcgccgccctcggcatcgtccggcgctttcccccggagccggccgcgagcgcctgcgacccgcacgctgccccctcgcttccggcggccttctccccgcgtagctcgtcaaggcgcgcgatcacgtcatcctgcagatgggcaggtggctccgcttggtccatcatcgctttgtactggttcgctttggtcatagtcgacacctcccagggatattttcagctgcgcacgtgcccgctgcagacgcgtgcgcacggtggacggctcgaggccgagcaggcccgcgatctcttttccggaataaccctcttggtaatacagatggataacgacgcgcatgctctcgggcagctcccccaccgcctcccagagggcgcgcacctcgtcgggcgagagcgggcccgcatcggacggctcgaagggcatgctgtcgaggggaaccgccgggcggcggctgcgcaggcgggccacgtcgtggcaccggttcaccgccacgcgcaaaagccaggccttcaggtgctcctggctggagaactccgtcgcgctctgtgcgagccgcaggaacacgtcctggtagacgtcctcggcatcctccttggagcccgtctgcgccagggcaagccgccagaccgagccgccccaggcgcccatggcctgacggatgaacgcgtccggcctaagggggcgctcgtcggcgctttgatttcttctcctcacggtttcacctcctgcccttaacacgctccgaggcaggaaggtgtctcatacggttcgcggaaaccggcgaaacggctcttcgcggcacgccgaagcgcgggcgagagcgcccgtcgcaagcggtgtcgcgcaccaccttgcgctcgcggcccgccgctcacgccccatgggaccgccgaccgcaaccgcggcccgcgcctctcgctaccgggcgccgccgcctccgccgaagccgccgcctccgccgccggagaaaccgccgccgaagccgccgccgctggagaagttgccgctcgcgcccgagatagcagcctgagccgtgctcacggtgttcgaaacggccgtgtgcagcagatcgcccgctgccggcatgaccgcgccgccggcgccgtgggtgggcgcgtaccagaaccaccagggcacgtaaccgtagccgtacgccgtgccggccgcgggctcgaacagctcgggcacgcttgtctgcagctcgtgcatgacctgcttcgcaatgccgaacacgtaggcgtacaccatgaactcgccccacaccttgacgtcggtgggcgggcgctcatcgagcgacgagaagtcgcgcagccagttgcgcagcgccttgcacttcgccaccaggttgttgccctccacgctgcgccgcggcatgtagttgccgatcacgcccagcgcaatggccgtgggcagcatgaagatgagcgggatgaagttgtccatgaccagcccgatacccagaccagccactcccaccagaatggcgagcgtgacgagatacccctggtagcgcttgcccttgacctcgaagaagtcccagcggttcgtctcggccgacacgatgccctgccagctcttcatggcatccaggaactcctcggggtggtccttgccgtactgctcgatggtgccgaaccacagcgagtcgcccccggcggcaatggtgccgaacaggaggtcgagcgcctgacgatcgatggggttctccaccgcgtcggccacggcgggcacgcgcgtgaggtagtagtcctccaccgtctccgtgcggccgaaggacttctggtcctgataggtgccgcggtcgatgcggatggcgccgctgtgcgacaggtgcatgagcgtagccgtgaagtcgtcctggctctcgcgatcccagcgccacaggcggccgatcacggccgggtgcacgcgcggatcgggaacgtcgcgccagtactcgtcggtgaagctcggggcatgctccttgccgtagcggaagtaggaccacagcgcccaagcaatgagcagcacgcacagcacaccgcagccgatgacgaaggccagcgactgcatgcggttgtggttggcctggtcggcccagtcctcctcctcggccagcaccttgtcgagacgcgcctcgtccgcatggagcttcgccgcatcgggagagaggttcgtgagccacgccacggggaacagcacgcgcgcctcggcgtactggccggcgttcaccttcggcacggtgtacgtgacgctgccgtccgaattgatggccaacgacccgtcgagcgggccatggccccatgcacgcacgttctcgccgggctccaccgccacgccctgcggcaccggcagcgccagcgtcatggtgatgtcggccgacgactcctcccactggtcgccgacgtacttccagttcacctcggccacgtccttgtaggcctgcacgccgttcaccacggtgtagtccagctcgataaccgccttctcatccgagacatcgaagaaggcgtacaccgtgttcttcggcgcgtcgaccgagtacgcatccgttccggggcctcccgcatcgcgccagtccagcacgaacggcacgccgggcagcgtctcccactcgcccaccacgttgccgtccccgtccacgcgcgccatgcgcacggagttcaccttcagctccgcgttcgaaggcaatccctcgaacgtccaccacaccgccgtgaagtctccgttgaagtcgaacgtgcgctgctccaccgcatgcagcgacccatccgtctcggcctgcgccgttatgtccaccttcgtcatgtcgtaggacttcgcgaacgcctcgcccggcgcggcagccagcagcgctgcggcagccaagacgagcgcggatgccagcagtatgaggcgcgccgcaacgggacggcgcacggcccgagcatctgcagcggcatggctcgcacggcgtgcaggggcggctatcgcagcacgcgccccggtattatgaggatcactcgtgatttgcacggtcaatctccttgcaagttcgagatggtcacggtatcatagcgaatcgcacctattatagcgcggagaagtgaccgagaggccgaaggtgctcgcctgctaagtgagtataccccacaagggtatccagggttcgaatccctgcttctccgccatcgagacatccttcgcacccctcttggggtgctttcttttttgcaccttcgcccgtcctccctaccgcttccacggcggcgtgaacgggcgccgaggatgatcgtccgggtgcgtcgtccgcacgggtttctgcttccagccggggtgattgcgcacgaacacggcgcggcagatgcgcgttatgcccaggccgatgagcgcggccacgaggaagctcgcgcccaagtcaaggatgagggcattgccgtcaagcagcgcatacaggcttatgagcaggaacacgaccgagagagcccccgtcaaccatgtgaacagcctgatgagtatctccttgccgcggttcggcgagtggcgccatgcggcaacaaggtacacgatgcccgcgacaacggccaacacgatgagcagcggcacgatacgcgaaagccttgctaccatcggtccactcccttcaatgccgctcccgcctacgttccttcgccaccatcataccaaagagaaggcgggctccgccgactcgtttgccgcatgccgcccatccgattcgctgcgggctggcaggcgcaggtccatcacgtcgcatacgtcggcgaagccgaaaggcttcaccaggtagtcgtccatgccggcatcgaacgcgcggcgacggtcctccacatacgcattcgccgtcatggccacgataacgagctgcggccgcccctcgcgacggcaggcatcccgcagggtgcgcgaagcctccaagccgtccatgttcggcatctccacatccatgaacacgaggtcgaaccagccgtcgggggcgcccaacaccgtctcgaccgcctctgcgccatcatgcgcccagactacctcggcatgcgtgcgtcccacgatgtcgcaagctatctcggcgttgatctcatcgtcttctgctaccagcacgcgcacgcccgagaaatccacgcgcctcggcagcgtgggcaccacgtcgtcggcgggcaggggcttggcagcatcggctctctccaggcagagcgggaggtcgaccgtgaacgtcgtgccatgatgacgctcgcttttcacggcgatggcgccgcccatctgatcgacgatgctcttcgtgatggacatgcccagcccggttccctcgatgctgcgcgtctcatcggagcgctctcgctcgaagggctcgaagatacgccccacgaactcgggcgccatgcctataccgttgtcctcgatctcgaaccggtacagcgcgcaaccgcacgctccttctccgccgcagggcgtttcgggaaagtcggtgccgcggctctcgcccagcatcagggactcgtcggtacagggagcccgatcgggcgacacgcaacctgggcgctccagccgcacgcgcaggcgaacctcgccgcccggctcggtgtatttcacggcattgccgataaggttcagcagcacctgacgcaagcgcagggaatcgccgcgcacgtagacgccggaaacgtcgtccgcttccatgtggaacacgagctgcttcgtgcgcgcctgctgctgggcgataacgtcgaccagggacacgagctcttccaaactgaacgattcgtcattcagcatgaaccgcccgctttcgatcttgctcatctccagaacatcgttgatcaggcttatcaggtggtgcgatgagagcgtgatcttcgacaagcactcctccacccggtctttctcgcccacatggcgctcggcaatctccgtcagccccacgatggccgaacacggcgtgcgtatgtcgtgcgacacgctggcaaggaactgcgacttcgcctggctggcgtggcgggccgtttcgagcgctgcctcgaggttcttctggagccggtcgcgctcggcattgcggcgccttaacgtaaccaagaagacagcgagcacggccaacacgcccgccatgagcacggtagcgtacagcgcggtttccgcacaggccttgacggccagctcgaacagggcgtcgaacgattggtgcgagctcccgatgatctcggaattgcgtgcgagcattgccccgatcagcgggtctacctgctcgcttaccgtgcgctgcacctcggcgtcggtagtggcgggatcgcggcacgtgtcgatgagccgtcgctgctcggccttcagcgtttcatagtcagccgaaagcgcgcccgccttctcgggggacgaccggcattggctggcaatggtggccagcggatccgctatcgcccgatcgatgctcgcatactcgtcctcgacggcatccacggcctcgggcgtcctcacgtacacgagccggtccgaaagcgtgcgcagctgaaccaggttggtttccacctcgcctgccgccaccgtcaccggatagggatgcgcgtttatctcgtcgattcgactggagatggcgcccatgttcaccatcgtcaccgtgtagaacacaagaagaagaacgaccagggcgcacgtcattgcgaacgagagcatgcgggtgtcgagcacccgcgcgagttggtcgcggtcgagcatccgatggtagcggaaaccatgcgtcatacaatcacttccgacctgttgtctccgacaagcgcccgaatggagaaggccaccgggcatatccgttcgcgcaaccgcgccgctcggcgtggctgcgcgaacggatcttggctaggctagaatggagcgcccgcctcgttggttcgggcgcgcgcggtgatcgctcttagaattgaaccttgggggcgacgtccgccccggctgcggcatcgaagctgtcgcgctgcttgaagcccatcatccccgcgaacagcaccgccgggaacgtctggatggccgtgttgaacttcatgaccgtgtcgttgtagctctggcgcatgtagctgatcttgtcctcggtgttggacagctcggcctggagctgctggaagttcgcgttggccttgaggtcggggtaagcctcggccacggcgaacaggttcttcagggcgccggtaaggatgccgtcggcctgcatcttgccctccggcgtgggcgcgttcatcacggcggtgcgcgcctgcgtgacctcctcgagcgtcccgcgctcgtgcgaggcgtagcccttgaccgtctccacgaggttcgggatcaggtccaagcggcgctgcagctgcacgtcgatctgcgcccaggcgttgtccaccatgttgcgcagcttcaccaggttgttgtacaggccgatgatggcaacgaccaggacgacaacgatgacgaggatgacaatcagtgggatgctcataagctctcctttgctattacgtaactgggattttaacatcttgggtcacgtatggggaacatagattgaatctgtaacccagggcatccttctttagtacgagccgtaggcggacagcggagcgctgcatccccctttcgggccatagcgggcggcgggagcagcagcttgtcgggacgggccgcggtaggacggctcacggtcataggcgggacggcgccggtggggcagattgcgggctggttgcaatcgggacggcgccgtcgaccggagcgggaggcgcggcttcgggcgggtgcgctcagcgggaggggacggcggcggcgcgtacccggccgaacgtcgtggcatgggcccaccagccgcgcagacgggcctgggcggcggcgcgaccggcggcctcgaacgtgtcgcagagcgcgaacacggccgacccgctgcccgacatgagggcctgctgcacgtccgggcacgcctcggcccacgcgcgcacgtcggccagcgcgggcagcagcgactcggaggcggccgccaggttgttgcgcaggggcacgtcctgggcgcgtgcggcggcaagcgccgcgtcgcggtcggatgcggccacgggcaccgggcactcgtcgaacgcccggtacgcggcagccgtcgacacgccgcccgcaggcctcaccagcaccacgggagagcccatgggcgcaagctcgcgcacgaacgcatcgcccgcgccatccagaacggcgcatccgccgtgcaggaagaacggcacgtcggcgcccagggtgcgcgcgacctcctcgatgcgcgggtcgtcggcggccagcccccacagctgtgccgcgcccacgagcgccgcggcggcatcggacgagccgccgcccagccccgcctcggcggggatgcgcttctccagcagcacggacacctgctcgcactcgctgcggccgattgcctcggcgagccggcggatcgccctgctcacgatgttgtcctcgggcggcacatcgagcgggggcaggccctcggccacgcggcagtcgagggcgatggagaggccggcggggccttcgggttgcgcgggcgccagccgcatgcgcagcacgtcgtgcatggtgagcgcgtgcatgacgctcagggcctcgtggtagccgtcggggcgccgctgccctatgcccaggaacaggttcaccttggcaggcgcgatgaccttgacggctcccgggccaccgaacgccgcctcgtcgaccttctgcgcggcacgcgccgccgccagcatgtccaccgcatgcgggtcgctcgcgggcgtgccggctgcaggctgcgggttcgcagctgccgaccgcgccgaagccgggcaggcgggagcttgcgagcctgcggcggccgcctgccgtcccgggtcggagcaggcagacgccgccctctcgggagcgtcggacacatgggtgccggggaggttctcttcgttctggttcgtcatcggggctccgttcgtttccttctcttgcgcgcgaagaacgcacgcagcatctccgcgcactcgtcgcccagcacaccgggcgccgcggtgaagttgtggttgagccgctcgtcctcgttgatgcggtacagcgttcccagcgcgccggccttcggatcgggcgcaccgtacacgcagcggtcgatgcgcgcctggtgcatgaggcccgcgcacatgatgcacggctccagcgtcacgtacaccgtgcagccggcaagccgccacgcgccgagggcggccgacgcctgccgcatggccaggaactcggcgtgccccgccggatcccgcgtcgtctcgcgcaagttgcacgctcgcgcgatcacccgcggttcggccagggggcggcgggtcgcagggtcgatgggctcgtacaccaccacggcaccgatgggcacctcgcccagcccttcggcgcgacgcgcctcgtcgatcgccaggcgcatatagtcctcgtcggaaaggcgcggccgccaatgagcggaaacgcgggcagcctcctgcgccgtcaggccgctcggcaccgccgtctcctccggcctgcacgttcgggacgcagaggccgcaggttcgcaagggggagcgtcggctctgttgtcttcgtcgtacatacggattattatatggtatcctttgcttgcttttcggaacctcttttcgaaaagcgcatgcggcgaacaaatgtttcacgtgaaacattgccgtgcggagcgcccctcgcggacagcgcccgcatcccccatcgcggaggaatggccgagtggttgaaggcggcagtcttgaaaactgttgacgttcacgcgtccgtgggttcgaatcctacttcctccgccagagcgcaacgcgcccggaagccagcggctccgggcgcttttttctgcggcagccgaccggttacggcgtcgaccgagctggttttggggcgcccggccggccgggcgggtgctgcggcagcccgccggttactgcggcggccggccgggcgcgggccggcgcgcacgtcgccgtcacgccctgcgcagcgcagggtcgcgcagcaaaaacaccgcgaccagggcggtcgaggccacgtcggaggccagcatgccccagaacaccgactcgagcggggtggcgcccgtcagctgcggcagcaccaggggcgctgcaacgatgaagggcagcaggaacaccacctgctggcagaacgtgagcaggatggccttgtttgcaccgccgatggcctggaagtagttggtgcccgtgatgcgcaccatgaggatgggcatggccagcagcgacacccgcagcgcccacgccgcgaacgctgcggtttccccgtggaagccgaacagccccatgagcagcgccgggtctgtttccaccagcagccataccgccgtcaggcaagccgcgcctgatgcaagggccaccctcacgatggcgcgcacgcgcacgcggttccccgcgccgtagttgaagccgaccagcgggcgcgccgccaccgcaatgccgatggcgggcaccagcgcgaactgcagcacgcggttgatggccccggacacggcgagcgcgtcgtccccgccgatagccgtcgcggctccatagcccacgatcagcgcgttcatcaccaggttgagcgcggcatccgatccgcgcacgatgaacgacggcatgcccagcagcgcgatgcaccccatgagcggggcgtcgggccgcaggtcgcgcacgcgcaggcgaaacggcatgtcgcgcttgaacaggagcgccagcgtaaccaccagggacaccccctgtcccaggaccgtcgcccatgccgcgcccgctatgccccagccccaggccacgacgaacgcatagtccaagccgatgttcgccagcgcacccgccacctgcaccagcagcgtgcggttcgggaagcccgcggcgcgcaggaacgtgtcgatgcccagcgagaagcccagcgcgaacgtgccgaacacggtgacgaccaggtacgtcttcgcctgcccgagcaccgcccccgacgctcccgccagccccagcagcggatcggcccaccacagcacggtcgcccccagcacgacggccaggatgaggcgcattaccagggcgttccccagcacagaagccgccccctgccgctcgccggcgcccaggcgcagggcgaccacggcggtgcccccgtcgccgatgagcatgaccagggcgttcagcagcgtgacgaacggcatggcgatggcggtcgcggccacgcccgccgagcccagcgcctggcccacgaacataccgtccacgaggatgtagaagcgcgataccagaagccccgcaaccacggggacggcgaaccgcgccagcagccgcccgacgggatcggagcccatgcgcacggcggcccggggcgccatgcgccccgaagcgctttccctcctgccgagccgacccatcgctcccccgtctgccgctctccccgttcaatagtgacatgtcaatgccacgtcctatgataccggctttccccgcatatgcaaggccgggcgccgcacggtgtgcagcgcccggccatcgcggagggggcgggaagacggatcggggaggttcgagccctcgggctcgctatgctcccgaacgcgcgacgtaatacacgttcggcttcgtaccgtactcctcgccgagcacccgcacctgctcggcggccagcaacctggccacctcgctttcggggtcgtccaggtcgccgaacacgcgcgcatcgccggggcaggcgcgcacgcacgagggcccgatgccgtcggtgtagcccttgctgcggcagaagtcgcacttgtacaccttgccaacctcgaagcctccgtacatgacccgctcctgctcggtcaggccgcttccgggaaagtacccctctatgcgctcgctcaggaacgtgcgcacctcgtaagggcaggcggcgatacagtacttgcatccgatgcacttcccgtggtcgacgcgcaccacgccggcctcgtcgcggtacgacgcgcccgtcgggcacaccgacacgcaggcggcctcctcgcaatgcccgcacagcatgggcgtgtagcgcgcagtggcgttcgggtacgcgccctcctcgcgcagcgacacatgcgagtagaacatgccgggaggcgtgccgttggactgcttgcacgcgaccgtgcacgcgttgcatcccacgcagcgccgcaggtcgatgaccattccgtatctcataaagtcccccttacgccttgtagactttgacggcaaccgagttgttcaagttgcccatcatgaagccgatgtcccgctcgtcgtcgttgagcagcgtgttgtagtgcggcccctcgtgcgcgaagtcgacgagccccgcgcccttcgcgccccacttgcccgagatggcgagcgtggagggatggatcatctcggaaaggtgcagcacgcccgtggtcttgccgccgtacatggactcgaccaccacctggtcgccttcggccaatcccagctcgtcggcgcgcgacggcgccacgagcaccttcttcagatgagggtcgaagcgctgctcgatgtcgtgcagccagtggttgtacgacaagcccgtggagtcgttcacctggaagtgcgtcttgaactggagcaccttgagcggaaactcctcggtggggtgcatgccctcgaactcgaagaacaccggtgcgcccgagtactggcgcagcacctcgtccaggtcggcgtgcgggaattcgatgtcgttctcctcgatgagcgcgcgcagcatctgggcgctgcgggcgttgtagcggaagtacagcggcacgcggtacgcgttctcgggatgccagtgccagatatagcccgacttcacgtcgggctgcgtgtacccgactaccgcgcactccttcaccgcgtcccagccctgctcgccgaactgcgtcttcagcttgcgctcgcacacgtcggcgtatgtgtagggctcctttgggctgagcgcgtactcgtcggcgatgccgccgggcttgccgggcaggaacttcccctggaagcccttgttggcgatgccggtcatcttcggcaggatgcccaggcgggacgcccattcgatcagcaggtcctcctgctggcgcgtgtcgaacaccggctccaccaccggcttgcgcgcctccagcacgcgcaggctcttcacgtagtccgacgcgctcttgttggatatccagcttgcattccacagcgcgtagcgctcgagcgcgtggtgctcgggcagcaccacgtcggcgaactgggtcatctcgtccatccacagcgagatggtgaacgtgaaggggatctgcttgagcacctccaccaccgcctcggggttggagttcgagcgcagcgggttgccgccacccagcaccatgtacacctcgggcttgtagtccaggtaatagctctccgggtcgagcgcggcgcgccacaccagctgcatcacgtgcagctcgtggggatagaagcactccagcttgtagcttttgggcgggaacgacagcttctcctggcccaccgcctggttcctgaagttgtcggaggccggggggagcagcatgccgtcgtcgtcggtgtccatcacgtgcaggtcgccatgttcgaggcccaggatgccgccaggcacgtcgatgcagcccagcagctcgttcaccacctcgatggccttgaacagctcgacgttcagcggattcgagttcgagccgcgaccgggcgccagcacgccggcgggacggaacgggaacgtctcgccgtccagctcgatggtggagccgatgagcgcgtggtccaccagctcgttggcgatgcggcggatggtatcggcgggcaccgacgtgatctcctccgcccattcgggcgtcatatccgccgtgtagtccttgatgagctgcaggcaggtcttcacgttcttaccgcccaccgcgtactctccgaacagggcgtacgtctcacccgacgacgtggaacggaaccgccgcggctgccccctcgtcccacacgagcggcttgcccgtggcctcgtcgcgcgcatagtcctggaagcacaccttcgtgcccttgagctcctcggacacgtcctctatgaggtacggcgcattcgtgcgcaccttgaggaagtgctcgtcgacgtcttggcgctcgtacagcatcacgttcaccagcgcccagcacatggccacgtcggtgccgggcacgatgggcacccattcgccggtttgcgccgcgttggtcttgcgcgagttcacgcagacgatcttcatgccgcgcgcgaccgaatcgacgtactccttggtgttgcggtgcgcgagcccccactcgtcacccacggagcggcccatgataaccaggcagttgcagcgctcggtgtcggcgcggtcgaccttcgtgcccttggtgcacatggggccgaagtggtcggcgcacagcgggccggaggtggtcaggccgttcggcgtgccgaaggcgctctcgaatatcaggcgcttgaacgagtcctcgttgccgaagcccgtctgggtgaacagcgtgcgcgggtccttctccagacaggctttcagcttctcggtggtgatctgcagggcctcgtcccagctgatctccacccagccggggtcgacgtcgaggcccttctccgggttcgttcgcttgagcggcttcttcacgcggtacgggtggtacagcccgcccagaaccgacaggccgcgcgggcagagcctgccctggttcgtaggcgaattcgggtcgcccttgatctccacggccacgccgtcgaccactttcacctgcgtgccgcagatggggttgtggcaggccgggcacgtggccggcttccactcctcgacgggggcggcgtgcgcctgctcgggcgcgagcggcgagaaccaggggctggcaccggcagcctcggcgcccagcatagcggcggcccccgccgctgcggcgcccttgaaaaacgtgcggcgtgtgagcgtcatgacgcctgcacctcctttgcgttggcggccgcagccggattggcggcggcggtggaacgggcggcgagaatgcgcagggccgccgcgtacacgagggtccccacgcccacggcgcccgcgaacacgacaagttccatcgcgtcgaacggcgccgcaccggcggcctcgagctcggcgaggggcacgacggactgggtcgcctggaagatggccagcttgaacagcggcacggcggcgacggcgcatgccgcggccacccgtgcgacgagggccgaggcggccggcagcgccagcagtacgacggcggcgagacccatgacggccgcagcccagaacaagggcgaagcggcgatggcggcgaactgggctcccagcacggtgccatcgccctggttcagcaccacgtcgaacacgagcgacgccgtcatgaccagcgcggctcccgccagcagcgcgcgccatccgcggcgcgcggggccgcacagcacgacgatggctatgccgagcgccgccgcctggatgagcgccgggcccgcgcccagcagcacgccccacgcgtcgcggccgctgcacgtggtgagcagccatgcctccaccgccagcagcgcaagccccgcgacgacgcccgcgagggcgaacgtccttcccgccgcctcgcccttcccggcgaacagcgcggctgcaacggcgaacgcgatgcacagcggcagcacgatggcgtcgaagaacaccggcgaggccgggttggccgaagcgtacgtcagcaggatggccgccgggttgcccaggtcgaccacgatgagcaccgatgccaccacgaacagggcgcatgcgacggcgtagagcacgcccatgtcgcgcgcgccaatggcgcccgcccaacgggcgatgcccgcaaccatcagcagccccgcgccggccgaggccgcagcgtagaacagcgcgatgtagaacccccaggggtagtgcgagcctcccgccatgctctggttcgccatctgcacggcgaacgccgccgcgccgaccacggccagcacgatgccggcgacccacacggcccttggcggcggcgcgatcgcagcccccggctctcccgtcgccgcctgtgcggccgacttcgacagatcgctttccatgaatccctccttcttcttggtcgtctggaagcgcagaccgggcttccttcccattacccggtatgcttattgacatgtctattgacttgtcatttgtgaatcctagcaaccggctgttgacatgtcaagacaatgaccgtatattcttcaccagcgaaggacgagcgaagcgaggggatgcaggatggaagacgcccggaaagcggcagcctggtacggctacggcgcgcacgtgctgctggacccgatagaggtaccgggaacagcctacgtcgtcgatctggcgaaacgcacgcggatgctgctggagtcgaccgaggccgaggaagctggagcggcgggcgcgacaggcgcgacgggcgctgccgatacggcgggggcggtgggcgcggtaggcgtcacggctgcagcagaagcgacaggaacggcatgcgcggccggggcggcggacacgaccggggcggcggatgcagccggggaggcggatgctgccgggcgtagcgggcttgccgcttggtgcaagcgcgtggaggatctggtagcgcgcggggtggaaggcgccgatgcgctcgccgaggagcagcgggccgtcgccgcagaccgcacgcggctctgccgcggcgtcagccaggacggcccgctgcccccctacgaggcgtactatcgcgaaggtgccgtcgagggcgatgtgtctgccagctaccggcgtgccggcgtccgattcgacggcacggccgagcgcgacgactatctgggagtcgaactggccttcctcgactgcctggtccgcgccgaggaggccgcatacgcacggggcgacggtcccgcagccgccgcatacgcgcagcagaggcaatccttcgagcaggagcacctcccctgggtcgccgccttctgcaccgccgcgcttccccacgcgcgcacggcgtacggcagggccgcgctcgaagcgctcgccgcccgctctgcgcgcggcaaccaacccgaatgtttcacgtgaaacattcgttctgattctccctttgacgcgcagcgcgcctcccgttgataaaaaactaccgaattcggaagatcaggaccgctttacggccgaatctgagggtgcttccctgcaaaatgcctggtgaataaaaatattcatatagtcagaccgtgcgatctttcctaattcggtagtttttaccattgcagttggttatgcgtcaaagggagggtcagaatattcgttcgattatttgaagcagcagggagaaatttgccacgtgccgcggcgggttttcgggcaggcggcaggaggcgggcggatcgcccagatcaccctttagcgcgggagctccaggcgggcgaggaggtcgccgagctggcggcgctcttgctcgtcgaggccgccttgggcctcctcctcccatgccgaaacgagctcttccaccttgacggccgcctcgcggcccgcgggcgtgaggcgcagcacgttgcgcgcgcggttctcgggatcgggatgcacggtgatcagccctttttcggcaaggctgcgcgcggcgcgcgtgatgagcgccgggtcgcggtgctggcgctgcgcgatgtcgctctggctgaccttcagcgtgccgtcgccttcgctctcgcgatgcaccaggtagatgagcacgggatactccgacgacccaatccggtactccttgaggtgccgcgagagatacgcctgatactggttcaccgtgaacacaaggcgttgcgccagattcacgggtatggagtcttgagtgttcatacgcccatgctagcacgttcgttgatatatcaatcgtcgacccacagaaacaacaaaggcgcggcaccgccgaagcgatgccgcgccgaaacccttcgagcgccgatcttgccggtcctgcggtagcgaatgcttcgcatgaggcatccgttcccttgttggccgcgcggcttgtcctaccgctcttccatggccacgtagtcgcgcttgccgctgcgggtggacttgtaggcgggacggatgatgcgcttgccggagactatctcctcgaagcggtgggcggcccagccggacatgcgggcgcaggcgaacagcggggtgaacaaatcctcggggatgcccatcatggagtacacgaagccggagtacatgtcgatgttcgcgcacatatccttggccgtgcccttctcgcgcaggatgacctcgggggccagtcgctcgatggacttcagcagattgaactcggcctcgaactccgtgcccacggcaaggccctcggcgaactgcttgcagatgatggcgcgcgggtcgctcttcgtgtacaccgcgtggcccatgccgtacacgaggcccgttttgtcgaaggcctccttgcgcacgatcttcgccaggtagtcggccacctggccctcgtctgaccagtcggccacgttctccttgatctcctgctgcatggccagcacctggtggttcgcgccgccgtgcttccagcccttcagtgagccgatggcgccggcatacgtggagtacgggtcggtgtcggacgaggtcagcacgcgcgtggtgaacgtggagttgttgccgccgccgtgctcggcgtgcaggcacagcatgacgtcgagcatgcgcgcctcctccggcgtgaactggcggtcgggacgcagcatggaaaggatggtctcggccgtggactggccgggtatgaagcggtgcatgatcatggactcgttgttgtagcgggcccgcttggcgtagtacgtgagcaccatgatgcgcggcaggcgcgagatgagcgagatggcggtgtggatctcatggtgggccgagcgatcctccgcgtcgggatcgtaggcgtacagcaagaggatggtgcgtgccagcacgttcatgatatcgggcggcgtgtcgcgcatgatcatagacgcggtgaacccgtcgggcagctcgcgctggccgtcgaggacctcgatgaagcggtcgagctgctcgcgcgtgggcagctcgcccatgagcagcaggtacgacacctcctcgaagttgaagcggtgctcggcggactggtcgcccaagaggtcgtacacgtcgtagccgcggtagcgaagatggccctcgtcggcgatcttctcgttgtccgacaccacgtagccgtgcacgttcgcgatgttcgtgaggccggccaccacgccggtgccgtccgcgttgcgcaggccgcgcttcacgtcgtactgctcgtagtaggcggggtcgatggagttgatggtcttgaaattctcgtagagagcgatcttcttctcttcttcttgcatgcaaacctccctgcgtcatggacggccccgctcccgccgtgcattgcccgagacccggcgagaccgggcgcaatgcgaagcgaatggcggggaaatcggatggtcgtccgttcgtgctttagtatgataaagccttgggatacgccttcacagcactttccggcgaataacagagggaatcttcatgtggaaggtcagcggagcggaggagggcgcgccgccatccgaccggaaatggcggatgcgcgcacggagcggcggtgacgggcaaatgacggttcgtatgcggacggcagggcgggcgatggctcaaggggcggagcgctaaaatagccggtacgacacggtgcccatccagtgaaaacgaggcgtccatgctctcatccctgttccagctgctcatcgagaagcgcgcttggtttttcgacctgttccttcagcatataggcatctcgttcatatccattgcgctggcggtcctcatcgggttgtcgctgggcattgccatcgcccagtggcggcgcggcgcgaaaccggtgctcgcgctggtgaacttcgtgtacaccatcccgtccatcgcgctgttcggcttcctcatccccgtcacgggcatcggcgacctcacggccatcgtggcgctcaccgtgtacgcgctgctgccgatggtgcgcaacacctacaccggcctcaccaccatcgaccccgccatcatcgaggcggcgcgcggcatgggctccaccgaccgccagctgctctaccgcatcgagctgccgctggccgcgcccatcatcatgagcggcatccgcaacatggccaccatgaccatcgcgctggccggcatcgccagcttcatcggcgcgggcggcctgggcgtggccatctaccgcggcatcacgacaggcaacgaggccatgacgttggcgggcagcgtgctgatcgcgctgctggccatcgtcgttgacctgctgctggggctggccgagaagtcgacgcgccgccacctcgagccgtcgagcgcgcaccgtcgcaagcgcaccggaacgcagaaggaagcgggccaggactttcgtcggcgcacgggtgccgtcgtggccgcgggcacggccgtggtgctgatcgcgggcggggccttcgcgttcgcgaatcgcggcggcggcgacaacgtggtgaacatcgcgacgaagcccatgaccgagcagtacatcttgggcgagatgctgaacacgctgatcgagcacgacaccgacctcgccgtggagctgacgcaaggcgtgggaggcggtacgtcgaacatcgagcccggcatggagaagggcgacttcgacctctaccccgagtacaccggaacaggctggaacgccgtgctgaagcacgagaacacctacgacgagtcgatgttcgacacgatgcggcaggaatacgagtcgcagctcggcctcacctgggtggggatgtacggcttcaacaacacgtacggcctggccgtgagcaaggacgtggccgaacgctacgatcttcgcacatactcggaccttgcggaggttgcgggcgggctcgcgctcggcgcggagcccgacttctacgaccgtcaggacggctacctcggcttgcaggctgcctacggcatggacttcggcagcacgcgcgacatggacatcagcttgaagtaccaggcgctgttcgagaacaaggtggacgccatcgtcgtatccaccaccgacggcaaagtggctgacgatcgcctcgtggtgctcgaggacgaccagcacttctacccctcgtacctctgcggcaacgtggtgcgccaggacaccctggaaaagcaccccgagctgcgcgacgagctgctgaagttgcaaggagccatcaccgacaccgacatggcgcgcatgaacaacgccgttgagacgcaggggcaggaaccgaaagcggtggccgatgcgtttttggccgagaaggggctgatgtaacatggaaacaacatccgcgcagacgcgccgctcaggatccttcgaccccgacagcctcaccgcctccgctcgggacgacaagagggaagccgctgacggcgttcggaatgacggacgatgccgtaccgcctccgcccaggacgacacgtgcgcgcccgcggtggcgttcgagcacgtgaccaagcgcttcggcgacgccgtggccgtgaacgacgtggacctcgccatcgaagagggcgctttggtcgccatcatcggcagctcgggctgcggcaagaccacgttgctgaaaatggtgaacgcgctggtgatgcccgacgagggcgaggtgctcgtgcacgggcaggccacgtcgagcgtcgatcccatcgagctgcgccgcaccgtcggctacgccatccagggcagcgtgctgttcccccacctcagcgtggagcagaacatcgcatacgtgcccacgctgctgaacaagcgcgatcgccgccgcaccgaggcggccgtggagaagtggatggacattatcgggctgccgcgcgacatcatggaccgctaccccgccgagctgtcgggcggtcaggcgcagcgcgtcggcatcgcccgcgcgctggcagccagccccgatatcctgctggccgacgagccgttcagcgccgtggacgccatcacccgcagcagcctgcaggacgagatcaagcgcatccaccggcagacgggcatcaccgtgctgttcgtgacacacgacatcgacgaggcgctcgacctcggcgacaaggtgctggtcatggaagccggccgcgccgtgcagttcgcgccgccctgcgagatcctgcgcagccccgccaccgagttcgtcgaccgcctggtctcccgcaagcagagcgtgtacgcgcgatagggccgcacgagcgtgacaaagggacggggataatgtctcactccccgctgtgctcgaaagcagtagggctcccgagagtgtgacattatccccgtccctttgtcacgcccccaaacattccgctacgcgcacgtaaacgatgcccatgccgagcttgctcgccgtgtcggcgccttacgattggttccagcgtaccgttcgtccgaaagatgggagaaaccatgtccgacaagaaaacgcccgaggaaaacggctccgaggaaaagatcgtcatccccagcaacgaggaggtcttggaagtcgtcgaaacgcccgacgagatcgatgtcatcgatgtgggcaacaaggagtccgccaagatcatcgagaactggtcggaagccaagtaggcagccaagacgcgcctctgcattcctgctgtccgcatcaggcgtgcgcccgatgcggacagcgcttggtgctcgggcaccggcaagctgcgcgcaaccaacgcttcacgggaaatatttctcaaacttcttaaaaatagccgttgacagagaagatggttaccggcataatagcttttgctgtttcgacgtgcgccgttacctcagctggatagagggactgactacgaatcagtacgtcgggggttcgaatccctcacggcgcaccatttcagcactttcattccgcaacgactggcagcagcacgtgcggtttttttattggtcgagcgaaagggactttgttgaaggttcgaaaatcgaaacctcacagtaagtagtcctccttcgattcccttacgtcggcggtcgaaggacgactgcctgcgagcaaacacgtaagggaattcacatgctctatctctctcaaatgatgggaaagcccgtcgtcgatgcgaccggcgagaagatcggcacgatctccgacctggccatctccaccggcgaggtgttcccccgcatcaccagcctggccttccaggggccgggcaaggtcccgttcatgatctcgtggcgcaagtacgtcgaggagttcgacgaggacggcatcaggctgtccgtgccggcccacgacatccgcttcagctatctgcagcccgaggagatcctgctggcgcgcgaccttctgaatcgccagatcgtggacacgcagggcatgaaggtcgtgcgcgtgaacgacctgaagctctccatctcgggcacgcagctgcgcctgctgggcgccgaggtgggggcgcgcggcatcctgcgcggcctggcgccgtggctcgagcgcgccgtggtggccgtggcgaaggtattcggcaagcgcatcgacgagcagatcatcgcctggaactacatggacctgctcgaccgcgacctgtccgaggtgcagctgtccgtgacgcacaagcgcctggacgagctgcatcccgccgacgtggccgacatcttggagcagcttgacccccagcagcgtgccaacgtgttccagcacttggacgacgcccaggccaccgaggccatctccgagatggaggacgagtaccaggccgacttcatcgaggacttggacgacgcccgtgccgccggcctgctgggcagcatggacccggacgacgcggccgacatcgtgcgcgacctgtcctacgagaaggccgagacgctgctgcgcctgatgggcgtggaggacgccaccgagatccgccgcctgctgggctacaaggacggcacggccggcggcatgatgaccacgcagttcgtgtcagtgcacgccaccgacacggtcggcgaggtcatcgaggtgctgcgcgagcttcccgaggaccaccccaccgttcactacgtctacgtgctcgacgagtacgacgagttcgagggcgttctcagcctgcgcaccctcgtgctcaccgacgacgcgaggcccgtgggcgacgtcatgtacgaggacgtgatctccgtaccgcccgacgagacggaggaggacgtggcggccgacatcttcaagtacgagcttcccgccatgcccgtggtggacgagcacaacatgctgctgggcatcgtcaccgtcgacgacgcctgggatgccatcgaagaggacgtgagcggcgacaagacgaaggccacggccctcaaggcggtgggtatcgtgctggcctccctgctgttcctgggactgtacacgctggtgctgctgcaggtcatcggctacgccgggaggtaggccatgatggtgaggaaccgggaggagcgcccggcccgcgcgcagcgcgaatggggcagcttcaagatgacgaaggccggaggcgagggcaaggcgcctgcgcgcgccgtgcccgccgatgccgcggaggggggcgccgatcccgcccaaatgcccgccgagaagaagccgagcaagctgtggctgctgctggccgcgctcggtcccggcgtggtcacggccatggccggcaacgacgcaggcggcatttccacgtactccaccgtaggtgcgaagttcggctacgcgacgctctgggtcatacccatcatgtgcgtgctgctcatcgtggtgcagatgacggctgcccgcatgggcgccgtcacgggcaagggcttcgcagcgctcatccgcgagcgtttcggcattcgcctgaccgcgctggccatgctggcgctgctcatcggcaacgtggccaccacgttctcggagttcgccggcatcgccagcggcatggagatgttcggcgtgtcgaagtacctggccgttccggtggccgccgtggccgtatggctcttggtggtgggcggcagctacaagcgggtggagaaggtgttcctcgtgctgtcgctcgtgttcgtcacgtacatcgtggctgcgttcatggcgcagcctgactgggacaatgcgctggtcagcaccgtagtgccgcacgtggtaagcgacacgagcttcgtctcgctcgtcatcgccatgatcggcaccaccatcgctccgtggatgatgttcttcgcccagagcaacgtggtggagaagggcgtgggcgtgaaggacttcttctcgcaaaaggtggacgtgatcgccggcactatcgccgcgtgcctcgtggcgtggttcatcatcgtgaccacgggcgccgtgctgttcccgcagggcatcgagatagaatcggccgccgacgccgcatcggccctggcgccgttcgcgggacactacgccgaggcgctgttcgccatcggactcatagccgcatcgttcttggcagcgtgcgtgctgccgcttaccacgtcgttcgtgatctgcgaggcgttcggctgggaggcgggcgtgtcgttcaagtggagggaggcgccgctgttcaagagcatcttcacgttcgtgattgcgttctcggccatcgtggtgctcatcccgggaatcgacctcatgggggtcatgctcacggcgcagttcgtgaacggcctcatcttgccggtgctgctggtattcatggccatcatctcggccgacaagcgcgtgatgggcgcgtatcgctcgcgcgcggtgtcacgcgtgctcatctggctgaccgtgggcatcgtcaccgtgcttacggcagcgctgctggtcatgcagatgctgggcatcggctaggagcgcgaggccgggatggcgatcggcactggggccgatgcggccttccgcaacggcaagctgcgcagggcgcctaaggagcccagggcagcggaatatcgccgagcacgccggcaggcggcatagacggccgacgtacggggcgcgtctttcagacgctaggcgttctcggcgaggcgcttgccctcgtcctcgaggcgctcggccaggaagaggcggcggttgtcgccgttcttcacgctttcgagcagcatctcgatggtcaggctgtccaggtaggcgtcgaagctctcctcgataagctgataggtctgcttcacgccctgcaccatggctccgtccttgcgggacgagcgcttggcgcgggtggaggccttcgcatcttcctcgagcgccttcatgatctgcagcacggtgatatcggacggctcctttgccagccgatagccgccgtgcttgcccggccgcgcctcgatgaggcccgcgttgcgcagcaactgggccagctggatgagataatcacgcggtatggacatgtcctgcgcgatgtctttggaggagcacgtggtaccctgtgcggccaggtacaggatggcgcgcatgccatagtccgtcgatgccttgaattgcacgatgtctcctaactcgccgctgctttcggtaggctaagatgcctgctataagcgactttcatatatatacgctaaatgctcaaacatgtcccgaataacacaaaagacgccgtaaaacagcgtctttcaaacatgtacgctccgaagaccagcagggcgttccgggacgattcgagtgtaccgaatgcagaacgattatagcaaggtcattgagccgattgcatagcaaatcgaatggaaacggttacgtctacgcaatcttgacctgcagttatcgactatcgttaactatctgggccatcgaatgcagccgtccattaccggcgttgccgcggtgttatactggcgacatggacgagaagaaaaacatgcgcgcagacgtgctcggaaggcgcgacgcactggatgcgcaaacgcgagcgcacaagtccgcgacgatttgccgcgcgcttgaacgattggttgaggaagcctgcgcgccggtcaccggcaccggcagaacatgccctcccgccggtgattccgcggaagcgaaccagcagggaccgacacatgaagttcggacatatcggaacttcggccgcccgccatgcattgccgtgtacgccgccatgcgcagcgaggtgaacctgcaagcgttcgttcacgccgccttcgcacgcgggtgggacgtgtgcttcccctgcatggtgcgcgcgggggcggatgatcgggggccaagccgcatggcattctaccgcgtgccccgcgagcgcctcgaccaggcgcgcacggcattccttgacagcccgctgcgctgtctgccctgcgccgcgctgtccgacggaggctacgaggaagcggagcccgccgacctcgatgcagtggcggtgccgctcgtagctttcgacgatgcggggaatcggcttggctacggcggcggcaactacgaccgcctgctcccccttctccgggacgacgcgctggtcgtgggcgtggccttcgacgagcaaagggtgccggccgtgccctgcgaaccgcacgaccgcccacttgcccgcatcgtccacgcgtagacggcggggatgcacgaacggccggaatgccaccctcctggtttttcgtcatttcgaccaaaccagtcggggtttttgaaataacaggccgtgcgcctcttcgcggcgcacggcccggcaaaacaagcaacggcagaggcgcgctagcccttcaaagccccgtacctggacttgttcagcaccagcacggccgccaccatgagcacggcgcccacggcgagcgagatccaaggattgcccgtgaacccggcaatgagatagcccaccaggcagatcacggccaccaccgacgcgtacggcagctgcgtggccacgtggcgcaggtggttgcactgcgcaccggccgacgacaggatggtggtgtccgatatgggcgacacgtggtcgccgtagaccgcgccgcccagcgtggcaccgatggccaccaggaacagcgggttgtcggcggggaagacgccgatcacgatgggcaggatgagcgcgatggtgccccacgacgtgcccatggcgaacccgatgaacgcggccaccacgaagatcacggccggcaacagagccagccccacgccgatgctgttcaggaaaccgctcacgaactcgcccgtacccagcaggtagcggcacgtgccgccgaggctccacgccagcacgaggatcatgatggcgcccaccatggagcgcacgccctcggagatgccctccatgtacccggaaagcgtcatgagcttgcgcggcaggaacatgatagcggccaccacgagcgaaacgcacacgcctatgcacaggccgaacaccggattctcgcccacggcggtggcgaagtcgacgcccttgaagaacccgcccgcgtacagcatccccaagatggagaagataatgagcaccacgatgggcacgatgaggtcgaacacgcgacccttctcggagatggcgatgcccttgaactcctccaccgccgtctgcgccgcctcgtccaactcgtcgcgctcggccaccaccgtctccatgttgaacggcggcagcgtgtcggcggcctcgcggtcggaaaggccgacggtcgccatggcctcgagcgcgctgtccttcggggggatatcctgcttggcgccctcgtcttggaactcggcctcggccacgcgcatggggccgaagtccttcttggtggcgcacatgaagaacacgaacacgatggtgagcagcgcgtagaagttgtacgggatggactggacgaacgtggtaaagcctccctcgcccaggtagccgcccacggccacggcccacgaagacacaggcgcgatgatgcagatgggcgcggccgtggagtcgatgatccacgcgagcttctcgtggctgatcttgaagcggtcggtcacggggcgcatgaccgcgcccaccgtgaggcagttgaagtagtcgtccacgaagatgatgatgccgagaaccgccgtgaggatctgcgccatcttcgcgttcttgatatgcgtggccacccactcgccgtacgcgcgcgaaccacccgcgccggcaatgaccactacgagcgcgcccaacagcgcaaggaacaagagcagcgccccgttgccggctatctgctcggccatcatctgcggcaccatggtgaacgaatccaccagctgctcgaacccggcgccgttcaggctgaactggtagataaccatgccggtgaacacgccgatggcgagcgaggagtacacctccttcgtgatgagcgccagcgccagcgccaggatgggcgggatgatggaccacacgcccgtgctgataaggtcgaagccttccatatgcgtccccttcagtcgcatcggatccgtcagcgccgacgagtgcggcgcttgagtcatgcgccctagtatacgatacggaagcgtcgcgagcagcgcgaataccgcttttgcgccggcacggacagcggttgatcgcgcgcttgcagcttgcggccaggagggtggccgcagctggaatgcttagagctggagcagcgcgacggcggcgaagggaagccagagcacgaagatcgccacgaacggccagcgatgggcgttgctgacggccacgaactcgcggatgaatgcggtgggccagaagtagcgcgcggtcttgctgcccacgccgtcggcggcgagcccgatcttgtgcgcgtactcggcggtgcggaacacgtggtaatcgctggtcaccacggcggcgcggtacgcgcccgcgcccgaccgcgcgtccatgatggccttggagttgcgcaggttctccatcgtggtggtcgaacggtcctcctcgatgatggcgtcggcaggcacgccgcgctcctcgacgaggtacgtgcgcatggcctccgcttccgacacggcctcgtcggcgccttggccgcccgacgcgatgatgatcgcgcggcgcccgtcggcctcccagagctcgacggccttgtcgaggcgcgcggccagcagcggcgtgggcttcgttcccgacaggcccgcgccgtgcacgacgatgtagtcgtagtcgcggcgcttcggcagccgtcggtacagccacgagtacagcagcagcgccgcaaacgtgaacgccacgtacgagccctccatcagcacgagcagatacagcgccaaaagcaacgggggtgcctgcacaagcaggagaaccggcccgcctacgcaagccgtcacgataccgagcgctaggagccccggcagcaaatgcgacaagctgagcccctcgcgcctcaccaccacgaacgtgttcgccgttagaaacacgacaagcgccaccgtgccgaaggggatagcggcgaacccgatgagcacgagccacggcagctcgaactggatggacaagccatagagcgcgaacaggcacaacagcaggaagtacaaagcgttgcggaactggcgcggctccttgcggtagttttttatgaacaggaacccgaacaccagcgcgggaaagtatatgaggagcagcgtgaagaacatagactggcttccgacggggttcgggaggatgggtacggtcatcggatagtatagcgttcgacgccccgccgtcaccgaattgttccttttggagcggccggccgcgtgcttcatgtgaggcacgcgttaacgcggcgtgctgagcaaatggcgagcaaatgagattcggggcggatttggggcgaaaaggaccgcagcgctcctggtcagaagcgctgcgagaggcgaatcgacctcggagcgctcggcgaaaggcatcgagcgctcccagaaaagcaaatggcgagcaaatgaactttcctaggcccaagagggctcgtacttcatgtagcgaaacgaagtatcgggatcgaccggtttgatgagatttctatcgatcgcctctttgatgagacgagaaatttgcgaagcattcgacgatttcaaaccgaaacgatctctcaggctctgattcgttgcgaaatcaccttgcgcatagcagatgcacgagtgccaatagcaggcatccaaacgctcttgcggacttagatccttgtaagctacagcctgtcgcagcgaaacgcgcatgctcctctcttcacgaatctcaatcttcggagccggcatgcgaaaatgctcgcaagcgctgatgatcttatcccagccgctccccgcttcctcgcacatatggagccggcgcatgagggctgccagcttttcgtttctcgacctcggtggatcgttcacgattctgtccacatcgacaagagggctgcccggattcgtgaactcgacacgatggtcgaaaaactcgataaggggagctgcgcccgtcaccgtgaaatcttggtgaataagggcgttggaaatgagctctctgactgcaatagacggatacgctgtcaccgtcgttcgcaatgcacctctgatatcctccttcgcaggaacgagctccattacgtaatcgtatagagactccatgcttactgcgtagccttgattaaacacccgttctttcatcaggtctattcgaccacggccgctgtacagcatcacgcgaacggctttacgacgcaccgtcgggaacaagtccaaggtcttcgcgaacagcaacacccctaggttcgttatcgacagcaagccgttgtcttgacgaaggagcatgccttcctcaagaaaatagtgaatgaccgtttcaatttgctcaggccgcgttgttcctgttaacctgaaataagcgtccacatcgagaagatcgggcacatctttctcggcgacatcctcgatcgcgatttgatcctcgaaaacctcttgctggattttcttccacaactccgactctcgagttgagccgtgcgtgagtttttgggtgcagctgcccgtgcgaacatacacgatgttgtcatattgcaccggctgatggtaagcgggccatatcttgagaacaacgacatcgagccctcgatgctcgtgctcgatgaattcaaaatgagcgttcgcgctcaaatgctgccgaagccacatttcgagctcttggttgcccttcttgcgagatttcggattgaaagaggtgccgacgatttcatgagtggcatcatcaatgccccaaatcttgtaggctgccgaagcgtcatgagcggctgccgcgttagcaagagcgcaaatatccttggcctctttctccggctcggtgaagtctctcttgaattccacgtattccgtttcattgggaagtttccgaagattctcaatcaaggctccgatattctgcatagtgctccttcgctccattttgaacgctagcatagcaacgaagcaaatgaaaagcaaacggcgagcaaatgagattcggggcggatttggggcgaaaaggaccgcagcgctcctggtcagaagcgctgcgggaggcgaatcgacctcggagcgctcggcgcaaggcatcgagcgctcccagaaaagcaaatggcgagcaaatgaaaaaacgccgaccactgcccgcgacgtccgcgggcgcttccgctacgtgcccgccgaacggatgtttctcatgaagcatccattcgtgcgacagacgaatgagacggcgcggccgcgctcccagcccgagcatacccgcactgggagcgtgcctgccgtccctcgcgcggggcggccgcacagccctattccgcttccagctcctgctcgtactcgcggtcgatagcgccctccacgcgcggcggatccacctcgaagtccacgcgcttcgtgaacaggctcaccaccggaacgatgaccagcgacagcaccatggcgatggcgccgcaattgatggggctggcgatgaacgccgtgcccacgaacccggcgatcatgttccccgtggtcaggcccacgcccacgatgaagctggcccacacggccggccgcgagatgcgcttggagaacagcccccagaaaaacgggcccaagaacgaaccggccagcgcgccccagctgatggacatgagctgcgcgatgaacgtgatggacgagttgtactgcacgagcgccagcaccgccgagatcacgatgaacaccaccaacagcacgcgcatgtacgacagctgcttcttctcgctcatgttcttcacaaggttgtccttgatgaggtcgagcgtgagcgtggacgacgacgtgagcacgagcgacgacagcgtggacatggatgcgctcagcaccagcacgatcacgatgccgatgagcaggtcgggcagcgtggacagcatggtggggatgatggaatcgtacaccggcgtgccgacggccgtcatctccacctgcccgccgtacaggcggccgaacccacctaggaagtagcttccgccggccacgatcatggcgaacaccgtggagatgatggcgccctgcttgatagccgggccgctcttgatggcgtagaacttctgcaccatctgcggcaggccccacgtgcccaggctggtgagaatgatgacgccgatgaggtcaggcaggttcggcccgaagaagctcacgaacgggccggccatctcggacccctcggctgggatgagtgagagcgtggtgatggcctcggtgaagccgccgttgttcaccagcacggccacgatgaccgccacgatgcccagcagcatgacgatgccctggatgaagtcgttcatgacggtggccatgtagccgcccagcaccacgtagatgcaggtgataacggccatgccgatgacgcaccactcgtagggcagcccgaacgccatgccgaacagacgcgacaggccgttgtagacgctggccgtgtacgggatgaggaacacgaagatgatggccgcggccgcgatgcgcaagcccttcgactggaagcgcgcgccgaagaactcgggcatcgtggacgcgcccagccggtgcgtcatctcgcgtgtgcgcgggccgagcacccaccaggccagcaagctgccgaggatggcgttgccgatgccgatccacgtggccgctatgccgtacttccagccgaactgaccggcgtatcccacgaagatgacagcggagaagtagctcgtgccgaacgcgaacgcggagagccacggccccacgttgcggccgcccagaatgaagccgtcgacagtgccggtgtggcgtcggcagtatatgcccacgcccaccgccacgcccacgaaaatgagcaccatgcatatcttttcgatcattggagtattcccatcgtatcgcgcgctgcctggcggcagcgcttgctcgagtaatccgagccctctcccccgcgtgtttcacgtgaaacactcgtctcaatgtcctgcgatttaagaacaaatgtttcacatgaaacgtcacgcgaagaacaggcccgcgcggtggcgcacatgactttgccggctgcggggcgcttcatgccggagttcgacacgtcgcagcaccacgggcaaacccatgtgctagaggtatcgataggaataataggagatggcgcggtaggttccgtcatcctgctgtgcgaccgtgcgctgcaaggcagacggcgagaggcattcggaagcacgcggagcgaaggcgcgacacacggccgcgacggccagctcgaaacgccagcgctcgtcaacgacgatatgtcccttcgcggaatgcatgcgcatactttatcacagtggagcgcttcggtcagcgaaaaagtgagcagaccgcctcgtttctcccgctagcgaacgtatgtttcacgtgaagcatacggagcgcacaggttgatcgggcggaagcgcagcgatccgcccatgcggccggaggccgcataaccggctcgcaggttgagcagggcgcttgccagagcgccctttcgcgccggcaggcgcgaaaaccacgggagagccgccgccggccgcccgcagggcggcattcgcgccgcaggcgcgaaaacggccgcgcggttggttggccggggcgcagcgccccggccatgcggccggaggccgcataacggccgcgcaggttggcgtagtaagtcagcgagggcggctgaggtgcccgaggttcgtgagatcgcgaaggcgacgcgtactttggtacccgatcttctgcgatcgcgcgaagatcgggtaccgcagccgcccgcagcatcggctggttccgtttgccgtaggcaaacggaactagtaccggctgtcgaagatgcgcttggtcttcttctccgaacggggcagctcgcccatggggacgcccttcgcgtcgggggtgcagccgcacttcgccttgaagataagcgccagctcctcctcggcgcgggtcttcgcctcgccgtcgagcggggtctcgaacagcacggtgagcacgtccttgccgctgatgttctcgatcatcacctggtactccgagctcgtgccgtcggtggcggcgatgacctcctccacctgcgcagggaagatgttgcagcccttcaccttgaacatgtcgtcggtgcggccggtgagcgtatcgatgcgcgggtggcgatgtccgaagccgcacgtgcagtcgccggggatgatgcgcgtgaggtcgtgcgtgcggtagcggatgagcggcgcgccctgcttgcgcagcgtggtcagcacaagctcgcccacctcgccgtcaggcacgggcaagcccgtcgcagggtcgacgatctccacgtacacgtaatcgtcccacacgtgcatgccatggtgcgcgtcgcacgagatgccgatgccggggccgtacacctcggtcagaccgtagatgtcgtagatctccacgcccagctcgccggcgatgcgggcgcgcatcttgtcgccccagcgctcggagccgatgacgcccttgcgcaggcagagcttgtcgcggatgccgcgctcggcgatctcctcggccagcagcagcgcgtaggagctggtggcgcagagcacggtggacttcaagtcctgcatcatgcgcagctgcttctcggtgttgccgggtcccatgggaatggccatggcgcccaggtgctcggcgcccagctggaagccgatgccggccgtccacaggccgtagccgggggtgatctggatgcggtcggtgttcgtgatgcccgccgtctcgtagcagcgcgcgaactggatggcccagtccgtcacgtcctgctgcgtgtaaggcacgatgaccggcgtgcccgtggtgccggacgacgagtggatgcgcacgacctcctcatcgggcacggcctgcaggcccagcgggtacacgcggcgcagatcgtccttctcggagaacggcagcttctcgaaatcttcctgggattgcacgtcggcgaggtcgatgccctcgaacttcatggcatagaacggcgaacgtgctttcagagtcttgaactgctccttgacgagcgcgaactggtcggtggtcagctgcatgggagatcctcgtttcgttggatggctggcggggttgcaggggtcgcttcaagctcgcccacggcgagtcttgaagctagagccatcgaccagccgaaaccacggctgggaggaagacgatgtcgttcgcgattaccatgcttggtattctaggcgaacggccgcggaaagcaaagccgttttttcgcacgaggacgaggcgtaccgcgcagcggcttgcaagcaccaggcgaggcgcatggagcgcagcgcctccacagcgcctccgcgcttcgccccagagcaatcaccgctactctgccctaccagctgaagcgccccttgccgttgcgcttgctggcgtagagcgccttgtcggcggcgtggtacaggtcgtggaacgactggccgcgcgcgacggacgccaggccgatggagcagcccagcttcacgcgcccgtccgaccgctccgtccagcgctcgatgagcgtgcgcgccttcgcctcggcctgcgcgtccgtgagcgggcactcggtgaatgcggcgaactcgtcaccgcccatgcgccccacgtacgcatcccgtgcgaacacgtcggagagcacgtcggcgaactccacgatgacgcgatctccctcggggtgcccgagcgtgtcgttcaccaacttgaagtcgtccaggtcgatcatgaagaacgtgctgtccgcgctgccgcgcgccagggcctcgctcacgtaaccttcgaaggcaacgtggttgaacaggccggtcattgaatccatctctgcgcggcgctcgagcgtcttggaatacgcgagcgcggcgttcgcctgctccgtcacggtcttggggtagtactcgtcgcggcgctggtcgacgttgggtgtcgaatggtgcaggtgggcaaggagccaacggtcgccttcgcggcggaacaccatgctgaagcgcgtgtccatctccacgagcagcggcttgggcttgctgggtttctcgcgcacccacagcgtgccgaacacgatgcagcaacgctcgtcgagcggacgggcctcgtagtagtcgtcgagtatctcgaaggttatgtcctgggcctcttcctggtcgcgctcgaggccggccatgaacgccggaaggctggggtacatctcgtgcttgcccgtgccgatgagcgagaaatcgctttggaagagcgagtcgaagatgaaatggacgccctcttcggtgggctccaagaggtaggcgtgccagagtgccttggtcagctcgacggcctcgtcaagccatgcacgctccatcgtttcgtccgtgtcgtccctcgttccggttcggattcggcatgccgctcctgcttcaccgttcagtataacagggtatccgccacccccctgctcatttgcatgggaggtggccggaaagtcgcaagacgaaggcgcggccgaaggacctacgcgcccgccaccgcatcgatggcgaccaggttgaggtcgacgaagcgcggcttcacgcaggcggcgatggcgcggcgcaggtcgtccaggtcgagcggcaggcagcccgtcttcagcgcgctggccaggagcagcgtgttcagcaccttgcggcttcccacctgcgcgcacagcgccgcgtcgtccacggccacgaacatggcggcaccggccagctgctcctgcaggcgcgcgaccacggcagccgcgtggtacggggtcttcgacagcgccgccgtgacgggctgaagcgccgtcgtggccgtgaccagcgtgccgccaggcgccaggaacggcaccacgcgcgcggcctccgccggctcgaaggccaccacgaggtcggccgtgccgcgtgccagcagcggcgccagcacctcttccccgccatcgcccatgcgcacgtgcgacaccacgttgccgccgcgctgcgccatgccgatggtctcggccgtgcgcacctgccagcccttttcctgcgcggcctgggccagcaccttcgcagccagcaccgtgccctggccgcccacgcccgccaacagcacgttacgcatgggtgtctccttccgccgccgattcgtccgaagctccaggtccgccaacgtcagcgagggtttccgcagtgcccgagatcgacgggctggcggaggcgtggcgtacctcggtacgcgagccttcgtcagcgcggcgaggtcgggtgctgcgggaagccgcagcgtcgaccgcatccgtcggctggcaagccgacggaacacgaagcgcgtcgaaggggcacacctgcacgcataggccgcagccgttgcacaggctcgcgtccacgaacgcctggccgcgctcgccgctcttcgggccgcgcgcatcgccgtcgaagccgatgcccgggcagcctatctcggtgatgcacttcttgcagccagtgcatgcatccgcgtccaccgcagcgggcgcgcccggcctcaccagctgaacgcacggcgattcgaacaggatggcgctgggaccctcgaacgccagcgcctcggttgcggcggcaacggaggcgtccaggtcgagcggatcggcgtgcacgatgcactcgaagcccacggcctggagcacgcgctcgatggagacaggcgcgcgcctcggccccatgagcgtgacgcccgtgccggggtgcggctgcgagccggtcatggcggtggtggcgttgtccagcacgcacacggtcacgtcgtggccgttgtagacggcgttcacgatgcccggcaggccgctggcgaagaacgtggaatcgcccacgaacgccacgtgcttcttgcccggctcggccacggcgaagccctgcgccatggtgatgcccgcgcccatgcacaggcacgtgtccacggcgtcgagcggcttggcgttgcccagcgtgtagcagccgatgtcgccgcacagcacggccggggccttccccagcgcgcgcttcacggcgtagaagctgccgcgatgcgggcagccggcgcacagcaccggcgggcgcacgggcagcggctcgtcgcaagccgccgctgccgaggcgtcggggacggcgcccggcacgccgaggaagcttgcgatgcgcgcggcgatgtcgtccacgtcgttctcgccgcggtcgcgcgcgtctccggtcaagcggccgcgcacctcgagcgccgcgtgcgtgcgcccggcgaagcgaagcagctcgtcctccagcacatggtcgagctcctccagaacgagcacctggtcgaggccttccgcgaaccgcgccgcggtctcctccgggaacgggtacggcgtgcccacctgccagaagcggtaggccggcaactcgacgccgcgctcctccagcatgcgcagcgcctcgcgcgcataagccgccgacaccccgcccgccacgattccgaggcgcggcgcggcaccgtgctccatcatcgggttgaacactgccagcgcgggctcggcgtggaagtcgtgcgcgatggcgcgcagccgctcgttgatctcgccgtgcgcctcgtaggcgcggcgcgggaagatgatccacttgggatcgcgctcgaagccctcgggcggcacggggcgcgcgtcggtggcatcggccacgtcgaagaacgtggacgcgtggttgatgcgcgtggtgggccgcacgatgacgggcgtgcggtagcgctcggacaggtcgaaggcggcgtgcatcatggcgaagccctcgtcgggcgtggacggatccagcacgggcatcttcgcgaaggcggcgaagcggcgcgtgtcctgctcggtctgcgacgagatggggcccgggtcgtcggccacgaacagcacgaggccgcccttcacgcccacgtagttcaggctcatgagcgggtcggacgccacgttgagccccacctgcttgcaggtgaacaggcagcgcgcgccggcgtaggaggcgccggccagcagttcgagcgccgacttctcgttggtggaccactccacgtgcacgcctcgcgcggcgccggacgcgtgaagcttcgccaccgtctcgatgagctcggaagaaggcgtgccggggtagcccgccgccacgcgcacgcccgcctcgagcgccgcgtgcgcgaacgcctcgtttcccatcagaagtttcttcgtcatatgcgtctcgcctgcttcggtactcgttggccgttgccaggacagcaacggaaagaatgcgccgccaactatccgtacaaatgtttcacgtgaaacactcgtcgtctcatgcccggactctcgtggaccccatgatagcaaaaccggcagcctccatgcgcgcgcgtccgggcgaggcgcggtcggcgcagcctacgcctcggccatacctcgcttgaagtcgatgatcttctggcgggcggtatcgcagccggtgccgaggatctgcacggccagaatggccgcattcttcgcgccgttgatagccacgcaagccaccggcacgccggagggcatctgcaccatggacagcagtgagtcgaggccgcccagatcgctcgtcttcatgggcacggtgatgaccgggttcggggtgtacgccgccacgacgccgcccaagtgagcggccttgcccgcggccgccacgattacgcggatgccgcgctcgtgcgccgtcgaggcccactcgtgcacctcggccggcttgcggtgcgcgctggccaccttcacctcgtaggtgatgccgaactcgtcgagctgcttcatgcacggctccatggcgggcatgtcgctctcggatcccatgatgatgccgacgaccggattgttgttctcgcagggcatgtggcctccttcgctcggcgccgcctgacgcggcggcgcgcgtattgttcgatcctgttattgtaggggtttcggaaagcgcgcgcccgctcatgcgctgcttttccatcgaccggccgcgtcctgcacgcagaccgcggaaggcaggcgcggcgccctacccgacgatccgcctgacgacggcctccacttcggccgcctcggggagcgacgcatcgggatcggccgtggcgcgggccagcgcgaacttcgccgcctcaagcgcctcggccaccacaagacccgcctcctcggaaggcgccagctcgtccgggcaggtgcgcctctcgggatgctgttccaagtaggtggtcaaaatgccgcggaactcggacacgaagccgaacgtgccgtctaggaacagcttcataagcgccggcgtctgggccaccagccgcgcccgcatggcggcgatctcgctcgtccagtccagatcgcgcaccaccttgaggaacagcgcgagcgtggcgtggtacggcgtgccctctatgcggtcgtaggcagcatggacggcttcggcatcgaggttgacgagccccagccccacgatggcggcgtccttcgtggggaagtagttgaagaacgtgccttgcgataccacagcccgatcgctgatcatggccacggtcacgttgtcgtagcccagctcgtccaccagcgagatagccgcgcgctcgatagccgcgcgcgtctcgcggcgtttgcgctcgcgcaagccctcggcgcccgccccaaccgcaacggcgtccgcaaccgtcgggctatcctccggctcggcgggtgatccaacggcatctggagccccttcgcccggcgccttccgcttctcgcccctcggcgctctcttccgctcgcccggcttctccatgcctgctcatccccccaccgtcctgcccgttaaacttcttgcattatacggaagtttcgcgagccatttctttatttaccataattttatagtcgctataaagttagggctgctatactacccaaggcatcggaaaaccggaccgcgaaaggggcggacaatgaaaatattcggcatgggactgcccgagctgatcctgatcctcgcggtcgtgctcgtcatcttcggccccaagaacctgcccaagctgggcggcatgctgggccgcaccgtcaagaagatccgcggccgggtggaagacgatacccagacggcataacctcccgcctgggcggcgcagcaagggcaagaagccggcccgtctccctaacctgttcgcagccgctcaccccgacataccccgcacacctccattccagcggtccctaccaacttgattgcgattaaggttaaggtacgcgtttcggcctataacccctcgatggggcaccgcagtcgcttggaacgacccgcatacaagcgatccttggagaagcgattgggattagggccagggtacacgttttgtcctataaccctataaaccagagcgtgccctgctcggcacacaaaaagcgccccgaatctcaggattcggggcgctgtcgttgcagtggtggtcggagggggacttgaaccctcggcacgcggattttcagtccgctgctctaccaactgagctacccgaccacaggtacgcgtccgtgaggacgtggaacgatattgtaccggtcgcgcgtgtccgggtcaagcgcccatgaggcatttcctctcggattttcgcaagcgggcttccgagccgcaacctagagctgaacccttcttgccagttgtcgttctcgtgcgttagaacaccccgttggggttacaatgacagcacttgcagaaagagggttaatggtcgtgggaatatcccgaatagcgcgcttctccgttgtggcgaggatcgtccttgccgcattgctcgcctgcaccctcatgtccatcataccggccaccaacgacggcgcagcgggcagggcattcgcggatacggcgtcaacgccgggcacccaatcaaccggtttcgagcaacgcgtggtcagggtggggtacatggatatcccaggcatgctctgccgcaatgccgacggtacgctcgaaggctacacctacgattacctgcagcgtatcgcacagttcaccggatggacgtacgagttcgtggaagccgagggcgaaaccaccaacgaccaggcagtcgacctgatgaacatgctcgatgacggccgaatcgacctcgagtgcggtatgacgtacagcccggcactcgacgacatgtacgagtatccccggaacagctacggcacggcgcacacctcgctgttcgtccccaacgagaacgccaaaataacgtcgaccaacctcttcaccgaggggccgttgagcattgctcttttgagctccgcgaagcagcggcgcgaagagctcgtctatttctgcgagaaaaacaaccttgagtacaccaccgtagaatgctccgccaacaacgagctgacagagaggacgatatcgggagaggccgacgccttccttggcatcgatatcagtcccgtcgagggattccacgtggttgccacgttcgccgggcgaccgttcttcttcgcagcgccgaagggcgaccgcacgatcatcgacgagatcgaccagaccatcgagcgcatcaacgagagcaatccccagttgcaggactccctttacaagaagcacttcgccaacaacggcgcaggctacgcgctgtcgagcgacgaggcggagtttgcgcgcaaccacgatacgctgcgcgtaggaatcatcgccgaacgggcgcccctccagtccttcgaccgtctgaccggcgagctcgagggcgtgtcgcggggcatgctcgactgcctgtcgcaaaagacgggcctctcgttcgaggtcgtgcgcatcgagcgcagcgacgacatggcatctgccatccgcgaggccggcgttgacttggtagccggaatagacggcaacgacaccgtggcctcgactttgggcctgtcgctctctgcaccgtacatgaccacgaacctgctgctcgtatacaaccggttcgtcgatcccgacgatctgtccaatcggaagctggccctttcctgggaactggaaagcgccctgcccgctaacgactccacaaccatatacgggtcgatggaggaatgcttcaaggccgtgaacgacggccgggctgactatacgtacggcacctcgtacaccaccccgtactacacgaacgtggacgggctgagcaacctgctgaccctgcccacctccaccgaggccatcgaagtgtgcttcggccttgtgcatccggtggagcccgacctgctgtctatcatcaacaagtccattcgcggcctctccaccgaggagctggactccatcgtatacgagaacgtgctcgtcgattccgaagagcaggtcggcgcattccttgcgagccacctgctggagttcgccatcgcagctatcgccatactcgtggtggtgatcgtgctgctggtgctctacctgcgttcgcgcgtgcttgccaaccgccgcgtgcgcgaggagaacctgcgtttccagaagctgtacagcctgacgaacgagcttttgttcgagtactcgcttgccgcggacacgctgatcatgtcgaaccccaagggctcccgctcgcgcgtgatcgcctccgtgggcgaggagtcggacgacggatcgtaccgcatcatctcccacgctcacgcccttatcgccgccaatgccgaccccgagatgctcgacgcgctcacgtctcctaccaactcttccgtagatctgccgtacgagcccagaccgggcgaaaagcactggattcgcatcgcgtcgcatctggtgacgaacgacgagggacggcctatctcggtcatcggtaagatcacgagcgtggacaacgaggtgcgcgagaagatggacctttcggatcgcgcgcgacacgacggcctcacgggtttgctgaactgggcgacgttctgcgagcaggccgagaagctgctggaatcgggcacgtgcggagccatgctggtcatcgacacagacgacttcaaaagcgtcaacgacacgtacgggcacctcaccggcgatgtcgcgcttcgcgaaactgccgaagagctgcgcggcgccttccgcccccacgaccttatcggacgcttgggcggagacgagttcgccgtatgcatcgacggccctatcgactacgaccagctggccgaacgctgcgcacgtctcgtaggccacggcgtgacgttcgacgaccaacacggcgtcgagcgcaccattacgctgagcatcggcggcgtggaactggccggcatcaccatgccgtaccgcgacgcctaccagcaagccgacagcgccctctatcgcgccaaggccgacggcaaggaccgcttcgtgttggagagactgagggaaaactaaaagcggccgccttgcgacgaccgcttagagatagctacgatgcgctcttgtcaaccaagccgctcaaattggtggcgcctttcgtcgtctcgtaataggtgacgtcgagcgtggcgctcacgctctcgatgctgccgtcggcgagcatcttgccggtcaaggagaagtcggtgacgtcgcagcggtacgtgccgttttggagcgactgcacgataccgagcgcctcgttgtatcccgccacggtgtacgtgatggtgacaggacgccgcaccagctcgccgtcgagctcgggctggctgaacttcacatcgtaggtgcccacgccggacagaagcgtgttcagctcgtcgagctcgttgcggatgttgtcgtaggcggccaccacgggcagcttccccacgtctcccaactcggcgagctcgttctccatgcgcgtgcgcgccatggcaagggccgtctgcgtgtcgacctgcatctggatctcctgcagctgcaggtcgttctcggccttggtgtcggccacgttcttgacgaccagaaagtagtagcatgccaccaggagcaacgccaccaataccaggataagcactttctcgcgcgtggagaaggatcggttcaatatgctacgccgcgccattgccggccccctctcccgtctcggccccatcgtcgagcgcgcccttgagcgtgacctcgatggttgccgacgttgccgcgttgtcctttccctgggccgtggacacggtaacgtgcgagacgcggctatccgcctcaaggcgctccaccaggcgcgagacctcggtcagatcggctccgagacacgtcgccgtcacggtgttgcccaccaccttgaccgaggacagatagcccacggacatgaggttcgaacggatgaggtcgagcacggcgttgcggttcgccaggttcgcctcctcctccgtgaggccggtcactacgtagcgcgcgtacttctcgttgagggccgcgtagttctcgtttgcggcctggagctcgtcgagctgcgcttgggcggcagccacctcggccgagctttccatgccgcttgccaacggatcgatgaccgcgaacttcgcgaacacgccgatgagaacgagcgtgatggcgaacaggcccacttgcgttgcgatgctgccgtgggttgcctcttgcttgacaaggttgatggtggttttcgtggggtacacgaccttggcacggccgccgcgcgaagcgcggcggccggagccaggggcgccccctggctccggcgactcggcgccgtccttcttgtgcccgaacggaccgaacgatatttccttgttgagatcgaccacgactctcacctggccttcatggtcgcgcccacggcgccggggcattgggcgcgcaaatcgttgtcgccgctcgcttcgggcatgatgtcggatatcgaccgcaggtctatatcgatatggcttgccacggcgttcaccagcggctgcagcgacgagcctccgccgcagcagtacgccatctccacgttggtgtccgggttgttgaagccgtagaagttgagggcgcgccctatctccacggcgatggactcgtagacgtcgaaggccgccgcgccctgttgcacgccgtcgtagtcggagagcttgtacccgttcgccacatggacgtccacgccgcgctcggcggcgatggctcggtcgatgtcggccccgccgatgtcgatgacgcgcgtgacgtcgtaggctccgtcggcgaagaagtgcagcttggtaccgctgtgcgcgaagtcgatgacgcagcagttcgccaacgcgcgcggattcccgcccaccaggttctggaaagccgcggccgccggcgtggctatgcgcaggcgcatgccggcgcgacggaacatctccaggtagtcgtccacggtctgcttcgtggtggcggcggccagcaggtccatgccctccggcacgccctcgggatcgaggtgcgtggcgagcaccgcgtaatcgtagtagtagcgatccttgccctgggcgatgtaatcacggaactcgtagggcaggttcagctccagctccttttccgtcatggccggaacggacagccgccgcacaaggcaatccgtcgaggagagcacgagggccgcatccttcgcaataccgcctgtgcgcttgacgagccccttgatgaagtcggccatagcgtcgaagctgatgagcctgccttcggccatgagcccttccggcagcgcctccaccacgatgttcttgatgacgtcgtcatcgcacaccgcgagcttcacgctcgcattgccgatatcgacgcccgtgtaggttttacccatgcggagaagtcctttcgatcccgcatttccctttcaaggacagtttataccatcccccctgccattcccgcgccattgccggaacaggccgcgcggccagccctaaaacagcccgacgtaccaggtgaggacgagcgggcctcccagcagcgtgagcatggtggccgccgcgatggccggtccgaaggggatggccttgtccaccggcggcggggtgctctccggggaggcgcccccgccttcgcccgcggcgtccttgacggccttgccgcacggagccgagggagccccgcgcaagcggaaagccgcgaacacgaggcccagcacgcaagcgacaagcaggttcaacagggacagggccgcgccgaggaacagccccacggcgaacagcagcttcacgtcgccgccgccgagcgacgtcttgcccgtcaccgcgtcgaacacgagcgagaacagcaggatgccgccacccacgagaaggccgcccgccaggccgtctagcaggccggccagccagccagccccgaccagcggggcgaacaggctgcccacgccgaaaaccgaggagacggcctcgggagcagcaccggcaaggagcgagtcggcagccaccaacgcagcgggctcacgcattgctgcgggaacgagcggaaagccgattgcacacgcgaacgacgccaccatcatgagcaaccacacggccgctgccgcgatcacgaagccgttgggaatggtgtacgtgtcgaggtcgacgagcgaggcacccatgaggatgcatgcgagcgctgcgtaggcgaaccatggcgcgcctatgccgtacacgacgagaagcgcgacgaacagggcggccatcagcagctccaccatcacgtagcgcgggctcacccgctcgccgcaatgccggcagcgcccgcgcagcgcgagccacgatatgactgggatgagatcgagcactccgagtgaatgcccgcagctcgtgcaatggctgcgcccggcaaggacgctctcgccgtgaacgaggcgccacgcaaggcagttcacgaagctgccaaacaccgcaccgagcaaagcggcgaccccgatgaggatcgccgcttgcataggagtgaagatgttgagcgggagggacaagggctatttcttgccgctgtcgttattgggcaaatcagaagacacaatatatgcggtaactttgtaaccaccgttattgtccgtcacggctgaatcttttggatccgcagtagtgtctgcagttagagtcacttggccaacattgccttctgcgtctaccgtagcttctgctttccattgtttcgcactcgtaatcgtcgtgtctttgctagatagaatctgcgtagcagcaactgatttgactgaacgaatatcagcatttttcacggcattattcgcattatttagcgcaccagtaaacacaggcacagcaatcgcaaccaacaccagtacgatcgctacgacgatcagcagctcggcgagcgtgaagccgcccttctcttcccttaccctcttaatcatttccttcaccgttgtttcctttctctctcccggcagcctctcgccgccaagaacaagccccgttcatgatcgaacgatcataccaccatttagcacacccccggtggcataacagcctacatgttcgcgtacatggtgaaaagcggcaggtacagcgcgatgacgacgaacccggcgaacacggccatgagcacgagcagcgtcggctccatgagcgagagcgcgcggtcggtcacgcgctgcgtctcgttgtcgtagaactcgcccatcgtctccagcgtcgcctccagctcgccggtctgctcgcctaccgagcacatctctatgagcgtgcgcgggaaataccggcactgctccatgcactctcccagcgtgcggccttcctcaagccccgcctccatgcgtcccacctcgcgcgacagcacgtagttgcccagcacacgccccgtcacggccacggcgcgcgtcatgggcaagcccgccgcaatgagcgtggacatggtgttcgcgaactgcgaggcgccggagaactcgcccaccacgcccagcaccggcatccttagcttcgctttcgccagcagggtcttgcccgcctcggtcgtgctgaacagcttcgcccccaccgccgccagcactatcactataagcatgatcagccagttagccgacacccagttcgaggcatcaatcaaaaattgagtgatggccggcatatcggtacccagcgacgataccatgcccgcgatggcgggaatcaccatcaccatcatcacggccaccacgactacggcgatgatgagcacgaatatcgggtacgtgagagcgctggccaccttcgctcccaccttcgcgcgcttgtcgtagtacttgtgcagccgctcgaagctttccggcaaatggccgctctcctcgccggcacgcacggtctccacgaacacgcgcggcagctcgggtcccttgttctcgaagctgtcggccaggccatggccgctcgccacgtcggtggccacctcggccagcacgcggtgcaggtacttgtcggtggtctggtcggccaccagcgacacggcacgggcgatggagagccccgcttgcaggatgatggcgaactgcgagcacatgatggccagctgcttcggcttcgcgcgcggcttcgttatgtccatggtcaggatgttcttgccctcgcgcacctgtttcacgctctgcacgatgcggcacaggtcgcgcgcctgctccatagcctcaatctcgtcgtaggcctccacgacgccgctgactttgtcgccggtgacggaaaggccggtgtaggtgaaggtgggcatcagcggacgttctttctcacgtaatcgacatcgtgggcggcttcgagcgccgtctgggcgtctatggcgcgggcccggtacaggttcagcagcgcgttgtccatggtgacgctgcccgcggcggccgaggtggccagcgagctctggatctgcggcgtcttcccctcgcggataaggttgcggatggcgggcgtcaccatcatcagctcgcacgccagcgcacggccacccccgtcgcggctcggcagcagctgctgggacagcaccgccacgagcgtggtggatatctgcatgcgtatctggcgctgcaggccctcggggaacacgtccaccatgcggtcgatggagtcggccgccgacttcgtgtgcaacgtggccagcacgaagtggcccgtctcggcggcggtgagcgccgtctggatggtgtccaggtcgcgcatctcgccgatgaggatgatatcggggtcctcgcgcagcacggcgcgcagggcgtcgtggtagctggccgtgtcctgtcctatctcgcgctgggagatgatggagcggtcgggcgtgtagatatactcgatagggtcttccatggtgatgatgttctcggcgcgcgtgtggttgatggcgtcgatgagcgccgcgagcgtcgtggacttgccgctgcccgtctcgcccgtcaccaccacaatgccgcgctggatcttcgggaagtccatgaccgccgggggcaggcccagcgtctcgagcggcgggatgacgtcggacaacaggcgcagggcggcgctcacgtgcccctgctggcggaacaggttcacgcgcacgcgcacgccggcgatggtgtcggcccggtcgagctcgcccgcacgttctatgcaggcgtaatcctgcccggctagctcgcgcgccaagcgctcgcacgcctcgtgcgtgagcggcgcgtcgccgtccacgcccgcatccaccaagtggccgttcacgcggaacttcaccggcaggccgcacaccagatgcacgtcggaagcgttcgcctcgtgcgcatggttgatgagttgttcgatgttcatggtcgcgcctttctattccagcgccgtgatggtcttacgggcctcttccaccgtggtcacgccgttcagcacgagctcgcggcagctgtcggccatggtgcggtacgaacccgactgctcgatggcggtctgcagctcctcgcgcgtggcgccgcccgtgatgcgggcgcgcagcgcgcggtcgagcacgagtatctcgaacaccccggtgcgcccgcggtatccggtgccgaagcacatggggcagcctgtgccgcggaagaacttcaccccagggtcgtagcgcatgcccagcgcgtccagctcctccgggtccggcgcgtactcctcgcggcagtgcgggcacaccaggcgcacgaggcgctgggagatgatgccgcgcacaccgctggctatgaggtacggctccacgccgatgtcgacgaggcggtcgatggtggacgccgcgtcgaacgtgtgcacggtggagagcaccaggtggccggtgatggcggcgcgcatggcaatctcggccgtctcgccgtcgcggatctcgcccaccgccacgatgtcagggtcttggcgcaagatggcgcgcaggccgctggcgaacgtcatgcccgtcttctcgttgatctgcacctggttcgcgccgtcgatgttgtactccaccggatcttccagcgtcaccaggttcaccgagtcgtcgttcagctcgcggatcatggtgtacatggtggagctcttgcccgagccggtgggacccacgatgagcaccatgccgttgttagcatggatgaggcggttgtacttctccaggttcgagcccgccaggccgatgcccttggggtcgaagagcgactcgttcttgtccagcaggcggatgaccaccgtctcgccgtggatggtgggcagcgtgttgatgcgcaggtcgatgtcctgcttcttcaggcggatgttcgcgcggccgtcctgggggacacggcgctcggatgtgttcatgccgcccatgatcttcaaacgcgagattacggaagcctgcagctccttcggcacggtgaggatggtgcgcagcacgccgtcaatgcgcatgcgcacatgcaggtcggcctcgcgcggctccaggtggatgtcggacgcgcgctcggtagcggctcgctcgatgatgctgttcaccaggcgcaccgtgggggcggactgcgcgtcggcgtcgtcgcccagcgtggaggtttggaagctgcccccgtcgtcggtgccggcggcgcgggcgtcgcgcttcatctcctcgatggcgcgggcggcgccctcgttgccgtacagcgtcatgatggcgcgcatgaccgagtcgttcgtggccaccatgggcacgacgcgcttgcgggtggcgttcttcaccgcctcgatggccatgaagttcagcgggtcgctcatggccaggtacacgtcctcgggcgtggttcgcacgggcaccacgttgtactgccgggccacgttcttcgacaccacgcggctcatctcggggtcgaggtcgatggcggaaaggtccacgaactcgatgcccagctgcatctgcagcgcctcgatgagctccgcctccgtgatgactccctcggcgatgagctcgtcgcccaggcgccgcttcgactccttctgctgcgcgagcgcatgccccagctgctcatcggtgatgagccccgcatcggtcaacacgtctcccaagcgcttgtatgccattgctacgatcctattcttttcacggtcatggtggtttccgcgtacacggtggtttcggttgcgttttctggaactatctgaatgcgaaaagtccaggtccccgcagagatgttgtctttcgctttccgatagtataccaattcggaaatcaccgctttgaggccgtgctgcgtgggagccaaattcgagtagccgctgttggcagcaagctcgatgccgcgcccaaattcactattgataagagcacacggttcatgaagcgtcgcactgacaaagtagatctcgtttcccccactttgtcgttcgatatcgttgtttccctccaccgacaaagcataggagaattcgtcgctcacccgtgccacagcttggaagagcatctggtcagcctgggtttgacgcgtgatgtttgcataaacgctcatggccgcaccgatgccggcggcaacgatgatgcccagcagcccgatgaagataacgctgactaactgttcggccagcataaacccgcgtgtgtcgcgcaatatggcacgcaagcgaagggggaatcgccggtatgaagactgatatgttgcaccgttgctcatctttaaagcttctattttggcttctctgatttggcatatcgagcgaattcgataccgttcggcccgttcacttggtagaggccaatgtagatagcgccggttgagagggcgcctgtatcattctgcgccggtatgctgaccgacacggtagaaccgctcggcgtagcagtggctagattgctttctgcctgatagacagccgaaagggccctttcgtttctggatgcgatgttggtcgccgacatcaccatagtggccaaaagcgcagaacctagagccgcgataaggatcgccgttaaagcttccaccaacgtatcgcccgaacgctcagtaagctttcgccataaggcttttcgcgctctcatcgcttggccccctcggcttttgtgataaccggagattcgtattcgaccgctttgagctctcccttgatatcgaacgtcggaatgctttggatataaacgtgcatattatagggagaagatgccgacatgtcctcttccaaagaaaggtctatttcaaaatccaagtttcccgtaacgactatgcgcccaaagaccgtgcctacctcggattgctgcaccttgaggctttcgacttcaaagtaagcgtggttccgataggtttcagcgatcttttcgccatatgcctgccagaaaacgtaaaagaaaggcgcatcgttcgtttcgcctgaaaccggtgcaaggcggaggaggttatcgctgtcatcataaaccgcagtgagcggatacttcagctgcgagccgataaaacctgcagccgaccctaccgtaaactctgcctgttgcatttccctatgcgtctgcacagccttcgcctgcaccgaagccgccgtgagcaccaccgacccgatgacggcgcagatgaggaagaacaccagcgcaatgacgatggaggcgccggtttcgtcttctaagtgcgaatgtacactcgtgccgcggctcatttcggcgtcaccttttccccgatcgccgtttggattagcagcccgctagggttggttttcgagtacaaatacgcatcagaaaaactattggagctagccacgctgccgccatccttgaacccgacgactcctccaacagcatagcttttctggctcttcgcaacaaagcgaacgctcgtcgctttgcatccgctcatctgcttctcggtctcgccacttgaagaaaaagagcctaccatccctccggccaataaaaagcttgaagattgggtgggtgtgagaccctccataatcaccttgtttacctcgcaattggacaacgacgaattggaacactgaccgacgagtcctcccatggaataattcttattaccccaagtatcctctcgactttcaagcgacaaggagagccctgccacgctgcaatcggagagagttgtatcgcttgccaaccctacaagcgatcccatggccgaggacgagcttgtccccacgttcgttaccgaaatgctcagatatctgtccccgatcgaatcgttaacaatcgagcatttgctaataatacagtttcgggcctcacctaccaagcacccaaacattgcattgacattttgcccatcccaaacgtcagtatgcttagcagcagacgcaccgtgaagaatgatgtttttcaatatggctttttctgcataaggaaataatccctgccgatgattctgctcgctcatcaagcgataccaatagttttctatgctgcacccagcttcgcctcccccatcgtaaacgccggagaaggtactgataaactttctttcatatgcatcggcaggcgcatccgccatatctatgctgtgggtttgtttgaaatgaccgctcgtgtaaactgcctgtatcccaccgtttgctttaattgctcctggaaattgcgttgcgtggcgcaccttccacggatcgttttcgcttccaagagcgttagcgtcgtcgttcgttacagctatggcacaagcgaagtttgcattgaaccagaaatcgtacttgtcttcctcatccgctcctgtagcgaacatctccactcgctgggtgctcgatttgccgctacttgtaatgagataggcatcgtacgcaacttcgccaattgcaacttcttgagcagttttcgacaccgtaatcgcattgccgttgacttctagctgttggttatctccaagagtgccttgctccacgacagcatagtatccccaagacgtgaacgtgttgtcggttggcagcggatccgtccaagcgcctttttcaccaagatacccgtagcatgcggttaccttcccctctttattaatttcgaggtaggcaagtccgaacttgggaacaatgcgatacttggcaacaagttttgccccagtgtagctaagcgttttatcatagctcgacaaaagcgaaccactcgataagatttcgattttaccggtgctcgtatcttcggtctgccatcctaaaaactcccagtcaaccttatcgattgttttgtcgtatccttgagccaccttcgttccttgatcaccatagggcacatattgggagggtatgttcagcttggtctctatttccagatcgccattcttcgttttttcgtaataggaaaccgcgcggtagaaacgatagtcttccgttgtcttaagctcataatcggtcgcgttggtggtactcgtaaaagtatacgatcccggtatgcttttatacggttgggcggttgcctgcttcgtcagtccgccgtgttcgtttttcagatacatgaacaacgaggcatttgttatctgcgtgcttctcaaattgaaaggatcggcgttattctgtatgttcttgaaccccaaacccggagatatcgaataatatacgcgaacagcaccgcggtcattggaaaacacgttcccgttattgaatcctgtatcgttgtcacgtgcaatggaccatgcaacgtccgccgacgaggcgccgaattccctctcgaaattctggctaacagacgtgtttacggtcttgttcactccgcgcgcgctgatcttgttgtattcctgcccttcgccgactgtcaaatccgaaatcagcgtaccgttttccgccttcttgtcgaagtattcgctcacctctgaagttcttggagccgtccgaagatagagggacacgcttccctcaggatccctcaagctaagcttatccggcacgtccccccagttattcgccgatatctgcatcttgacaatacgaccgacgtcaatagcaggatcggttatgctgtcgaaggttgttccatcttcataaccccacgaaatggcatcgtcaagcgacgagcagttcgaattgttaacattcgcccactcccaatcgccattgcgcacgtatccgacacgcacatactctttgtcggcattttgagcccatagctcccaaggctgatagtagtgggttttgcgacttcccgtcatactagtgaacgatccaaccgatccttcaaggacaaaagtctgatcggctgctgctgcgtcatacgccacattcatgccgaggtacgactgccagccattttgtttattaatgcccttgagcgtgacattggatttcgagttgggtaatgagaaatcctcttgggtgggaacgccttcgatggtgagggacgatccaccttcgatcgtcgtcgctttcatctcaggttgattgtaattcgactcagagaggtaagagggattgttctcgccttctccggtttcgcccgcaagcaccgtcgaccaaggggtgctaatgtacagcgacaacttaccgacttgttggggccattcgatatttgccgttgcggtggcagctacgcatgggagattcgccgcttccacctttgcttcggcgcgcacagaatcatgcactttaaaattatctagtatcgtgatcagctttttaccatctggaagagggtcggccttcactgctcggacaagcgcattcaggtcaagcgcgtatgcttttccttgactcccgtcgcgatccaaccgctgtagaacaggctgtccggaggcttcagaagtataggaaccggtgaccgttttgccatttgcattagccgtgaccgttattagcgagttttttccagcatcgtcgtccatgcccgctatcgtaaatgacacttcgctgccatcgtccaaagttttcgagagcgatagctcggttaccgtcttccatgacgtatgatcgacaatattttgatcgagtacgaacaacagcccttgggctttgccttcgcttcccacccagatcattgggttctgcaaggctacggcgtcagtggcgccggcgggggtgccctggtagtaaccgatcatggggtcgtttttcatgcgggcagcttggtcggtggagccatggctggcgtagtaggtttgggcggcattcgtgcgggcgggggaactgccgaagaagccggattttccgtcggtgtagtagacggcctccacgctggcagtcgaagccttgaacacaatgacgtagtcgccgttgcggacggcatcgtcgatggagagactcggaacgatgccgttgcctcgcgcaccctgaaggctgtcaagatcgtctgccaccatatagtaggtgtcggaatcggctgatcccgttgcggcagggtacttcaccttgccgtcggggccgtcgatcagcgccaaccacgttccggcggccttcttggcggtcatctgggtttgggcggcgttggcgatggactcggcggcgttgttcagctccaccatgcgcatgttgttctgcgcgttgacaatagaaggaatggcaatggcggcgagcaccagaataatggcgatggagagcaggagctctgcgagcgtgaagccctcgctatgcttcttgctaccggtcatctttcagctccctcgttctcgccgcttggcatgccgggcatagacgtactgaaagtacatcttaacattttgcacacggggggttaactaaaccgtagtttgaagcctgaattacacgccggcgtctggaccgcctcgctacccgaaaatcagctccctctcctcgcccaccaaggcggctcgtgcttggtcgcggaggttgttcacgccgatgaagaactggcgcatcatgaccaccatgaggtagcggcccttcggggtgagggtgagctcgtcggacgtgtcgcggtcgaaggctccggatgctttcatgaaggccatctccacgggcaggccggcctccacggtgcagccgaagtcctttcggaactggcgcttgtccaggcgcaggccgaacagctgcatcatgaagcggtagcgcatgcggtcatgcttgctgaaggtggtcttgcccatgagcgacatacggccctgcgcgatggcggcgttgtagtcgttcacggagaacgtgttcacgaacaggttgtcgcccaggtacgtgatgccgccgcttccgatggcggggtactcctcgtagtccaccacgtactcgtcgatcatggcgtcctcgccggccacgccggttccgcgcttgttgaacgtccaggcgctgccgtgctcgaacagcgggtcggggccgccggccaagagttcgctgatgatctcgtagtacgtgcgctcgcgggcgtagtccacgcgccccacggtgcgggcgagctggcgtgcgacgctggggctggccataagcgggtagaacgtcgtctggctcgtgccgctttccaccacgcgctcgatgtcgttgatgaggatgtcctcggtctgcgcgggaaagttgaagatcatatccacgttgagcgaggtgaagtacgggctgacctcgccgattcgcgcgagaatctcggcgccgctgccgtacttgtcgtagcggtccatctgcttgagcaggccgtcgtcgaagctctgcacgcccacgctcaagcgctgcacgcggccctgcagcttgtccagatacgccggtatcaggtggttcgggttcgtctcgctggaaacctccttgatagagaacgtctccttcgccagatcgatggtgtcgcacagctcgtcgatcatgatggtgggcgtgccgccgcccacgtacaggctctcgaaatcgtagcccagctctttcagcatcatcatctctttgcgcatgctggcgaagtacggccgcgcgcgatcctccgcgaacggaaagcggttgaacgagcagtacgggcacagccgctcgcagaacggcacgtgcatgtacagcatgtacttctgccccggcttcggcgcgggaacccgcacgtcatcggtgggccggagcttcaggtagcttttcgtgcactggcggaccaccgccgtgagcatgcgttcagatagcaatgcgaagacctcttctcgtttactgcgaaaacgcgcgggcatgccccgaaacgcgcccctgcgggacgcctcggggcatgcccggagtggttagttccaagcctcgcgaccggcggcggccttcttgccgatgtcggtacggtactgcttgccctcgaagttgatgagactgcaggcctcgtaggccttctcccgggcgtcgtcgaacgagtcgcccagcgccaccacgttgagcacgcggcccccggccgtgaccagctcgccgtcggcgttgcgggccgtgccggcatggaacaccgtcacgccctctatctcctcggcctcctcgatgccgaggatgaccttgcccttctcgtaggcaccgggatagccttcgctggccagcaccacgcacacggcccactgttcgctccagcgcagctcgatgtcatcgggccggccctcggccacggccagcacgatgtccacgaggtcggcctccaggcgcggcagcacaacctgcgtctcggggtcgccgaagcgcgcgttgaactccagcaccttcgggccctcgggcgtgagcatgaagccgccgtacagcacgccgcggtagtcgcaggcgaagtcggtggccgtggcggcggcggacttctccatgatctcgtgcatggcggccagctcgtcggccgtcacgatgggcacgggcgagtacacgcccatgccgcccgtgttcgggccgcggtcgccgtcgaaggcgcgcttgtggtcctgggccgtggccatgcaatgggccttgccgcccgacacaaacgcgagcagcgagcattcggggccggtgaggcactcctcgatgaccacggtagagccggcctggccgaacgcgccgtcgaagcaggagcgcacggcctcttccgccgtctccttgtcctcggccacgatgacgcccttgcccgccgccaggccgtcggccttcaccacaaccggggcttccagcgcggacaggtagcccagcgcttcctcgagatcgtcgaagctgccgtaacgcgcggtgggtataccgtgggcgtccatgaagcgcttgctgaacgtcttactgccctcgagctgggcgccctgggcgtcggggccgaacacggcgatgccggcctcgcgcagctcgtcggccacgcccgcaacgagcggcgcctcggggccgatgaccacgagctccacgtcgtgctcctccacgaacgcgagcaccgcgcggccgtcctcgacggccaggtcgcccacgttgcgggcgatatcggccgtgccgccgttgccgggggccacgtagagcttgtccgtgcgcggggacttcgctagcgaccacgcgatggcatgctcgcggccgccgccgcccaacaccaagatgttcattagcgatcccaccctctcatgatcgtctggtcgcgatcggggcccacggcaatgatgctgacgggcacgccggtgatcttctccaggtactccacgtagcgctgcgcgttctcgggcagctcctcgaaggtacggcattcggtgatgtcgacgcccttccaaccgggcagctcctcgtacacgggcttcgcgtggaacagcacgctttgctgcatggggaagtagtcgtacacctcgccctcgcactcgtaggccgtgcacactttgatggtgtcgaaggccgacagcacgtccagcttcgtgagcgcaacgtcggtgaggccgttgacctcggccgcgtagcgcgcgatgaccgcatcgaaccagccgcagcggcgcttgcgccccgtggtcaccccaaactcgtggcccaccgcgcacagcatctcgccgacctcggcctcctcgccctctccgccgtcctcggggaagcgctgctccgtggggaacgggccctcgcccacgcgcgtgatgtaggccttctggatgcccagcacgcgctcgatggccgtgggccccacgcccgagcccgtagcggcgccgccggcgcagcacgacgagctggtgacgtaggggtacgtgccgtggtcgatgtccaagagcgtgccctgcgcgccctcgaagagtatcgacttgccttcgcgcaggccctcgttcagcagctgggccgtctcggccatgtagggtttgaggatgcgcgcgtagggcaggtactcctcacagatctcgtcgaccgtgtaggtgtgcaggccgtatatcttctgcagcacggggttcttctgcgccagcgccgtctccagcttcaggcggaatatcttctcgtccagcaggtcctggatgcggatgcccttgcgggcggccttgtcctggtagcacgggccgatgccgcgcttggtggtgccgatcttgttctcgcccaggcgcttctcgtccgcgccgtcgaagtccttgtggtagggcatgatgacgtgcgcatcgcagctgatcttgaggtttttgcaggagattccctcggcctcaagcatggccatctccttgataagcacgccgggatccaccaccacgccgttgccgatgaccggcaccgcatggtcgtacatgacgccggagggcatgaggtgcagcgcgagcttcttgtcgccgtggatgaccgtgtggccggcgttgttgccgccttggtagcgcacgacgaaatcgtattcgcgtgcgatcaggtcggttatcttgcctttgccttcgtctccccactgggcgccgacgagtaccgtgctgggcatatggttcgcatcctttcgcgcccgcgcctgcgcgccgggccgtcaacctatccgcagattcatgattatattacagttccacaacgttcagcgccggatcgaccgaccgcatggactctactatttcttcatggcaggtgaacaggatcacctggcgcgtgcgggacagttccgcaagcgcacgggcggcaccgatgcggcggcgagcatcgaagttcaccaagatgtcatcggccaagatgggcacggagcggcccacgttgtcggccgtcatgagcagcgcgatgcgcagtgccaggtagagctgctggcacgtgcccagcgacaggtgaacgggctcgcgctccgtcttcaccgcatccatcacctgcagccggccctcgggcgtcatgaccaccttgacccagcgcccgtcggtcatgagcgagagaaggcggctggcctggcggtacacctcgggctggctcttggattcccatgcggcgatggcggcctccagcatgcgcttcgccaagagcaggcgcgcgtagtcctgggcgctctcgtcttggcgcgtgcgcacctgctggtagcgcagtttcagctcgtcgaatcggtgcgcgtgcttggcctgggagagctcctgtttcagctcgccgtagcgacggttcaggctctcgctggtctccaataggccgacgcgctgcctggtgcgctgttcgatggcggcatccacgtcctctacagaggcgccgtcgcgcaagcctgcgcgctcgacggcccgggcgcgttggcgctcgacatcggcgaggttgtcctccacggaggacaggcgcgaggccagcgcctgctggcgctgttggaacaggcccgtctcggcgcgggcgtccttcgcctcggccagaagcgagcgggcgctgcgaagagaaccctgcgcagccgagaggccgacagcgtccagctggaaccagatgcgtgctgccagctgctcttgcgccgacaggcatgcctcgagcttcttcttgtcctgcagcatgacccactgggcatcctgcttgcgggcctccagcgcctcggcggccttgtcgggtcggaacagcatgaccagcgcagcggcggccagcatgagggcaaacaccaccaggcctatgccgagcgcggtgaacgacaggctggtgatctcgcggccgtgcatgaacagcggcacgccggccgccacgaacacaaggggcagcgcgatggacagtcccacctgcacgctgcgctggcgccggcgcccctcatgcacctgatgcacgtcctcggtttcgagcagcgcctcgtaggcggcggtggacgttgcgcagttctccttggccaggtccacgctgtgcgcgcatttcgcctgctcctcggccagcgcgtcgatgcggtcgcgcagggcgcgctcgtcggcggcgcccagggccacgagcgccgggtccgaggtctgctcgcgcacacggtgctcggcggccaaggcggcctcgtcctcgcgcaggctgtcgcgctgacggcgcagctggtcgcgctgggcgtccagcttctccaggctggcgcgctgcgcggcaagctcctcgatggatgcgttgagcgcgtccaggcgcgccaacagctgcgcacgctgcggcgccagctcgtggaactccttgtcctgggccttgtagcgctccgtttcgtccgcggcggcggccatctgggcgcgcaggtcgtcctgctcggcggtcaggcgcgcgatggaatgctcgatgccggcggccttcgaggtgtattcggccaggcggtcctgcacctcggcgagcgcgtgggcggggctcgcgcccgtgccggatcccgccgtgagcagcttcgcggtcatatcggtggtgttgcgcaggctgcgcagctcgtcggccgtgagcgagaacatggtctggaacgtctcgcggtcgatgtcgtccaccagctcgaccggaccttgcaggccgtcggcgttgcgcacgcgcgagagcacgagctcgttttcggactcggagacagacccggatgcgagcaccccgggttcggatgccgaggcggccgcggaggcgtcagcattctcgccctgaagagagtccccctcttccgggcgcggggcgaagaacagcgagccggcgcggtcggcgttgcgcggcttataggtattgcggacgccgcgggcctcctcccacccgaacagcacgccgcctgcgaacgaggccagcgtggacttgccggcctcgttctcgccgaacaccacgttgaggtgcggggtgaacgggcccaccaccttgttggcgaaggcgccgaagctcgtgatcttcatgcgcttgaggtacggcgcgccaccgtgctcggccgtcattcgtcaccccggctcagcaggtcgagcaccaggtcctcggcgtcggccgccaaatcgtcgatgcggcgcgtgtaggcgctgggcagctggatgttcttgagcaggaactcttcctggatataggctatctcgtcctcgcggtcggcgcgcagggcgtcggccacctgcaggaacacggctgggaacaggccttcccggcgcagcgcctccttgtcgtacggacgtagcgtggcatcgacgagcgcgtcgcagaaaaacgacgggtagccgtcgttgatgtgcttgcgcaggtcttccagcactccggggcgcgcgaacaccgcgtgcagcggcgtggtgcccgtgagcgtgatgcgcacgcacatctcctcgcaatgggccttgccgttcacgcggaacagctcccgcatgatcttgtcggtgacctcggccacgttcgcgcaatcggccacgtccacatccatgcgctgccataccacgctggccgtgggaacgaactcgagcgcggggctcgcgccttcctccaacgtcacggcaaagcagccgcgctcacccgtctccttgatatcacggccctggatgcagcccgagaacacgaggcgcgggtcgtcgaacgagggatgggcgtatttcatatgtatatggccgagcgcccagtagtccatgcccgaccgcaggagggcggcggggctcgtgggcgccttcaccggatcgaggtccaatcccgtgtgcagcacgcccacggcgaagggcgcgtgcgcgacgtcgggcacggcatcggccagcgcctgctcggccgctgcacgcgtcaagccggcagcgatatcctcgtcggacggccacgtttggttgtagtagccgcgcccgccgataagggccagcgtctcgccgtcgcgccgataggccgcgaaaccgggcttatcggccggcagcatgagggtgttcggcgggaacgcgaagaagtcgcggctccatgaagtgaaggggtcatggttgccggtacacaggtacacggggatgccggccttgtccagacggcgcagaccctcgaagaagtgcaggtaatcgccgtaagacgcgcgtgcgctgtcgaagatatcgcctgcgatgaccacgaagtcgaccttgcgggccagcgcggcgtccaccacgcgatcgtatgcttcggggatagccgtgagcaggcggttcgcccacgtttccgagagcgctctcaggccgcggaacggcgcgccgagatgcaggtcggccgcatggatgaatgtgattcgctttcgcatgggcaccagtgtagcgcgtacgcggctcgcgcgggccggctagaagccgcctgcgcgcgaatcgtcgatgaaatccatgaagcgcgtgtactccgggttgaacgccaggtcgatatcgcgggtgggaccgtttcggtgcttcgccacgatgagctgcgccgtgcccagatcagggcggtcctcgctttccgcctccgtctcgtccatgcttcggtcgatgaacatgacgatgtcggcgtcctgctcgatggagccggactcgcgcaggtcggagagcatcgggcgcttctttccgcgcatctccacggcacgggacagctgcgacagcgcaatcacgggcatgtccatctccttcgcgagcaccttcaggcctcgcgatatctcgcccacctccacggcgcggttgccgtcgcggcgcgtggagggcggctgcatgagctgcaggtagtccacgatgatgaggcccttgccttcggtgcggcgcaactcgcggcgcgccttggcgcgcgcttcgaggatggacaggcccggcgagtcgtcgatgtacagctccagcttcgaaagcgtgttcgacgcatcggcgatggccccccagtcgccctccgatatgaagcccgcgcggatcttcgacaagctgacgcgcgcctcggcgcagaggatacgctggaccagctggcccgcgctcatctccagcgagaagaaggcaacggccgcgcccgacttggcggcgttcacggccaggttcagggcgaacgacgtcttgcccacgccggggcgggcggccaagatgaccaggtcgccgccgcggaagccgtggaacaggtcgtcggcgtccttgaagccggtgggcacgccagccatatggttctgctgctcggccagcttggtgatttcctcgaacgcctcggtgagcagggaatccatcttggagaacgtggacgacacgcgcttctcggtcacaccgaacagcgtcttctcagcgtcctccaccacctcgtccaggttgtcgggcgcgtcgtaggccagcgcgttgatggaggcggcggcgtagatgagctcgcggaggatggccgtgcgcttcacgatctcggcgtggttctgccagttcgtgagcgcgaacgtgttgtcggccaaatcgaccagataaggcttgccacccacggcctccagctggcccgttgcgttcaggttgtcggcgagcgatatctggtcgatgggaatgcggcgcgtgttcaactcgcagatggactcgaagataatgcggtgcgccgggcggtagaacgactcgggcttgagcttcagaatgagctcctccaccgcctcggcgttcagcatgcaggccgccaagacggacttctcggcctcgatgttctgcggcatcggcttgttcttcggtgccgatccgtcgttgaagtcgttgctccttgtgctggcctggtacgcttccggcatagtggctcttctcgctccttcaggtgtccgctaccttgttccccgctatagtaccgcatacgttaccgcagctcatgtgtatttttcttctcgaaaaaccatgagatgcgttatccacatgcaacggaaaacccccttcgcccgtcagcggggcaaagggggtttccccccgtttccacaagttggatcctgtggaaaagtatttattcctcggtagccgtctcggcagcctcggcgggagcctcggcctcctcgacaacctccacggtctcctcgacctcgacgacctcggcctcggccggctcatcgacgttgcccaccagcagcttcacggacaccttgatgtcgcggtagataccgtagaccacttcgtgctcgccagccgtcttgatggcatggccgagctcgaggcggcgcttgtccacatcgaggtcggtggcggccttgatggcgtcggcgaccatgacggcggtgacggagccgaacagctggccctcctcgccgaccttcgcctcgaccttgacggtggcaccctcgagggcggccttcatcttctcggcgtcggcaatgcggttctcctcgcgcttcgcaatgttgtgcttgcgctgctcgagctgcttgaggttccccttcgtcgccaggatggcgagcttctggggaagcaggtagttgttggcaaagccgggggccacgtcgacgacgtcgccttcaccgcccttgcccttcaattcttgaagcaggatgactttcatggaaccctccttgcgcctagcggctgcgacgatcgccgcgaccgctgacggcgggcaccgcgtacggcatcaaagccatctcgcgggcacgcttgacggcgttcgcgatgtcgcgctggtgctgggtgcaggcacccgtcacccggcgcggcttgatctttccgcgatcggtaacgtatttgcgcagcatttgcgtgtctttgtagtcgacgtagttcgcctcgtccttgcagaactggcagaacttgcgacgcggctgcttcgcgtaatcggacatttcacaaacctctttcgtttcgcttaaaacgggatgtcttcatcgtagaccgaagaagaggcatcgaccaccggcgcagccatgggggctgcggccggagccggggaatagccgcccgcgttgccgccatacgactggtttccgccgtatgaggacgaatcgctgttgcggctcgacatgaactcgagctcgtcgacgatcacctcgatcttgctgcgcttctggccgtcgcgctcccactggctccaacggagcttgccctcgatggacaccttcgtgcccttgttgaggtagcgcgagaggctctcggcacgggcgccgaacatggtgcagtcgatgaagttgggatagtcctcccactcgcccgtctgctggttcttgcggcggtcgttcacggcaacgccgaagccgagtaccggcaaaccgctcgccgtggagcgcagctcgggatcgcgcgtcaggtttccgctgatgataactcggttgatgctcatgatacctacctcttcttctcatgctggggcgccgcgggcgcccaatgccacgtgctcttaatcgcgatcggtacgcttgacgatcatatggcgcacaacggcgtcattgatgcgaagaacgcgatcgagttcagcaacgttagcgggatcggcatggaaatcgatgagagtgtagtcaccgtcggtcagaccgtcgatctcgtaagcgagtttgcgcttgccccagttgtcgacgttgtcaaccgtaccctcgccctcggcgatcgtggtctcaatacgcttcataacagcggcacgggattcttcgtcgatagacggagcgacaaaaaacagcaattcataagccttcatcagctcacctcctttggtctttagcggctccggggctggtgaaggcagttaacccggagcaggattagcttgcctattctagcaaagggcctcatgggctacaaggaaaactttcttccttaccagcgcgcacatgctttcaccatcattgcgcggcgtgcctcccgcttgtccgctgaacttctctgcgagcagtatagcaacgcgaccttgccgggcgaccgtaattcaaccgtcgtggagccgcggggaactgacgcggatctgacgcggacgacgtgcggaccttgcgcatcagccgcgcgttctttacgcgggtacggtgcgcatctgacacgaccgcttccgtaattcgaaaaccctggccatgagcatgagcggaggggccttgcgtacacgggtaaccgcttctttcttgaaaggatcctcaatattggaacatggccgaattgaaaacagagagccggctgtgttccatgtgggacacagccggctcgattatccgcctcttcgcggcgcttctttagctgccgcagatgatcagcgcctgcgtagttactcggtctctccctcgaggtcctcttcgtcgtcgaggtacttctcgtcgatctcgtcctcgtcgtactggtcggcctccttgaggccgctcatgaagttcggcgcctcgccgatgtaggccggctcctcctcgaacgcaggctccccgtcttcgctcatcgtgtaaaggaatccaacggccacgccctcgtcctcgccgggaatgccgccctcggcgatgagcgcatccttcgtctcgtcatcgacttccacgtagccgtcatagcacagagcgtacgcctcggcgccgcgggcgttctccaccgtgtggcgcgcgaaggcgaagcattcgtccgccgactcgcccggatggttctccaagaacaggttctccttcaccacgagcgcggtgaacggcaccacgtcggcaccttgcttcatcttctccttcgcctcttccagcgagaagagcagtaccttttccaggatctcggggatctcgggtacttctacgtccgagctctccactacgcgatcggccatagcctcgtcctttcaactggccgccgctgcctgtccgctcttttaggcggcccgcatgcggccctcgtttttccgttgccgaccagtgtagggcttcccagcgagccctcgctcgcggacggcgagttattcggcgtatcttcagatattgatacgcggccgttattcagggcgtttcccgccccccggatgtttcgcgtgaaacatccgggggattcggcggtttcgaacggttgggaaggcggctactgcaggataccgtcgagcataaggttcaccttgaggacgttcacgcgagcatcaccgagaacaccgaactggggctgctcggtgcactgctcgatgatggcgcggatctcggaaggcgtcttgccggtgttcttcgccaaccgctccacctggtactcggcggcagtcggggagatatgggggtcgaagccgctgccggagttcgtgacgaggtcgctgggaatgggctcgtcgcccttctcggggtgggctgcatggatctcgtcgatacgggcctgcaccgtagcggcaaaatcgtcgctcgcgggactcaggttcgacgggccgtaccacatgacgggattgccctcgtcgtcggtaaacgcagagacgtttgcgttcgtgagccggccccacatatgatcctgatcgtggaactcctggccgacaagctcgctgccgtactttgttccatcgacttcgatgatagagccgtttgcctgataagggaagaagatttgcgcgacacccgtgcaaacagccgtgtagacaacaccgcacagcactgttgtaacgaggaagaggagcgctgcgcttccccatattttcacttgcttcatgaggtgatcctttccaattcggtccgcaggccagttattgcttttgacctgcggagtattgaatgcagagcttttgccaaaccaaactgcaggacgagaactaccctcacgccacacccaaagccgtcaacatcatgtcgagcagcttgatgacaacgaacggcaggacgatgccgcccagaccgtataccaacaggttgcgggacagcaggctctgcgacgacgcctcgcggtacttcacaccgcgcagcgccaacggaatgagcgccacgatgatgagagcgttgtagatgatggccgccatgatagccgtgtaggggttcgtgaggtgcatgatgttcagcgcctcgagctgaggatacagcggcacgaacaacgcgggcacgatggcgaagtacttcgccaggtcgttcgctatggagaacgtggtcaggctgccgcgtgtcatgagaagctgcttgccgatgcgcacgacgtcgatgagcttcgtgggcgaagagtccaggtccaccatgttgccggcttccttggcagcctgggtaccgctgttcatggccacggccacgtcggcctgcgcaagcgcgggtgcgtcgttcgtgccgtcgcccgtcatggccaccatgtggccctcggcctggtactggcggatggcggccagcttcgtctcgggcgtggcctcggcgatgaagtcgtccacgccggcctcggctgcgatggcggcggccgtcatggggttgtcgcccgttatcatgacggtcttgatgcccatggtgcgcaggtccgcgaagttctccttgatgccctgcttcacgatgtccttcagatggataacgcccagaatacgatgattgcgagcaacgagcagcggagtgccgcctgcacgcgagacatccgcaacgactgcggcgcactcgccgctgtacgcgccgccgcgcgactccacataatccttgacggcatcggccgcccccttccgaatctcgtggccctcgaagtccacgccgctcatgcgcgtctgcgcggtgaacgggatgctgaccatgcccgagccttccagctcgcgggcgcggatgccgaagcgctccttcgccagcaccacgatgctgcggccctcgggcgtctcgtcggtgaggctggccagctgcgccgcgtcggccacgtcgtgctcggtggcgccgtcaaccggtatgaactcggcagcctgccggttgcccagcgtgatggtgcccgtcttgtccagcaaaagcacgtccacgtcacccgccgcctccacggcgcggccgctcatggccagcacgttcgcccggttcaggcggctcattccggcaatgccgatagccgacagaagcgcgccgatggtggtgggcgccaggcacacgaacagtgccacgagcgaggtgatggtggtgggattcgcgataccctcctggttcgcgctgaagccgctgaacgcgaacagcgacaccgacacgatcaggaacacgatggtcagcgccacgagcagtatctcgagcgcgatctcgttcggagtcttcttgcgggtagccgactccaccatggcgatcatctggtcgaggaagctgtggcccgcatcggccgtcacgcgcacgaccagccagtcggaaagcacggtggtgccacccgtcacggcggagcggtcgccgccggactcgcggataaccggagccgactcgccggtgatggcgctctcgtccaccgatgcggcgccgatgacgatctcgccatcagccgggatctgctcgccagccgccacgtagaagaggtccttcttcttcagaaccgccgagctcacctcgtcggcctgcaggcggaagaactccgccgggtcgtccacgtgatggcccttcgccaccaggccctcgttgagcttgtgcgcaggcacgtcgcgcttggcggcgcgcaacgagtcggcctgcgccttgccgcggccctcggcgagcgcctccgcgaagttcgcgaacagcaccgtgagccacagcaccgccgagatggcgatgatgaagccgggctgggagtccgtgatgccgaacagcgacagcacgaacagaacgagcgtcaggatggccgataggtacaccatgagcataacgggattcttcgcctgctcgcgaggggcaagcttcacgaaggagtcgcgcacggcgcgcttcgccaaatgggtcatttcattgttcctcatagttgccgttgacatttcttttttcgcccgccttccctagagcaccatatgaagctgctcggctatcgggcccagcgccagcgctgggaacatcgacagagcgccaaccagcagcacgacaaggatcagcaggaacacgaacatggcattgctcgtggagagcgtgcctgcactcaccgccaccttcggccgcgcgcacaagctgccagccagcacgagcgtggccgcaagcgggatgaagcggttcgccagcatttcgaaacccaacacgacgttgatcatcggggtgttagcgttgaagcctgcgaaagccgatccgttgttaccgcccgccgatgtggcggcataaagaacttcagagaatccatgggcacccgcgttgttcagactatccaccgtcgccggatcgaggcacatgaccgcagcgcctataagaagaaccataggcgtggtgatgcacaggatcgtggccatgcgcatttccttgggtccgatcttcttacccaagtactcgggcgtgcgacccaccatcaaccccgcgatgaacacggtaaggatgacgaaacctatcatgccgtacaagccgcagccgataccgccgccgatgatctcgcccaatcccatgagaatgatgggtaccatgccgccgatgggcgtgtagctgtcatgcatggagttgaccgcgccgttcgatgcggctgtggtgaatgcggcccagagagaggagtcggtcacgccgaaacgtgcctccttgccctccatgttaccgccggactggtcgtacgtgcccatgtacaccgagccgtcggccgcaagctgcggcgttccgacctgttcgaagaaggctatcactgccaagctcgccaccagcaccacgaacatggccgcgaagatagcccggccctgtcgccgatcggccacgaagcgaccgaagctgaacacgagcgcgaacgggatgagcagcagcgagatacactgcaccaggttcgtgagcggcgtggagttttccagggcgctcgccgagttcacgccattatagcctccgccgttcgttccgagctgcttgatggcaacctggctggcctgcggccccatgggcaccacgccctcatcgatcacctgcacggctgccggatcgtcggcttctaccacattgccctctgcatcgataccgaccggttccagcagctgtacttcctgatattcggatacgttctgcggcgagccctgccacacgtccaccacggtcacgacgagcgcgagcgggatgagcacgaaaagcacggagcgcgtcacgtcgacgaagaagttgcccaggccaggggcgccttcgctcaccaacccgcggaacagcgcgaacagcacggccatgcccacggccggtgtgacgaagttctgcacggtcaggccgatggcctgggagaagtagctgagcgcgctctcgccgctataggcctgccagttcgtgttcgtcacgaagctgaccgccgtgttgaacgcgaggtcccacgtgaggccggggagcccctcgggattgcccggcagcacgccctgcaacatgaggatggcgaacaaccctgccagcgagagcgccgagaacgccagcgcgcttatcaggtagcgtttccagcccatgacgtcggcacggtcgacgcggatgcaccggtacaccacgttctccaccggcacgagcacacgcgagagcacggccaccctctcgccggccatgaccttgttgatatagcccgacagcgggatggcgagcgccacgagcagggcaaggtagatgccgtattccagcaactcgtccatcaccgctcgtcaccccctcgaagcagaacgtagaacaggtagaacgccacgatgacgctcaaccctccaacgacggcggttacgtagtccatcgtcttccttccttgtttccaggccgccgcagcggcacctttgcaaactaggaaaacgataaggttgcgcggattagcgcgccgttaaggagcgagggcgggtgttaagaaggcgttaaggcagggcgcgcagatgggatgaaaaaagcgcccggaggcgcttcatctggaaaactggcggaggaggagggattcgaaccctcgttacccgggttacgggtaaaacggttttcgagaccgccgcattcaaccactctgccacccctccgcgtggggtgcggggctaggccccatatggaacgcgcctcgcaggcgcgggtgtaagctggcggagagatagggattcgaaccctaggtactcttttggagcacacacgatttccaatcgtgcaccttcggcctctcggtcatctctccgctcgtccgaaacgtgcatgctcgcgctgggcgcggacgtgcagcagctacgtagtatacaacagctaataggcgctcacaagcgagaaataagcatcctcttcggcatttttcgcgacagagggaaccgccgtgcgcttcacgcgcagggggacgccgaacagcgcgctcatagtgtcgtctgagagcagccgctccttcgggccgtcggcgaacacggcaccgtccttcacgaggacgaggcggacgatctcggggatgacgtcctcgggatagtgcgtcaccagcacgatggacttccccgcctgggccagcgcgcgcatgctgcggcgcacgtagaacatgccctcgggatcgaggccggtgcagggctcgtcgaacacgagggcctcgggatcgtgcacgagcgcacgggcgatgagagcgcggcgcgcctggccggtagagagcgtcatggcgtcgcgggcggcgaggtcggcgacgccgagcagccccatggtggcgagcgcccggtcgcgggcgccatcggcatcggcggcggcaacggcctgcgggatgccgagggcgccgaacaggccgccggccacgatgtccacgaccggcaggtgcaccgtcatctgctcctgcatggtagacgacaccacgcccaggctgcgcttgacttcggcgagcgttgcgcgatcacggcccttgaagagcacggggggctcgtcgcggtgcagcggcagcatctcgcgcgtgacgagcttcacgaacgtcgacttgcccgaaccgttcggcccgagcagggcgatgttctcgccgcacgcaagctcgaacgcgtcgaccgtcaggatggcgcgtccggctcggcgcaccacagcgttgcgcagctggaggaagggaggcgggttgaggctcatgttcgtttaatcgctcctgttcagtggaagtgtttcacgtgaaacacttccgaagtggccgggcgcggttgtgcggcaacgcaatcggaggggcgcttgaagcggaaaggccgcggataccccaagaggaagacaaaagcaggaaagagaaacggcggacaccccgcaggatgcccgccgttcgtaatcgtctgcgcatctgcaccgtgcggtcgtaccgctaagccgcctcggcaggctgctggttcgcgctgtcgccgccttctgcaggctggtcgccggccgcgttgtcggcagagccgtcggcgctacccgtcgcatcgcccccatccgcagcatcggccgcgccgccgttgtcggcggagccgtccgccgtgccctcggcactgccgtcggcattctcgccggcagcgttctgctcggcgcccgtcgacccctcggccggcgtgtacttcgacatgtcgacggcgtagggcaggccctccggcatcgggttgatctggatgtcggcgttctccttgtactcgttgaaccactcctgaaccgccgtgctctggttctgctgcttgagggattccttcacgctgtccaagaactcgacgggaatctggtcgaggctcgtgagctcgacggtctcggtgccatcctcgccgactaccttcggcgcgttgaacacgtcggtgcacttgatgatatggatgccgtactggctcgtgaccaagccgctgacctgatccttctcaaggccgcccagcgcgtcggtgtactcggtcacgaagctgttcagcttgtcccagcccacgtcgccgcccttcgccgcgctgccgccggtaccttccgcgttgtccttggagtactgcttggcagcctcggcgaagtccagctggccgctgttgatctggtcgagcacgctttgggccgtggcctcgtcgccgctgtcgaacaggatgtgcgaggagcgcttcgctccgtcgtaggcggaggcgtacatctgcgcgtacttcagcaggtcctcttggctgggctcctcatcggaggcgaacgactcggtcagcttcttctgcaagagctggctctcaacgttctcgcggtacttctcctcggtgaagccggcctgctcgagggcggccttccacttctcgtcgtcctcgtagttcgacttcgtcttgctcacgatgtcgtcgatctcggagctctcgacgctgatgttcttctccttagcgccctgcttgatgagctcctgctgagcgaacgaatcgatcatctcctcgcggacggactcgggcgtcatggcgttgtcagcaagccactggccccaggtgtcggtatcggtcatgctcatttgggagcggatgctctcgaccatgcccgtgacttcgtcctcgggaatctccgtgccgttgaccgtggccgccacgccgccggtagcggaggcaccgcccgcacaggccgccaggctccatacgcacgtggctgccaacccggcaacgcacacggccttcatgatgttagcagtcttcatagaacccttccctcgaacatgccggctgccgcagctgccgtgcatgatgtaagttactgatcggtattttcgcacacgcggcaattgcccccttagcgatgcacaatatgcccactttcgcttcacgaagcgtggacggggccttatgcgaagaggcaccccctacgccaacgtggaggtgcctcttgtcgaagcgcatgcgaacctgcagaaacctgctagttcttgttggccttcttgcgctcgatggagctcaggatgcgcttgcgcaggcggatgctcttcggcgtgacctccaccagttcgtcatcctcgatgtactccagcgcctcctccagggtgaacgtctgcggcggcgtgagctggatggccttgtcggcgccgctcgagcgctggttgcccagctgcttcgacttcgcgatgttgacgaccatgtcgccttccttcgcgctctcgcccacgatcatgccctcgtagcaatcctcgctcgggcccacgaacagcttgccgcgctcctgcagcgtgtcgagcgcgtaggccaccgacttctcggtggacatactgatcatggagccgttcttgcggccgttgaaatcgccgcggtaggcgccgtactcgctgaagtggtggaacatggttgcctcgccgcgcgtgacgttcaaaaggcgggtgcgcaggcccatggtgccgcgcgtggggatcttgaacacgaggtgcgtctgatcgccgcgctggaacatgtcggccatctcgccgccggcgctgccgaacacctcgatggccttgcccgcgtactcgctgggcacgtcgaccgtggcctcctcgatgggctcgagcttgcggccctgctcgtccttcttgatgagcacgcgcgggcggcccacctggaactcgaagccctcgcggcgcatggtctccatgagcacggacaggtgcagcacgccgcggccggccacctccacgccggacttgtcctccagctcctcgatgcgcatggagatgttgctctccgcctcgcgcatgaggcgctccttcagctggcgcgcgcccacgatgtctccctcgcggccgatgagcgggctggtggacgcctcgaacacgacggccatcgtgggctcctcgacctcgatggggtcgaggcgcaccgggttctcgcggctcgtgaccatgtcgccgatgtcggcgtcctccacgcccaccacggccacgatgtcacccgcatgcacttcctgctgcttcttcttgcccagctcctcgaacgtgaacacgtccttgatgacggtgttgtagcgcgtgttgtcgttcttgatgaccagcgcctgctcgttcttgtggatagtgccgctgaacaggcggcccacgccgatgcggccgacgaagctcgagtggtcgaccgtgcagatctgcagcgccaccgggccgttcggctcgcagtcgggtgccgggatctccttcaggatggtctccagcaagggcagcatgtccatgttgtcgtcgtcgggggcgaagcgcgcgtagccgttcacggcgctggcgtagatgatggggaagtcgagctgctcgtcggacgcctcgagctccaccatgaggtcgaacacctcgtccaccacttcctcggggcgggcgccggggcggtcgatcttgttcaccacgagcacgatgcgcaggccgagcgacagcgcgtgcttcagcacgaaccgcgtctggggcatgggaccctcgaacgcgtccacgatgagcagggcgccgtcggccatgttgagcacgcgctccacctcgccgccgaagtcggcgtggcccggcgtgtcgatgacgttgatcttcacgccgttgtaggtgacggagatgttcttcgacaggatggtgatgccgcgctcgcgctcctggtcgttgctgtcgagcacgcgctcgtccacctgctggttctcgcggaacacgccgctcgtgtacagcagccggtccacgagcgtggtcttgccgtggtcgacgtgggcgatgatggcgatgttgcggaggttctcttgtttcacgctgttccttcttctctcggtatcgattgcgcggcgcggggccgcgatggttcccttgctggtgcgccgtgcgacgacgtatcgacgcagggcaggcaggcggcggagctactccaagtcctcaagctcgctttccagtcggcgctgctctgccttgagctcgtcgatgtgctcgttgagcgtgccgatggtgcgctgggcgccgacagcctggatgattccccacaccacggccgtcacgcctgccgtggccaagatgagcagcggccccggtttgcggaagaggatggccaccaccgcaccgatccccgccatgaccagcccgttgcggcgctcgtcgtacacgacgtcgcgctggtgcaccaactgcgtgcgggctgcagcgatgccggcgaggcgcgcctcggcctggccgcccggcccataggcgcgcgttgcggaggcagcgcgaccagccttcgttcgcgagcctttcccgctggtcaggtactcgtatgcctcttggaggttcttgaactgctcggtggcgcggtcctggagcttcttgttcgtggcgaagcggtcgggatgcaggatctgcgccgtctccttgtatgccgtcttgatgtcggcgagggtggcatcctcgtcgagtcccaagatgcgcagtgcttccgtccggttcataactccccgcagaatcgtggtggcgcgctgctcgcgcgttcgtttgccgaagaagtatagtaccacgtcggcatgagaagccggagtgcgacaaggggcgtcacagaatgcacgcgcggcgaaggtttgcggcagggtcaagccagccgaccggctcgcgccaggccgcgcgctgcaacggcggcaagcggaacgaacaacacgatcgttcccagcagcacggccaggtcggcggggctgcccgtcacataggtttccaccagcaggccgctcgtcgcgaacgacgacagctcagacagggcattgaacgccgcatgcgcgcctacggccaaccacaggtttcccgactgcgcgtacacgcccgccatgatgacgccgaacaaggccgcctgcaccggtttgcccgcaagctggacgagggagacggcatcggccggcggagcggcggttcccgaaacatgcaggatgccgaaaatcacagccgatgccgctgctgcgacgagcagcgggcgacgggttcccgtcccttccagcacctccgcgaagctgcagaacaggacgccacggaacaacgcttcctcgaatacaccggtgagcaggcaaaggatcaggaacaaggcgatatccgcagaaccgggaggctttatcccgacccccgcccctgcaaggccgaccgtcgcaagccccgccgcaaggccgatggccagcacaccggcgcacatgaggaaggcgccgcgagcgtttctcggtacgggatgcctgcttttcaaggccgccggttcgaacagcgcgagcaccacgaggacggcggctccggctgcggccgtctgcacgacaacggcgcccagcgagccgccgggcacgacgttcaggcacgcgacggccaacgcacaggagatgacgatgtacgcaagaagatggcggcgacgtaaggcgggcagattcatgggatgcagtataatcgatgccctgcaccagcaggtgcgcgaaacagccgcggagacggaggcgaaccgatggcaggcagcgaacgaggggcagcatgtgccggaaccggcgggttgtcgtcgttcgcgctcaaggcggttgccatcgtcgacatgaccgcgaaccatgcaggctatctcttcgccaacgagcttcctttctgggcgtcgtgcgtactcatcggattgggtggcctcacgtttcccgtcatggccttcctgctggtcgagggataccgccgcacgtccaacgtcaagcggtacgcgttccggctcggggcgttcgcattggtatcccagatcccctacggcctgttcctcgatgacaacggcaacgtgctgttcacgctgctcataggcctgggcgtgctgtacgccgacgagcatgtgcgcagccgtggtgcgttctgggcaatagccgcagcaggggcgctggccagcctggcctgcgactggggctttatcggcgtggtcatgatcgtgctgttcaagaagctgggcgccggcccgtgtccaaagggcggtgcacagccggcagaggctcccacatcgaaggcctcgcctgcaggcgctgcgacggacaatgccgagaaggcgtccgccgccgtctcggctgccggacccggcaccccgcttgccgctgcgcccgacgcgagtgcaagctcctccccggtcgcccacggcgccgacgacgccgtgcccgccctgctgcgcactccgctcggcgccgtggccgccccggtcctgctggttgccatcgccgacggccttcccctgctcggagagctcgcgagctccgttaccgggagcggagactggtcgttgctccccttcgtcctctacccgctcgtaggctgccccgcaaccatcccgctgctctacgcttatcgcggccgccgcgggcttcccatgaaatggttcttctacgcctactacccggtccatattgctgtgctgggcgtagtgcacctgctgctgttcggttgaggaaaaaagaaacggcctcgcggccgttggatgatatggtggagcatagggggatcgaacccctgacctacggcttgcaaagccgtcgctctcccagctgagctaatgccccgttctgtttcgtctcgcgcctgccgccttggaacgagcctcggcgaagggaaacggcactttcttcggaaaataataaacgctccaccggctaactcggctcacggtggagcgtttatcgcaaaaaatggtgggcccgaatggatttgaaccagcgacctcacgcttatcaggcgtgcgctctaaccaactgagctacgggcccgtaaaaaagtgcctggatactgtaacccagaatcaactgtttggtcaagcgattttcaaaaggaatttcaaaaggtttccctgacgacgctttcgagcatccttcccgcaaagccgagaggagcgacggtctgtcgcgccgtccgccctgcactgactatcgaaacatcgcgatcgacacggggaccgacgacggctcgcggacagtttgccacaggcccgtcacacgagaaaaacgccttcctcgcgaaccgtcccggcctcaagggagcggtataatcgggatcaagcgacgtaccggcgaacccgaggcaacgaggagctgcgatgaaacccgtcaacgtgcaaaccctgatcgtgtcggccgcgccggcgccctccattctcgtattgcagccgatagaggaaccgtcgcagcccggaaagtaccgcatcgtgcccatctgggttggcatgaacgaggccactcaactggggatagcccttgagaaggcccgtttgacgcggcctatgacgcacgacctgttcctcgatgcgctcacgaacctcgatgcgcgcgtagaccacgtggtcatcaacgacgtgaagggcgccatgttcttcgcacgcctcacgctcaaacagcacgaccgcctgatcgacctggatgcgcgcccgtccgatgccatcgccctcgcgctgcgccagcaggctcccatcttcatcgaggaggacgtgctcgagcgggcgtcgttcccctatgtgttcaagaacgcgccggacgcggaagacgagctcgccgatttccgcacgttcctggaagagctggccccggaggacttcgaaggataaacccagcacctgcctgcctaactgctgccctgaaggggcgagcggcggcagttcggcggtaggcggggcccgagaaagccccgcctaccagaacgacgaggcgatgtcgtcgagaacggacgccgtgttgctgccgtcgaacgctgtggtcaccacgaacgagggggcgttcacccccacgatctcgccctgcttcacccgtgtcggcgcaaaagggccgaatgtcggctcggtcggcggcagttcaggcttctccagggccgcagacgcacgcgcgccgccctcatcgatgccggtcgacgccggatgtccccgacgcgagcccgcatgctccctttcgctcccttgggcggagccgggcacccgccgcttccagcctccacgcgcgaacgtgacgatgaggaagccggcgcgcagccattcgtcgatgcacatcgctatccacatgcccacgaggccccagccccagcagatacccaacagccagccgccgcccaccgcgaacacccacgagaacgccacgttcaccgtcaccggcgtgcgcacgtcgccgagcgcgatgagggcgcgcaccatcacaatgttcaggctgcggcctattcccaagaacacctccaccagcatgatctgccggcccagctcgtgcacgaccgggtcggcggtgagcagacccaccacggcgtcgaagttccaccacagcgtgagcgacacggccgtggtgagcacggccgctatgaggtcggccatccacacgcgccggcgcacgatgtcgaacttgccggcgccgaacaggtagcccagcacgatctgcgtcgcctgcgaaagcgcgatggaatacagataggcaatgctcgccagcatggagcagtacaccttcaccgtgaccaccgtcgtacccagcacgttgatgaacgacaggatgacgatctgcgccaggtcgtagttcatctgctcgcccgacgagggaatgcccacgcccagcatgttcttgagcgtctttttcgggaacggacgcagcagccgcggcgacgggcgcacgtcggtgtggcgcagcagcaggaacgccgccaaccccaggcccacgacgcgtgccgccacgttggcggctgcggtgccctccacgccgagcgccggcacgccgcccaggccgttcaccagcacgatacccacgccgacgttcaccgcgttcatggccaggctggcgcccatgacgtcgcccacgcgcgcgaagctgcgcagaagagccgtgatggcgaagaacgcaccttgcaagatggtggtggagcccacgataagcaggaacgaggagcccatgccccacagcgtggcgtcgatgtgcagccacccgaagaactgcggccagaacgtgaacagcaccgccgtcatgagcgcgcccagggccatgttcaccacgagcgcaacggtggcgatctccgatatcgtgcgcttggacgaggcgttccccagcacgcgcgtgaccagcacggtggacgccgttcccatggctgacaacgcgatggtgatgatgttgagtatctgcagcgcgttgcccacggcggcggccgggtcggtgccgtgcggggccagcatcatctggttcacgttgcctaccatgatctgcatgaacagctcgatgaacagcggtacggacagcacgaacacgtcggccgacgaggtcttctcggccggcgcccggccggcgcgggccctccgcgcctctccggcgcggcgccgtgcgccctgcgcgtgcccccaggctccctgtgcgcacccgcgcgccccctgggccaatgcggttatggacatgggcttctccgccccctttcatcacgttgcgccgccccttcggcggacgcgcttgcgatcacgaggcgtgcagtatacggcacgtcaacatccgcgttacggacgggcgtcccatccacgaagtccgcattcatgagtacgaacgttcgctaattcacgaagctagaaaatttatttgttgattgaattaataaccaaatgtttcacgtgaaacatttcgccagaagacgaaagtgaggcggggaacgagaaatcgagactggatcagcgaggagcctctcaagcgaaaagaggatcgaggaaacgagcgaagaaacaaaacagatgaaaatatgggtcgcgagctagattatgaacagatagcgaatactcgaaaattgaatcgcgttattaggaggacgaaccgataaaaggaatgaaaaaacgatttggaagggagaggatggccaagggaaagaggaacgggagcgacagcgtaatcgagcaacggaggaaactgtcgggcaagtacgactgacgggccctttcgggcccgtcagtcgggtcggcgcctgcaagcgcggagagcgcggctgcagatcgccggaagctcgatcgttcggctttaagcctcgtcgatctcgttctcggcgaggtcgccttcctcggactcctcttccagaaggtcgatctgcgactcgtcctcggctccgggcttctcgccggcggggcgcttcttcttggcgcggctcgagatggccacagccgtcacacggtcgccgtcgcccaccttcatcacgcagacgccctgcgtggagcggccgagctcggagatgccggacaccggggtgcgcacgaccacgccctcctcggacatgatcatgatctcctcgtcgggcgccacgatcttcatggcggccaagaggcccttcttctccgtcatggtgatggtgaacacgccctggccgccgcgatggtggtcggggtagtcgctcacgggggtgcgcttgccgaagcccttctcggtgatgacgaacagctcggtcccgggcttggcaatctccatgcccagcacccgcgcgataggcggcacgttcatgccgcgcacgcccatggtgtcgcggcccatgccgcgcacctcgccctcgtcccacttgatggccttgccggcgctcgacaccatgatgaccttctcgccgggcgcgacgcgcttcaccgagatgagctcgtcgttgtccttcaggttgatggcgatgaggccgtcgcggcgcgtgcggtcgtacagctccatggacgtcttcttcaccatgccgtgcgacgtggcgaacatgaggaactcgtcagccgggaagtccttcgtggcaatgacggcggagatggtctcccccttcgccagcggcaacaggttcacgatggccgtgccgcgtgcgtggcgcgacgcctcgggaagctcgtacaccttcaggcggtacaccttgccggccgtggagaagaacagcatgtacgcgtgcgtcgacgccacgaacaggtgctccacgtagtcgttgtccttcaggttcacgccctgcatgcccttgccgccgcgcttctgctgacggtaggtggccacgggcaggcgcttcacgtagccggccttcgtcaccgtcaccaccatgttctcgtcggcgatgaggtcctccacgtcgatgtccttggcgtcggccgagagaagcgtcttgcgcggcgtgccgaacttcttcttgatctcctgcagctcgtccttgatgatctcgcgcacgagcgtcatgtcgcccaggacgcgcttgtagtagtcgatcttctcgcgcagggcggccagctcgtcctcgatcttgccgcgctccaagccggtcaggcggcgcagcttcatctccaagatggcgtcggtctgcttcttcgacagcccgaagcgctcggtgaggcgagaggccgcctcggcgtcggtctgcgaggagcggatgatggtgatgacctcgtcgatattgtcgagcgcgaccaccaagccttcgaggatgtgcgcgcgttcctcggccttcgccagctcgtagcgcgtccggcgcacgatgacgtcttcctggtgcgcgatgtagtagtgcagcatctccttgagcgagagcacgcgcggcacgccgtccacgagcgacagcatgatggcgccgaagcccacctgcagctgcgtgtgcttgtacagcttgttgagcaccacctgcggaatggcgttctgcttgaggtcgatgatgatgtcgatgccgtggcggtcggcgccgtcgtggatgttcgagatctcgggcagcttcttgtcgcgcacgagctcgcccagcttctccagcaggcgctggcggttcaccatgtaggggatttccttcacgatgatggagctgcggccgttcttcttctcctcaacctcgcagcgggcgcgcacggtgagcgagccgcggcccgtctcgtaggcgtcgatgatgcccttcttgcccatgatgatgccgcccgtggggaagtcggggccggggagcgccttcatgagctcctcggtggtgacatcggggttgtcgagcatgaggcacgtggcgtcgatggtctcccgcaggttgtgcggcgggatgttcgtggccatgcccacggcgatgccctgcgagccgttcaccagcaggttcgggaagcgggccggcagcacgacgggctcttccaggctctcgtcgtagttcggctggaagtcgaccgtctccttgtccaggtcagagagcagttccatggccgccttgtcgaggcgcgcctcggtgtagcgcatggccgccgcgccgtcgccgtcgatggagccgaagttgccatggccgtcgatcagaggcacgcgcatggagaacggctgggccaggcgcaccatggtgtcgtacaccgccgagtcgccgtgcgggtggtacttgccgataacgtcgcccacggtacgggccgacttcatgtgcgggcgcgagggcgtgtagccgctctcgttcatggcgtagaggatgcggcggtgcaccggcttcaggccgtcgcgcacgtccggcagggcgcgggccacgatgacgctcatggaatactccaggaacgatgtctgcatctccttgcccaggtacgccgtgcgcacgatggtgccgttgccgccgttggctccctccacgatctcgccatgggcgctcggcaggtcatccttgatgagcgccttggcgcgcatctcgtcggagatcaccgagccggggccgcgcggggcatcgtcatcggcctcggcgtcctccgcgtcggcgagggcgccttccaggtcgtcctcttccccgccgccgttcgccgcgtcgaagtcctcctcggcgcggttgaggaactcgtcgaaagaatcgttgttgtctgccacttagattctccttaaatgtccaggaaccggacgtcgcgggcgtgcttctggatgaactccttgcgaggctccacctggtcgcccatgagctcgctcaccacgcgctcggcctcggccgcatcgtcgatgttcacctgcagaagcgtgcgcgtctcgggctccatcgtggtctcccacagctggtcggggtccatctcgccaaggcccttgtagcgctggacgtcgaacttgtccgggttgtcgtactcggcgagcaccgatccgagcgcgctctcgtcgtagatgtagcgctcgatcttggggctgcgcgagttcttcttcttcaggccaaagatgggcggctgagcgatgtagatgtagccgcggttgatgagctccggcatgtagcggtagaagaacgtgagcagaaggcagcggatatgcgcgccgtcgacgtcggcatcggtcatgatgatgatgcggtggtaacgcgcctggtcggcgtcgaagtcgtcgccgatgttcgtgccgatggccgtgatgagcgagctgatggtgtcgctggagagcgagcggtgcaggccggcgcgctccacgttcaagatcttgccacgcaggggcaggatggcctgcgtcttgcggtcgcgggcctgcttggccgagccgcctgcggagtcgccctctacgatgaatatctcggaatcggccggggtcttggacgagcagtcggccagcttgcccggcagcgcgaacgagtcgagcacgcccttgcggcgcgtcatctcgcgggccttgcgggcggcttcgcgggccttgagcgcctgcgtggccttgtcgatgatgcgcttggccggcttcgggttctcctcaaggtactcggcaagcccctgggtcaccgcgttctgcacgagcgggcggatctcggtgttgccgagcttcgtcttcgtctggccctcgaactgcgggtcgtgcagcttcaccgagatgatggccgcgcaaccctcgcgcgtgtcgtcgccggagaggttcgagtctttctccttgaggatgcccttcgcgcgtgcgtactcgttgatggtgcgcgtgacggcctgcttgaagccgtcgaggtgcgtgccgccctcgtgcgtgttgatgttgttagcgaaggccatgacggagttcgtggaataggaagacgaccactgcatggccacctccaccgtgccgtcgtcgttctcggcctcgaagtagatgggcttgttcagcgtctccttgccctcgttcaggaacttcacgaagtccacgatgccgccggcgtactggaacacctcggtgcgcggctcgggcgcgaggtcggacagcgtgctgccggggttcgcgcgctcgtcgtgcaggatgatcttcaggcccttgttcaagaacgccatctcgcggaagcggctggccagcgtgtcgtagtcgtacaccgtggtgtcggtgaagatggtggggtcgggccagaacgtcaccgtagtgccgttgccgcggcgcaccttgcccacctcgcgcagcttctcggccgtcttgccgtggtcgaaggagatgtcgtactgcacgccctccttgaacacgctcacctccacgcgcgaggacagcgcgttcaccaccgacacgcccacgccgtgcaggccgccggacaccttgtagccctcgccgccgaacttgccgccggcatgcaggatggtgaggacgacctccaccgtggggattttctccttggggtgcttgtccacggggatgccgcgcccgttgtcgtcgaccgtgatggagttgtcggggtggatccacacctcgatggtgtcgcagtagccggcgagcgcctcgtcgactgcgttgtccacgacctcgtacaccaggtgatgcaggccgcgtgggcccgtcgagccgatgtacatgcccggacgcttgcggaccgcctccaggccctcgaggacctggatgtcggaaccgtcgtaatggtcaggtttgtttgccactgacatgctcctttttcagtgcgttttttcgtgaggacgcgccgcggtcccgcgcgggacgggcacgggcggcgcagccgtcgcgggccgcctcggccaaggtcgcttagcgacggccggatggcgggacggcaactggaaaattgtaccataaccacggtacggcaccaacaatttaaacggcttttaaaggctttgagaagccgtatgaggggagattggacgaatgtgtagtaattttgtcgaaacggtcgttcagaaccttgtaggagcaggcttcgcatcccctgggacggggttggccgcaaaaggcctctaacggcgcggcgcagagggacgccctcccttggcgctcccgccggacgcccccgggcccccgcccaccgtcggcgacccgggggcggacgcggcggcgtccgccgcgtccccatcgctgcgcgcggcgctcgccagcagggctcggtagagggcacggcgcacggttgggtcctccacctggtcggcgctctgatgcacggcggccagctggccctccgtcaacgcgcggaccgtgcgcaccgggcgcacgaaggaacgggcgggcgcgccggggcgggcggcctcctcgcggaagggatggcggttcttcatgtcgcgggtggagggcagtatccgcagcgcttccacgtcctcgccctgctccttgaacttcatcttcagcagctcctggcggttgtccagctcggagcgcaccatgctgtcgtcgcagtacacggccagcaccttgcccgccacgaacccttgggtctcgctgcgcggccggtcgaagcgccgcaggttgcccccctgctcgcccgacatcacgtacacgctgttcgtatggtcgagcacgagatccgccgaatcaccgccgaaaacggctccgacggcattcctccacagatcgttcacctccgcgaagcgcagcgcctcggcgccgccggggttcttctcctccaatatggccttcaaccggtcaaggtccgccttgagcttcctcatcgcccaccctcccccgttgacgggccggccgccgcagggccgctcccagcgtgtcgtcgagccgcgctgcgctcgtccgcggcatccgcaccagccgcgcccgatgcgcgctcctcatccggctccgccgcgccttccagcggcagttccaccacgcgggcacgggagagcaggtcctcgtcgaagtaggcgaggttcgcggtggtgatgaacgtctggatgtctccctcgatgaacgacacgagcgcgttgcgacggccctcgtcgagctcgctcatgacgtcgtccagcagcagcaccggcttctggcccagcatctcctggataagcgcggcttcggccagcttgaatgccagcacgacggagcgctgctggccctggctaccgtagagcgccacgttgcgcccggcgatgaagaactccacgtggtccgcatgcgggcccacgatcgcccgccggcgcgcacgttcctcgtcgcgtcggcgggcgatctcggcctgaagccgcttgcgcgcctcgtcgcgtccgaaggcgaacgtggccggaagatcagggtcgtggggttcccacgacggcacgtagcccatcatcagcgcctcgcgcccgccggcgatagcggcgtagtaatcggccacgcgaggcgccagcttctccacgagcgcggagcggtagcatgccagttgcgctccgcacgtcacgagcgtctcgtcgatgctcgccacgagctcgggaagcgcatcgtctttcaacaggcggttcttgtagcgcaccaccttctcgtagtccttctttatgacgtagtggttcgccgagagctgcgagcccagcgcgtcgagcgcagcgcgcttgaccgcaggcgcccccttcgccagctccagatcgtcgggtgcgaacgtcacggagggcacaagccccttgagatcggctgttcgcttgcccttcccgttcagaagatagcgcttcttcccctcgctcacttggagcgacagcgcgagctcgcggctgccgtcggtcacgtccgcgtcaaggcgcgcgaaatcggcgccctggcgcactatctgctcgagggaggggcggcgaaacgactgcagcgccgtgaggagctggacgccctccaccacattcgtctttcccacggcattcgggcccacgagcaccgtcagcggccccaaggctgacaattcgaaggtctcgtagttcctgaagttgcgaaacgctatgcgttcgatacgcaggtgcatgggatgcagagggcgcggatgcgcctaggcgatgcgtaccggcatgacgaggtacaggaagttctccggctcggctgccttgaagatgcccggcttgagcgacgactgtacctccaggaacacctcgtcggtccccacggcggcaaggccgtcgagcaggtaggcgtagttgaaggctatctccacgtcctcgccctctccggagcacgcgatggtctcctgcgccgagcccacgtcctgggccacggacgacagctgcgtggtctgcgaggcgatgttgatgtcgaagcgcacgggcgaggaggactggccgagcagcgacgcgcgtttcacgcccgccacgaggtgttccacgggcatgctcacgcgggtagtgtgggaatcgggcagcagctggcggtagttcgggaagtttccctctatgcggcggttcacgaacaccgtgtcctggtaggtcacgacgatttggttctcggccagcgcgaacgaaacgggtccgtcggtcttcggcagcgcggcgatatcctgcaggaatgtgcctgcgatgacggcctgaaactcctcgcccgcgtactcgggcagctcggcctcggtgatggccaggcggtacgagtcggtggccaccatcttcaggcgcccgtcttcgatggtgataagcacaccggtgaggatggcccggctctcgtccttggaaaccacccgggccacgcggcgaaccatggacgagaactgggcgaacgggatatccacgcgctgggtcacgtcgacatgcggaaatccggggaagtcgtcgggattgagcgccttgatggagaaagaggccgtgtcgcaggtgatgacggcgttctcctcgtcggcctccacgtgcacggccgcatcgggaaggttcttcacgatgtcggcgaacagcttgccgggcacgacggcgcggccgggctgctccacgagggcggcaaccgtgtactgcacggacagctcgaggtccgtggtttgcagcgtgagggagtcgttgtccgcctcgaggaacacgccggagaggatgggaagcgtcgatcgcgtggccacgcccttgagcaccacgctcaaggcgttctgaagttccgattggttgatgctaaatttcaaggcgttccctttctctcacctatgcgcgcgcgcagttccacccagtatggcaaacatcacgtcatgttacgctgccattataaattctcccggttattttgcctcacggttttgtccggctgcggcgagcacgccgcgattcttttctctaaaggtcttcctttaatttatctgagtttttaataatgataataataaggacggtggatttgtggataacttgcatcatccctcttcaacatcactttttattgctgtttccgacgtggagggcacgtaccctccctcaacatattttatcgctttcattatctttcccaagcgaaccggtggttttcaccaagttgccagtcatctttcagtcatgtttccgccgaacgatcgttcgctctatgccagtccgcggatcttgcggtgctcggaaaaacttccaatagcgaaggcttcacatgcaacgtcagctttgagcttgaatgccgtggacgagttgcctgtgtttcacgtgaaactgcacagcggtgccgtcgaacggaaatgcacgttcggtctaatcgagcgtgtttcacgtgaaacacaggaggtgcgatcaggcccgccacggcccgcccaataggatgtttcacgtgaaacatccggcggggtttacttctctccttgttttcccgtcatctgctgaagcttatatttcccggatgagctgcttcagggtttccaattcctcgcgcagctcgcggctttccttcatcttctcctccacgttcgtcaccgagtacatgacggtggagtggtcgcggttgaacttcttgccgatgtcgttgaacggcaggtcgagcatctgccgcgataggtagatggcgatctgccgcgcgtagatgatgttgcgcgtgcgcttctttcccaccaagtcagcgtggctcaccttatagaacgtctccacttccttctggatgtcggcgatggtcagccgcttcgacggtccgcctgagaagtggttctccaacaggctgcgcacatcgtccaggctcaggtcgggctggttgaagaacgtcatctggtagatcaccttcgtcacggcgctcttcaactcgcggatgttcgagctggagctctccgcgatatacatctgtatatcgtcggggatggagaagctggcttttccttcggtggctcggtactcgtccacgaaactcttcacgatgccgagcttcgtctctatctccggcggttgaatgtcgaacgtgccgccggagttgaagcggctcttgtagcgctcgtcgatgtcgatgttcttcggcgcgcggtcggccgagagcaccacctggcgtccttggccggtgagcttgttgaatatctggaacacgatatcaagtgtctgcttcttgccctgcaggtactgcacgtcgtcgatgagtagcacgtcggcttcctcgtagcgcgtcttgaagttcttgtagctggatttctccttgtcgtgcgcagcactggcttccatgtaatcagagagcagctcggctgagtccacgtagatggtagagaggttgggcatggtctcatgcacatagttctggatggcgcgcagcaagtgggtctttccgaggcccgacttgccatagatgaacaaggggttgaggtgcgccttgcccggcatctcggccacggccacggccatggagtaagccatgcggttggagtcgccgatgacaaagttctcgaatgtgagcgtggacgtgggcctatcgggtccgcccggctcatcttcgtcttggtagacgtcgcccagggcatcgtcgccgaccggctcgtaagcgtcggcgatctgggaggcgatgggcggttgttcggccgccgtctgctgggaggggggttgggaggtcgtaggcgaccctgccgtgtagccgccgacgcctgcaggtgctccttctgcagcagcggccggtgcccctgccggcgccatcgttgccgacgaagacgcggccggcgccgaggcaaccgtgccctgggccgctccggctgcctccgctgcgatatccacctcgatgagcacggtgaacgccgtgcggtacaaatccatgagcgcctgcttgatgaagtcgacgtagtgccgctcgatccatgtcttgataaagtcgttgtcggctgtgagcatgaggaaatcctcgctcatcgcctggggctgcagccgcgagaagaaggcattgatctgcgaagggtctatgttgttgtagcttttgacctgatcgcaaactgcgcgccagacctgctcgagcttttcgctttccatggttattcccctcttgaggaggttttacttacggttgaacggatgccgccctgttgcgtcctgcgacggcggatgcccgtcccttcgtggcgattatagcgaattcgccacgtggaagcccagatcggtcagaatgcgcttctgtccggcggtcttctctataaggccggcctcttccagcttcgagagggttacgtacgtgctcgactggggcactccggtgagccgggctaggtcggtgacgcccagtgcaccctcgctcaagaagatgggcaggaagtcgcgctcgcgctgcgatagcggcggaagcggcggcattgccggctgcggagcgtatcctctcccgctattggcaggtcttcgctggtcatagggtgattccggtacgtaggccgccggttcctcattgcttttcaggctgatggtgaccaccgcgccagtaccgaggttatcttcgatcgagatagtgccgtgcgagaagtccaggtactccttcacgatgggaaggcccgatccgacaccgcggatatagtgcttcatcggctcgatggccgatgtgaagccgggcagctgcgccttgtctttcatcatgatccctggaccctggtcggcgaacctgatggtgttcccctcgtcaaggatggagacgatgatctcggcgaaccgtgcatggatgaagttttccgacacctcgcggatgacggtatagggaatcgtgccgcccgccatcttcgcctgttcgtagattttcgaggcaaggtgctcgatgaagtccgccgtgggtgccggctggatctcggtgatacgcggcgcgctgcggagatcatcgtactgagctatgcgcgcaacggtctgcacataggtatagtcgaacgcaccggcgttgccatcagtgggttcattgccttggtttgaatgttcaatctggtcgttcaatggtattccgtttttcagattcgatattcaacatttttcaaagacattcaacggcattgtacctttttttcatgcgtgaatctattcacctgcggaattcatggattgaatttgctttcattcattatcgaatgaaaatgaaagcagtaacgaaaagggtttttcagagttatcaacattttattcagaaaaagtggaaaaccatgaacaagactgaatggagaattctggaaaacgttgaaaagcgcctgaattgttgaaattttcattgacttgcaagaggaaaaggtttccccagataggattcatctacccatgcaaatggtgtcgattcggtgtaaggaacattgcgatacggcaacctctgaaaataatttgtatggtggatcgatgagaaataccagatcaaaagcgtgttcattaagagtggaatccaaaatggctgatagggcctctgtaaattccttttaaacacacccttgacaaacggctgtcgttagagatttccacaaaggctgccgaatgaaatcgtagttttccccattttccacaatttatcgctcacttcgagcattaatcctgattggttatgttgggaaaaagccgtggcaggcgctctaccataggttttcccctcaagagagttatgaaaatggcatggaggtgaacaggtgttctttccttaagtggaaaacgtgtatgacgaatccccccgtttccttgtctccgaacgactcatccttcgatttattgccgctgcttcgaggaaaaacgcttgacggctcggcaacatgatatatactttggaagttgctcttgaaagtatcgaaagggaaatgaccatgaagcgcacgtatcaacctaacacgcgcaagcgcgccaagtgccacggcttccgtgcccgcatgtcgacgaagggtggccgcgccgtcctgtctgctcgtcgcgccaagggacgcaagcgcctctgcgtgtagccaggggttctgggttggagaccataaaatccaacgcggagatatcgtccctgtttacccacggcaagcgtttgcagacgccctacctcacgttcatcgtggtacgcaacgaaaagcagcacgacccatccggtcgtgctgcttttattgctgggaagaaactgggcaatgcagtgtggaggaacggcgccaaacggcgcatgagggcgatatgtcgcgaacttggcggcccttggaggggctacgatgtgattttcctcgcaaagtcgaacatcgtgcgggcgtcttatagtaaagtgctagcagcatgtgacgatacgttgaagcgagccggggtgcgatgaggttcacgcgatggggacgatctccgatttcataaaacacctgccctgcaagaccgcggtgtttatgatcacgttctaccgcgcagccatctctccgctttttccctcgtgctgccgtttcacgccaacttgctctgaatacgggatcatcgcgtttcggcgctacgggttctggaaggggctgaagctgacggtgaagcggattctacgatgccgtccgggaggccctcacggatacgatcccgtcccttgaccgggaggatcgtgcggcttctttggtatataggaaggaaaaagctacatgtgggacgcatttaaggatctgatattccagatcatccagttcttctataatttctgcggggactggggcctggcgattatcatcgtaacggtcatcttccgcgtgctgatctcgccgctcatgcacaagcagacgaagtcttctttccagatgcagaaggttcagcctctgatgaaggaaatccagacgaagtatgccgacgacccgcaacggcagcaggaggagatgcagaagctctatgccgaggtgaagttcaatcccctggcgggctgcctgcccatgctccttcagatgcctatcttcatggccctgttccaagtgctttccgagatgggggcccgtaccgagggctccacgtacgagttctataacctggtacccagccttgtcgagcggccttccgaggcgtttgcacagggttttggaacatttgttccctatttgatcctcatggtggtgttcgccggcgccacgttcctcccgatggttctgcagcagatgaacaacaaggacaacgcacagcgcaagcagatggtgatcatgtccgcggtcatgagcgtgttcatgctgtggatcagctggggctctccggctggtgttctgctgttctggggtgcttcctcgcttatcggcctcggccagcagcagatctccatgcgcatcatgaagaagcgcgacgcggaggctgccgagaccatcgaggtgaagccgatcgaggtcgacgtcacgcgcaaggttaagaagcctcgtccgacgaagaagcgctaggcttcgcaccgattgtttcacgtgaaacaatggggctcggaagatcggtttctccccgcctcatttggattgcctattgaaggagtctgccatggctgatgaaattgtcgaagagaagcagagcgctggggaaactgtggaggagccggttgatctgaccgacgaggagctcgatcgcattgccgacacggccattgcggcgctgcaggatatcctcaagtacttcaacgtcggcgaagtgacgatcgacgagtacgagggcgatgagggtgagcttattctcgatatcacaggtgacgatcttgcggtgcttatcggtcgccatggaaaaacgctcgacgccctgcaattcctggtatctgccatcacggtgcgcacgatagggtatcgctatccggtcgttgtcgatatcgagggttataaggggcgtcagcgtgaaaagctggaatccattgcccgttcatccgccaaccgtgcagccagccagaaccgtagcatcaagctccgtccaatgacgccttacgagcgacgtatcgttcatatcacgcttcgagacgatgatcgcgtggaaaccgcgtcagaaggtgaaggaagcgcccgacacgttgtgatcctccctcgttaattgaaagcctcccaatgggaggcttttttataggcgatgtttcacgtgaaacattctgcgtgatggtacacttgtggtgaaaactcgcctcgtatcgaaggattgcccatgcagcacgaagcactcatcgatctctatttggagaagattcttgaagcgaatgaaaaaacgaatctcacgcgcatctcttcgctcgaagaagcgcgcaaacttcatatagaagactcgctagccggactggaggagttgatgaaggctcctgaaggcttgtacggcgatcttgggagcggtggcggatttcctggtgttcctttggcacttgaatcagggaggaagaccattctcgtagattccgttcagaagaaaatggctatcgtcggtacagttctttcagagcttgggctagccgagcaggtgtcgacctatggtggccgtatcgaagatctggctctcgagcgccctcgcgcgttcgcagcgttgtccgcacgcgctctttcgaagctgtcggttctcatggaattggcaagcccgttgcttataagcggcgggctgctgatctgttataaagcaaacgtgcaagacgaagaatgggagcatgctctgtcgttgcaagagaaacttggtatgcgcctgtattctgatagaacgctcatgctaagcgatggtgaaacttctcgaaggatcataaccttcgagaaatcaggtcgctctaagttaaagcttccccgtcatgtcggttttgcccaaaagaagcctctttaaccaaagaatgtttcacgtgaaacattcgagtgttcgagcgacaacaagcgatgatgtttcacgtgaaacatcatcgcttgtttcgaacttctgaaagagggatagacgaaaggtcattccttcggagttcgacttctcggtgaatagtctcgcacactccttcgaaatggtcccaaatataagagtttgggaaacgtaattccttgattacttccatttccaagtaagtagttcgtatctcgtcgtattttcggtggacctcctcgtaatgttgggatccatcgagctctatgcttaaccttacttttctgcaatagaaatcgacgatgtaaggaccgacgataatttggttcgagaatcgaatgggatattcacggaggaagcgaaaccaaagtatcttttccgcttcggtcatattctttctcatgtatctggcccgttcagctaggcgggtacgcgcagcacggttcattggcaccttcttaggttgatcgacgttatcatccagatcataacgccgcaaccttgccggagaaccgtatttcaatcggctcccagttgcttggaccttgcaggaaaacaacatggcagccggctgaatcttgcacctatcagacagggttcttgcatggatcttgcaagaaccctgtcaatccgccgctatagtgtttcacgtgaaacacaaacaaggtatactagcttcaatgctcttgaaagggggccttttgtgggactgttcgatagtctgaaacgtgatagaaaagcagctgagactgtcaaatcaaatgaagaacccatcattatcgagaatacgacgtacgaggacgatatcgtcatagaggatatcgaggtagtcgaacgtgaagttgttcccgaggtggaaaaggatataccccttaaacctatcaagtctttcaaggacaaagcaccggtaaagcatgtggtgggccagacgaaggtcatggcgatcatcaaccagaaaggcggcgtcgggaaatcaacgaccgcgatcaacttatctgctgcgctcggtgaaatgggcaagcaagtgctcttggtagatctcgacccccagggcaactcttcgagcggactcggtatcgagaaaagccgtgtcgaacactgcgtttacgatgtgcttttgaatgatgtaccggtagagggcgttatcattcccgacgtatgcgaaggtttggacgttattcccgccactatcaacctggccggcgcggaagtcgagctggttgccgagatggctcgtgagaaccgcctgcgcgactcggttggctcgttgcgtggtaaatacgattatgttttcattgactgtcccccctcgcttggcttgcttaccgtaaatgccctcgtggccgctgacaagcttctcattcctatccaatgcgagttctatgcactggaaggtgtgacaaaactcctcgattcgatgaaacgtgtcaaaacacgccttaatccgtcattggatatcttcggtgtgttgttgacgatgtacgacggcagaaccacgctttcaaagcaggttgtcgaagaagtgcgcaattatttcggcaaaattgttttcgatacgctcattccgcgtaccgttaagctttccgaggctccaagcttcgggcaaccgataacacagtacgatccgtctggtaaaggcgcccaatcgtacgttgatcttgcaaaggaagtgataaaccgtggctaaatcgacgaaaagcggattgggacgcggtctgaactcgttgttgggcggctcttacgaagaagcggttcctccggagccggcaaaaccggcacctcgggttgttatcgaggcagaggagcttgacgagtcgatgaagcgcgcgtattcggctccggtatctgccgaggcgccggctcctccacttgtgccgcaggacaaaggcgtatctgcagataatttcatcaaggacgaggaccacgtgaccattaagagcgtggtgcagcgccgaaccgacgaagtgccgctcgaatcaatatcgccgaatcccgaccagccgcgaacgaacttcaagcaagaggaaatcgaggagcttgcgacctctatccaaaaagacggtctactgcaacctattctcgtaaggccggtcggttctcataagtaccagatcatcgctggagagcgtcgatggcaggcatgtcgttcgatcggcatgaaaaccgttcctatccgcatcaaggaagcggatgatgataaggcgctcgagctggctttggtggagaatatccagcgttcggacttgaatcccatcgaggaggcgtacggttaccgtcgaatgatggagcgacgcaacctcacgcagtcggaagtcgcccaggcaatgtcgaaaggacggtcgacggtcgccaatgcgctgcgtcttctggaattgccagaagaggcccagcaattgctgttcgaggagaagatcacggcaggtcatgcgcgtgcaatcctgtccatcccttcgaaggaaggaagactgaagctaacccagaagctggtggaagaaaagctttcggtcagggaaacggaggcaattgcacgcctgcttgccggcaagaagagcccagaatcggcccaaacgcgccaaccgacgccgaaatcatttaaaaccgtggcgaaagcgcttagggatgtcttgcacacgaacgtccgggtgaaaaccgtgcagggcaagaacaagatcgagatcgagttcaaggatgaagaggaattagagaagctgttcgaggaattgatagcatcgacttcgtaatgtttcacgtgaaacacttcagattagaaaaaagagcgcccttccgaggtgctctttttgtgcgatgagattggaatgtttcacgtgaaacacctagagatgtttcacagcattcttcagttggccgcatgcgccagcgatatcgcttccacgcgaatgccgtatggtcgtctctatgccgctcttattgagggacaggtaccattggttcattgtttggatcttgcttggggaaaactctgactcttcgatttcgttcaaaggaataaggttgacatggcagagcaatccctcgcaaaactctatgagtgctttcaggtcgttttcgttgtcgttaacgctgttcatcatggcatactcaagggtgatgcgcctattcgtacgctcgaggtatttgaggagcgccgttttaagcttgcctagctcatagtttgcaacgcccggcatgatcttgtcacgcgtacgctgaattgccgcatgaagcgacactgcaagggtaaactgttcgggttcggtgccgaggcggtcgataccagaaaggataccgcaggtggaaagcgtgatgtgtcgcgctccgatattgaggagtctctcgtcgttgagaatacgcagggcgcttagcgtctgctcgtaattgaggaagggctccccttgtcccatagccaccacattggatacacgttttcccatacgcgtctgcgcgatcaaaacctgctcgactatttctccagccgagagattgcgggtgaagccctctttgcccgtagcgcagaaggcacatcccatggcacaaccagcttgcgttgaacagcacacggtgagcctgccatcggatgaaggtatggcaactgtctctacccgtgccccgtcatggtaagaaattacatactttgttgttccatcttgcgaagtttgagaatccgcgacattggaaacgaaaaggggatagtcgatggaaagttgctcacgcaaagttcgaggaaggttcgtcatctcgtcatagctgctcgcattatgcaagtagagccattcgtaaagctgttttgcccgaaaagccggttgaccgagttccttcatcagctgttgaagttcttcgagcgaatatgttttgatgggttttatcatggccgcattatatctcatcatagttgtttgaaatgtttcacgtgaaacattgctatactcagcaagctattggttcttcaacgaaagaaggttcgtttcatggttgcatgcgttgacccccagcattgccatgttgcgctgctcgttggcggcatcagcggtgaacgtgaagtatcgcttgcgtcgggcgagggagcacaccaggctttggcggaggcgggttttcaagtgacggtacttgatcctgctgacaaagaggacctgaagaagctcatcgatggcggattcgatgtggcattcatctgtctgcacggcaaatacggggaagatggaacgttgcagggaatgctcgagatgattggacttccttatattggttcgggcgtgtggtcaagtgcccttgccatggataaggtgaaatcaaaggtcttttaccaagcggccggcattccaacacccccatctgtcacattgcgttctgctaaccctgctgacatcgatatgattgtagacagcttgggagagcactgcgtggtgaaacctgccacagagggaagcgctttgggtgttttcatagtcgatgagcgaaaagcacttcaagaggcgattgagagagttcgcgagcttgataacgagatattgatcgagcgctatataaaaggaaaagaattgaccgtggcagtaatcggcaacgatgatccgcgagctcttccgattatcgagatcgttccagtaaacgacttctatgattacgaggcaaaatacaagccgggcgcttcgcagcatctttgcccggcccctctttcggaagaaacgacgaagcagatccaggaaatggccgtcaaagcgcataaggtcctcgcttgtgctggcgtgtctcggtcggacttcattctggatgacgagggaaagtggtggatacttgagacgaataccatcccgggtatgacgggtacttcgctgctccccgacgcggcccgcgctgatgggatatcgtttcccgaactttgtacgatgctgattgaattcgcactggagaaaaaatgatcagtgcgggtcggctgatataaagtcaatgtttcacgtgaaacattgacttaaggggaagagtcaaaataaaaatgatcgccgattgtttcacgtgaaacaatcggcgatttctcaagcaagcaccaaggatgtttcacgtgaaacatctggagagggttagaatactccacatgttttcagcccgaacagggcaagcgcaactacagcgagtatgaatatccaactaactatgtagcagcccttgttacctttgcgtccttgctcgataagcttctccgacatcttgcgtcggcccttcatgatcaccgttcctggcttcttggttggaagaggcaccgttttcgaaggtgaccaagtgccgttgctatcaagtatctgtttgatgccctgctcgccaaggtcgacttcggggcggattccttccatcaagcgctgggcgacgttgcctgcaaatgtcgtgaaagcctgctcgtgctctggtgagaagcagagaatggcaacctcgccccagtactcgcctggttccgggctgtccgtgaaggcgacgaaagagagcagcgccttgatcatccaattgcgggcgtgaagtacgcggagccgtctcgttgtatccgcatcgaggaaggcgacgcggtgtccgaaacggtttactatccaggctacggccgtgccttcttcggtgacgaattccacatcgaaaaggtcgccgacaagattgtcggctccaagcagtaccgcagcgtcctttttggatggtgtatcgaagcgtgcgtaaaatccagtgtaggtggtttccatggtatcccctcgagcggttcaggtgcaggatgaagtgtaccatgaatgtttcacgtgaaacatttctgatgttggatgggcttttacccgggcaagggcgttttggtttgtacgaacagttgagagatggtaggctgatcgttatggaaaagcacagcgagcaggcgcatggtatcctgcaaacttttataagcgatgggacgcctgcagctatcgaggcgcgttacgcttcgctgccggcaatcgccgctgaaagcgattatggggatcttgatcgcaatatcgtggtcctcgacaccgagacgaccggtttctcgttcaatcacgacgagctgacgcagatcgccgccgcccgcatggagcaggggaggatcgtcgactggttcatcacgttcgtgaacccggggaagcctattccggaggatgtcgcctatttgaccgatatccacgacgaggacgtggcggatgcgccacttccatccgatgccttgtctgatctggtaaaattcgtgggagatgcgaaaatagtcgcgcataatgccgagttcgaccgcacgttcaccacccgccatcccagtggttatccgctgctggagaacacgtggatcgattcgctcgaccttgcgcgcatcgcgcttccgcgtttgaaatcgcatcgcctgctcgacttggtgaaggccttcggcgcgccgctctcgacgcatcgggccgatgccgatgtcgaggccacctgctccatcttccgcatcctcttggcggctgtcggagcgatgcccgtgccgctcgtgcgcgagatagcgcgcatggcgacgcccgagcaatggccgacccaggtcgtgttcgattatttcgccggcaaaagaggcgatgatgatatcatatgcgcaggtcaaacgaaagaattgggaaaaccagaatccgaggcagcacgtcagcgcttctcgctgcgcgccctgcgccgtgagcgtgtggcgaagttcgaccgcaagccgaagacggatgccgatgccatagcagccgatcccctccgcgatctggcattcccttctgacgaggagatcaccaccgccttcgccgccgaagggttggtgggaggcctctatcgcaacttcgagccgcgtgccgagcaactggcgatggccgaggccgtgcgcgccgccttcgccgcctccgagaacctcatggtggaggccggtacgggcgtgggaaagtctatggcctatttggttccggcagccttgacggcccgcaagaacaatattgccgtgggtattgcgacgaagaccaatgccctgctcgaccagcttgtctaccatgagctgccggcgctgggcaccgcgcttgcggaggcgggtatcaccggtggaaacgctccgtgcgataatgctgatgcccttggtgaaagccctgaagggctcacctatgccgcgctcaagggattctcccattacccgtgcctgcggaagatcgaccgcttgaccgtcgaagggcccggcacgcgcctcgttgccggcaaggagcagtcgcaggctcccgcgctcgccgcgctgctctcgtacatcgagcagaccgagtacgacgacatggacggcctgaagatcgattaccgcctgcttccgcgtttcgccatcaccacgacgagccacgactgcctgcgacgcaagtgtccctatttcggcacgtcgtgtttcgttcacggcgcccgccgccgcgccgagagcgcggatatcgtggtaacgaaccatagccttctgttctgcgatctggctgccgacgggggattgctgccgccgatccgctactgggtggtcgacgaggctcacggtgccgaggccgaggctcgccgcgccttctcgctggcactttcggccgaggatatcctgcgcctgaccacgcgcttatctgccgacgaggcgtcgcgcaatgtgttcctgcgcgccgagcgccgtgtgatcgcgccggagaaaggggagggcgctgtgctgttctacgccctcaccagcaaggcgcgcgccgccggcaaggtctacggcgaagccgcccgggagttcacctcccacttgaaggacctgttgttcttcgatgcgaacaagcgcggaaaggcctacgactacgtggagctttggctcaacgacgacatcaggagcagcgagacgttctcttacgtggcgtcgctcggccgcgtgatggccgatgcggccgagaagctcgtcaccccgtgccaggaactggtgggatacctggaggacgtcgatggcgccgccgacgtgcagcgtgagatagcctccctcgctatggaattgaaagaccagatcagggccgtcgagctgattctcgtgcaagcgccggatggctacgcctacgcggcgtcgctctgccgcaagaacgacaaggccaccgacaagctggaggccctgctgctcaatgtgggcgaagcgatgaacgagacgctgtacgcccgcacccattccgtggtgttcgccagcgccacgctggcggtggacgagaaattcgacgccttcgaggcggccctgggcttgaacaccggcgaactgtcgcactgccgcgcttgcaagctggattcgagctacgacttcgacgcgcatatgacggtgtacgtggcctcggacatgcccgaaccgaacgaccctgcctacctggagcgtttgcaggggttgctcgtggacgtgcaccgcgcgcagcaggggtcgatgctcacgctgttcacgaaccgccgcgagatggaacgttgcttcgatgtggtgcagccggcgatcaagaccgacgacctgcgcctcgtgtgccagaagtggggcgtgtcggtcaaaggcctgcgggacgatttcctcgcggacgagcacttgtcgctgttcgcgctcaagagcttctgggaaggattcgacgcaccgggcgccacgctcaagggcgtcgtcattccgaagctgccgttcgcgaagcccacggacccgctctcatgcgagcgtgctgcacgcgacgaccaggcatggaggcgttacgtgctgcctcaggccgtgctggagacgaagcaggcggccggccgcctcatccgcaaggcggacgatcgcggcgtgctcatcctggcggacacgcgcctggtgacgaagggctacggcaaggcgttcctgaactcgctgcccagccgcaccatcaaggtgtgcacgtgtgccgagatcgtggcggagctcgcagcggccgctgacgacgagtcgcccgcctgacgggcggcggttctcgcggagccgatgcatgggcaagcgaaacgacaaactgggacgggccgcccacatcaagcgacataccgtgggcacgtcgaacgagatatcgttcagcgtgctcgacgccgctaaaaacgagctggagggggacgtcgggaaggacgccgccgcgcgcccttcccggttcggtcatgtgtctctgttcaccttgccgctacgtcggaagaagagcatcgccacccccacaaaagagcgcggtctgctgctctcgagcggtgaattcgcctcggcggagaacccgacccctgcttcttctttgggaacggtagacgtcggctctcccaaatccgatgttgcgggtccgactacggtgccaacaggagcgccgcgcaagacggccgctgccggctccgcggcgccggcaggatccgccgcacctgccctgcccgctccctcgaaggttcgttctcccgaggaagagatagccctccgcaaggcccggcgccgccttcatcgcatgttggcggctaccctcgtggtagtggtgggtctgtgccttgcgggcgcgggcggttggtatctttaccaggatcatcaacggcatttgcatcaggtggcccaactcgacgaggcgctcgatctcatcagggaggctgacgagacggtggtggcactggacgggatcgtggcgaatccgctcgatgccggctccttggcccaagccgacagcgtgctcgcaaagctccccgctgcgctcgcacagcttgaggaggccgatgctgccgcgcgccgcgtgtcggttgacctgcgcgagtccgagggcaaggaggcggcgaaccagaccgttgcggccacaggtgcgcgtaccgcgctgatcgagagcggccggcagatcgtcgagcaggcgcagcgggcggacgaggcggcgcgcgccgtcagggaggcatggcagagggtcgtcgaggccgatgccctcgcccgcgatgccgccgccttggtggccgataccaccgcagagcatgtgacggcctccaaggataagaccaatgcggcggtcggagccttcgcagatgcccaggcggcgctcgaagcgcttgactccgcgtatgcagacgtcgatctggcgggcccgctcgactacgtggcaaagcgaatagaggccatgggccacgcgctggcgtccgatgacgcgttcctggcaaaaaacaaggaggaggccgtcgcccagaacgatgcctacaaccgtgcggatgccgaggccgcgacgctggccgcaggccttcccgacgatgtggcgcagctggttttcgatgcctacgatcaggcaaccggcacgcttttcgagacgtattcaacggctcgttcacaagctggagcagcggatgcgtttcttcgtgattatttgggaaccaccagcaaatagcgtatactaacggcatatatgcctagcaggatgtcacaagttcgtgagcgaaaggcaaagggtatgccggaaattctagaccacgttgcatatttgtcgcagcaaataggcccgcgtcctgccggaacggaagaagagcagcaggctgcgctgtacataaccgagcagatgcagaaggaagctggcctgtcggccgtcatcgaggatttcagcggtgccggaagagccgacgccccccgcgcgatctgctgtggggccactttggtcgtggccgtgctggcactgttcctttccgtcatggttatccctgctcttatcgtgtccctgatcgccttgttgctgttggttgccgaggtgctcgaccgaccggtgttgtcaaagacattcgcgcggggggtcagccagaatgtcgttgcgaaatacgagcccggctacacgtccgaggcaggcggctcgcggcgccgcaagatcattctcgtggctcgttacgacagcggcaaggtgcgctccgagttgaagcagcccttcctttcggcgctgcccgtgctccgttgggtgaacctcggcgccatggcggccgtcccgttgctgcttgttttgcgggcgacgctcttcctccatgctgccggcaccaccgagatagtgctcaacgtgctcatggccatcgtgctcgtactcgtggcgctgccggttcttgaagcgcttgcacacaagtttgcggcctataacgaggcggcgaactgcaacgcctcaggcgtctccgtgctgcttgacgtggcgcgtcgggtgggccgcgggcgggtgagcgaggccgagctggccgcgcgcgccgaaggggctgccatccatggcgaggaggctgctcgtgcagccggcctcgtgcccgagggagtggagatcgtctatgcggcttccaacgtgaaacctcccgagcttgctccccaaagcgaggccgcccgcctggcggccgctaaggccgccgttgccgcgctcacgggcaagccggtaagcggacgcctgtccaccgacttggccgagaatcttgtccaggtgaaggagcccccgctgccgagtccgaccgacgtggacttccagtcgcagcgcggcgagacccgcgaggcgttcaccaccattcctgccgagacggtgcaggcggcgcttgcgaacgcagaggctgctgctttgaacggggccgaagcagccgcagcagctgccgcgggtatcccgacatccttcccgcctgctcccgcaccggctgccgagcccgtttccagcgacggggtgcctgattggttcaagaaagctcaggagaaggctaagaaacccgtcgacaacaagcaggtgcaccgctcacgctatgccgatgcccttgatgctgccctcggtgacaacgcggaaggtcccgccgaagaacctccgacgccgccgtccgacatggaggtgcgcctgcagagtatgcgcgaaggcatcatggaggtcaaagcgccgcaagcaaatcgctcggatgaatctccggcgggcgggcaaacggaaaccttcgcgaacaccgtcgccgtcgcgatggacggcgccgctcccgaaacggttcctgcgcaggcttcggcgaccatgccggaggtgcgcttcaaatctcatgatggtgcggatgcccctgatacgggtgctacgtgcgctatgccgcccatcgatgtgagcgagctgcgccttggcgacgtgccgcccatgggagatgtgcccatgccctcgttcctcgatccggcgaaggctcaggccgagaagctcgaggagcgcggcgaggtgaaccgcaccgcgaatcgcgtcgacgtgaccgccgcgccaatcggcgacagcggccgtatcgagctccagtcggcgcagggcgccccttcggtgcagcctgctggtgcacccgtacctgtgtcccctgaaggcggcgaagctgctcctgcttcgcaacgtcgtcccatcgtcctgcccgacattggcgtggcggctgccaacttaacgcccatcaccgagctgcccaagcagcgtgccccgctcgccgaggccgagacgtccggcaagagtgcggccaagagccttctcaccatgctgccgtccatcgagcccgtatcggataccgccatccctgcagtcggcgatgctcctgcggtgccggctccccagcgacccgacctgcgcgcagcgcttccctcgttgtccggtgccatcgcgcgacccgacgaggctgccgtcagcacagccggcgcattcgtcccggccggcgccaccggggcgttcgccccggtaggcgatgagttgctcgagaacgtcgatcccgacgacatctacgtggatgatgccgacgattccgcctatgagggcgagtataccgaaacgggtgccttcgcaggtaccggttacgtggaaatgccgaagtcgcgcgcgcatcgcttcctcgacaagctgcgtttccgcaagcgcaaggaagaagaggagcccacgcctcaagaatggctcgaagtagacgaaacgttcgatgcccgtaccgccggcgcagcgcgcggcggttgggagagtttccgcgaagagcaaagtgccgccccggactactacgaggagacgtacgaggacgatgcctacgtcgacgacggggaagaggactcttacctggctcccttggtggggaagagccccgaggacacgttcgcgggcgtcacgagcgcctctcccgccgctggttttgccgatgacgatttctcgctcgacgatgtggacgagtacgaggatgacgcgttccgctccgatgccggtcgacgctggaacggcggtggattctcgcgcctgcgcatgggccgtgccaacgacgtgacgcccgaggagctgaaccccgaggacgacctgcgggccgcccatccggacgacccggcgacacctcccgaactcaaggagatataccagttccgcaaccccgacatcaataccgaggtgtggttcgtcgcgttgggctccgagctggcgcagcacggcggcatgcatgcgttcctcgccgagcacaaccaggatctgcgtggttccatcatcatcgatatcgacgcgttgggtgcgggcgagctctgcatgatcgagcgcgaaggaatgtatcgcaaggccaaggcctcctcccgcatgaagcgctacacgaagaaggcatcgcaggccaccggcctgtcaattggcgccgcgtctatcatgtgggaggacagtgcggcttcaattgcaatcaagcagggcttccaagctatgcacctcgccggcatggatggtgcgaaaccggcgttcttcgcgcaaggggacgatgttctcgagaacatcgacgaggagacgttgaacaacaatgcggaattcgttatggagttgttgaagaatatataaaggcggccggcatccccggtgcgcctgcatcgcggtaccgtataatggcggccgtgtgttgctcgtaagatttcttgaatctcgcgcgttctcacgcgggcgctgcgcccgattcaacaaagaacagaaaggtgtttggaagccatggctattgaagcgtattgcgtgaagtgcaaggccaagaagatcatgcaggaccccgtcgagagcacgacgaagaacggcaagcccatcacgaagggcaaatgccccgactgcggtaccaccatctgccgtatcggcgccgcgaagaagtagctccggctcatccaaatccttggacgtaccacggcccccgcgcttctgctcgggggccgtggtgtagcctgaccggcccgcgtccatggatgtttcacgtgaaacattttccgtctgcgtgctgctagtatttgcgctataatctgtcatcatgcgggtgtcgccaagtggtaaggcccaagcttcccaagcttgtattcgcgggttcgagtcccgtcacccgctccatcgataccacggtccaagcttcggcttggatttttcgtttaaaggcgaaaggatgcgctcatgatagacgcaacgacgccccggttcaacaccttcgtgttcgacctcgacggcacactgctcgacacgctacccgacctcgtggtcctcacgaatgccgtgttgcgcgagtgcggctttcccgagcgcacgtccgccgagatccttagctatgtgggcaacggcgtgaaggcgctcatgtaccaggccgttccccaggatgccgatgaggaggctgtcgaggcagccatgagccgttggaaagaactctacccgcagtacgggtatcgcctgaccaaggcctatgcgggcattccagagacggttgccgagctcaagcgccgaggcgcgcggctcggcgtgctgtcgaacaagttcgacgcgggcgtccaggatgtcgtcggggcctatctgcccggcctgttcgccgtggcgcgcggcgagagcgccgatacccctcgcaaacctgatccgacaggacttctgcgtaccatcgaggagctggggtcgacgcccgagcgcaccgcctacgtgggcgactcgacgggcgatatagccgtgtctcgcaacgctggcacctatgctgtggccgtcacgtggggttatcacggtgctgaacgccttcgcgcggcgtcggccgacctggtgatcgacgacccgcgagcgctgctcgaccttttgggatagccgcccactgtctcggactgtttgggaggactgccgctatggttagaaaatcgacggcgtttgtcgtggcgagctgggtgctcgtggtgctctgcgccggcttcatcttcttcatgtcgtctaatacggataccggtttgaacgacgatctgggattgttctcgctcgtcttccaggatctgaaagctctgcaggcgcagctgctcggacccggggtggacgtggtctcgtcgactgcccacttctgcgagtatgcggttttcggggcgttgctggcgaatgccctgcgctgccatatgcccctgcgccgtgcttgcctcgtggcggtggcctgcgccagcctgtacggcgtgtccgacgagtttcatcaactgttcgtgccggggcgcatgtgcgatccgatggattggctcgtagacaccgccggtgctgcgctgggatcggggttggcctacctccagcttaggaggaggcggcgggaaggcgaagaacgcttgggcaaggagccgttgccgaagaggtgatagccggagagggaatggtcagccaaggcgcgcgtggcgttttggcatactctgcgttggcggttcgcccggattggtgagcagttcttgcggtgtggtttccagagcatcggccaagcggaggatgacggacaggcgcgggtcggctgtgccgttctctatgcggttgaggaaggggcgtcccacgcccaccatgagagcgaacttctgctttgtgatctttgcttgcttgcgaaggcgcgtgacattgcgcccgaggatgacggaagtctcgcttctgttgtccaaggctgcatgctgtgagctcgcggtctgtccgacgttgttcgccatgtgggaaagcctagccgctctcgcgcctggtaccgtaaccgctggaatacgatttggggaattattggaaaagcgggcatggcttgatccgctgtgtatcgtttgtccctatagcatgccatttttatggcgtttcgcccatcgatgatagaatgtaaaggtatattgtgcggtttgcgcatacgacctcgaacgatagggttgaatcgtgaaggggccggtgccggagggaaagcggtgccgcgcatgcccgccggctctgcgtttcgcctgcaagcggttgagccaaggctgttgaggagaagtacatggcgtcacgaaactctcgcaccaaccgaccggctgcccgctcctcgcgtgcaccgcagtcagcacgtgctgtgcgctcggcgaaggcggcccagtcgggccgtatcgcctctcgtggaaccgccgagcagttttctcgcaatcgcggtgcgcagcaggccagctcctctgcctaccgttcagcctacacgcccggaagccaggggcgcagcgccaacaccgcctattcccgccagtcagccgctagccagtactctcgcaacaatccccagtactcccgtaacgcgaaccgtcgcatgagccgcggcaagaaggtggccatcggcattttggctgccgttctcgtagctgtcgtgggttgcggcaccgcattcgccctgtacgtcaactccatcaacaacgagctggtcggcgatatgacttccgaggagatgcaggccatccaagacgtgcttgctccgaagaagagcttcgacgagccgttctacatgatgctcgtgggctcggacgagcgtaccggaagcgacgaggccggcgcgcgttccgacacgaacattgtcgtgtacgtcgatcccacgagaaaccaagccagcatcgtgtccattccgcgcgacaccatgatcgacatcgacaacgtgggtatctcgaagttcaatgccgcctacaactacggtggcgtgtcgtccaccatccgcgaggccagccagctgctcggggtggatatctcccactatgctgaggtgaacttcgagaacatggtgcaattggtcgacgcggtgggtggcgttgacgtggaggtgacggagcgcatcgacgacacggatgccgacaacaccacggacaacccgtatggccagcgcatcatcatcgaggagggcctgcagcatctcaacggcgagcaggcactcgtgttcgcgcgcagccgcgccttcgtcgacggggacttcacgcggacggccaatcagcgcaagctcatcatggctctggtgaacaaggtgctcgacatgcccgtcaccgatcttcccggcgttattcagggtgcggcgaagtgcgtgactacggacttgtccgttaccgatatcatctcgctggccgagcagttcaagggcaagggagacctgacggtgtactcggccatggcacccaccgtgttcatggatcagatggtggacggccagtcgttcgtgctgaacgatcccactgctacgaagcagatgatggagacgatagaggaggggggcgacccgagcaacatcgtgggcgtcagcggcttgggtcccaggggctataccagcgggtcaggatcgtcgggctactccagcgccagctctacaggtacgggcagctcgggatattacgatgaggagtcgtatgacgattacgatccgtcctactagccgtgctgcaactcggcttcctcgcaaagcgggccggatggcgaatagggtgacggtggctattccgcttcccctgtcgacgcgggatacgctgcgcggcacgaacgccgatatcgtgcagccaaaccttcttcaacgcccgtttccccataagagaagcgggcgctttcgtgtaacggaacgcaagcacttgcgcgtcaaccttgttttttgccctggccgagaacatgctatcgaattcgggaatgccctcgaacacgtgcgctcgcgtgaaagcaaggaattctgacctgatggccgagccaaccgaaaccaagcacgaaaatcggccgcgccgctggcgtcggcttgggtcgccgcgcacgttcgccgtcctcgccgcgtccatcctcatcgtgggcgctatcatctacggcgtgttcatcgcatactcggtctcgttgggcgaggagttcaacaagatgtcggccgaaggtatgaacgatttcaccacggcgcagaaaatcgagtccgaatcgtccatcgacgagattcgcaataccgtgctcaccattcggacgttggcagaatcaaccgatatcgaccctgaaggcgaggtgttcaccgattttcttaactcatggaacgaacgcgcgactttcggtgtgacctacgtatccatcgcctcgctcgaagagggcgttgtcgagtcgaatcggaaagagagcgacctcgagatcttgagaaggctcaaggccggcgagagcgtcgtgtcggacgtgcgcaagtctcatcggcttaacggattcttttacagcatagccgaaccggtggtaaaggagggcgtggtcgtcggcgtgcttcgcagtatcgtcgacgctcatagtctcatcgatacgacccagatcaaatcgtcggttacgctgctgggttccgtgctcatgaaaggcgatggcaccattatcgtcgactccgagaagtcggagctctacgacgggttgaacctgtacgaggtgttgcgcaaccaagggtatgcggacgctatcgtgagcaagatgcaggagaacgtggagaacgatagcgatgtggccacccttgctattggcaagcgcgatggcaagacgactttcttcacttccgtacgtctcaatgagaacgattggactatcgtgaactttaccgaggagaatacgatagccgagcattcccaggtcatcctgcacgacacggtagtggcgggaacggttctcgtcatcatcagcaccatagcctgtgtcgcggttgccctggtcataggacgcttccgtcgtcgcgcgctccgcggggccgaacgctatgccgtgcttgcggagttctcggatacggtattgttcgagtactcgtacggcgatgacgttttggaattgaccccgaacgcgcgcagcgtgttctcactcgacagcctacgacgcgaacactatttggagcgcggaatcccgctcgtcgatttccacgaagaggacgtttcgctggttgaggagattctcgagcaccccgcaccgtcgggcgaggctcggcgggctaccgtgcgcgcatgcacgctgaccggcgagtaccgctggttttccatcaagtgccgctacctgtacgaagggcaggagccctacgccgcagtggggaagatggtcgacataacgcagcagcgcgccttggaggagcagttggtacgccgatcgcagatagacggtttgacgaaggcgctcaacaaggtaacggccgaagagaagataaccgcatcgcttgccgcgcatgatcgcggcctgctgttcatgatagacgtcgatgacttcaaacagatcaacgatcgcaacgggcaccgtgtgggcgaccaggtgcttgccgccatcgcccgcgctctgttcgacgtgttccgttgcgacgatccggttgggcgtatcggcggggacgagttcgtggcgttcgtgcgcgatgtcgacgaagccgatgtggtcgacgccaaacggcatgcgttgcgcgatcatgccgaagccattacgagggacttgggtgtatcggtttccctgagcatcggggtggcgcgctatccgcacgacggtacgaactatcaggagttgttcgatgctgccgatcatgcgatgtaccgagagaagcaggagcgcgacgataaataagcaacagcccccggttcgaagtcgaaccgggggctgttggcaaagagggccgaattcgctgtaccgaccaggctgctaagctataggtgcggccgtggagtagccgttcggattctgcgactgccagcgccagctgtcggcgcacatgcgatcgaggtcgtactcggcgatccagcccagctcgtcgcgggccttgtcgcaggcggcgtagttctcggcgatgtcgcctgcgcgccgcggcttcacctcgtagggcagctccttgccgcaggcgcgctcgaacgcgtgcacgacgtcgagcacgctcgagcccgtgccggtacccaggttgaagatgcccacgccgcgccgggttccgtcgtcggccggctcgccggcgatggtgccgagcgtgttggccgcaccggtgcccaccttgccgcccatccagtcgagggccgctacatggccgcgcgcgaggtcgaccacgtggatatagtcgcgcacgcccgtgccgtccggggtgggatagtcgtcgccgaacacgccaacgcacgccaacttgcccacggcaacctgcgccacgtagggcagcaaattgttcgggattcccttcggatcctcgccgatgagcccgctttcatgcgctccgatggggttgaagtagcgcagcagcacgacgttccactcgctgtctcctacatacaggtcggtgagcacctgctccagcatgctcttcgtctggccgtaggggttcgtggcatcgtgtttcgggcagttctcggtgatggggatgaactcgggctcgccgtacaccgtggcgctcgacgagaacacgaggttcttgcatccatgatcgcgcgccgcctcgcacagcacgagggtgcccgccacgttgttccagtagtattcaagcggcttctgcacgctctcgcccacggccttgaagccggcgaagtggatgatggcgtcgatgtcgttctcggtgaaaacgcggtcgagcgcctcacggtcgaggatgctggcctcgtagaacgccagacggtcgtcgtcgatgccggtgatggtgcggacgcggtcgagcgcaacctcgctcgagttgctcaggtcgtccaggacgaccacgcggtacccccggttcagcagctcgacgcacgtatggctgccgatgaatccggcacctcccgtgaccagcacgcaggtatccgagggtcccttagcaaggcttttgttcgccatggtcttctcgctttcgtttccggcggccgccgcgccgcgcacgaacttttctcttacggctattgtaccggcgatggcgtaccgctggatgatttcgtcgaaagcaacatgagtggcgaagagaagcccgggggtggctccccggcgatcggtaatttatacaaagataaagatattcttgacaaagtataataacgtggataatatagttggcgagcaagagaaaaactcctccactcttctctctccactcgtccagatcgaggccgctccccccgcagcctcgatctgcattatcgttcttgcgcacgagcagatcccctcttggcttgcacgttgtccttggcccatcatcctaccggtgttccatcattggattgcccttcaacccatttcgacctgcttaacccctgattggggcacattctccgggcggtgtttcacgtgaaacaccgcccggagaagcggattcgtgctaattatttcgctgctctgtcggtgatgatcctgcatcgttttcgcgagccttggtgatgagccttataatgagtggaaatacggacgggcgtgcgcctgcccgcaaccgaggcttcccgtgtggaaaggactacctgtggcagacatacacttcggcaccgatggatggcgcgccatcatcggtgaagatttcacagatgacaacctggtgcgcgtcgtggatgcggcagcgcgcatcttcaaggaggatgccgtctccgccgggcgcccggcggatgctcccggcaccctcatcgtgggccacgattgccgccgggacgcgcatgcgtatgcccgccttgcggccgaggtcgcggcggcgcacggtttccgcacgctgctcacgcaggactactgccccacgccgacgctctgctggtcggtggcgcaggatgccgatgccgtgggcggcatcatgctcaccagcagccacaacccggccgagtacctgggcgtgaagctgcgcatggccgacggcggcgcggcgggcaaggagttcaccgaccgcgtggaggccgtgctgcccggtgccgctaccgtggagcacggcacttgcgaggaggccgacctcatgaccgcctacctcgacgcccttaagcagcgtgtggacgtagaggccatacgcgacgcccacctgcgcgtggtggtggacccgctctacggcgccggtcgccactacctggccgacctgctgcgcgatctgggcgtggaggtgtgcgagatcaacaacgcggaggatccgaccttcgacggcctgcatcccgagcccattccgccttgggtcgaccgctgcattgcgaaggtgcccgagatgggctatgacgccggcttcatcaacgacggcgatgccgaccgcatcggcgcagtggacgagcacggcaccttcgtcaacccgcaccgcattatcacgctgctcgtgtcgcacttggccgaggacaagggccagcacggccgggtcgtgtccaccataaccgcgtccgccatgctcgcccgccagtgcaagcgcctgggcctggagctcaccagcacgccggtcggcttcaagtggatctacgccgagatggagaagggcgacgtcatgctgggcggcgaggagtccggcggcatcggcatccccacgcacgtcatggagcgcgatggcctgctcatggccctgctgctggcagagaccatggcgcagcgcggcatgagcctgggccagctggtggacgacatgttccagaaagtgggcaagctggagttcgagcgccgcggcctttccatcaccgaggagcagatggcgcgcttccgtgcgagcgtcgtgccggattacgcgcccgacgaggtgtgcgggaagaaggtcgtggacgtcgaccgtcgcgacggcgtgaagttctacctcgaaggcgacgcctgggttatgatgcgcccctccggaaccgagccgctcgtgcgcgtgtacgccgaggccgagacggtggacgaggtgcgcgcgctgctcgatgcggcggaagccgtggtgagggcgtagctagcgctcaccgtaccgcggcagcttcttgagcagagcccaggcggcctgcttgctctgcgcgtcgtccagcatatgctcgaacgacttgaacgacacggcgtctcgcccgaacaggcggcaggcgccgtcgaggggaacttcctgacgatatgcggcgccgagtgcccgagcggcctcggcgtccgctgccacaacgaccagcggatctaatccttccagcagcagaaacagcgcctggccgtcgagttctgcctctccggcaacctcgtgatcggcagttctctccttgtcagttccgctttcttcggtgcccggggccttcccggctgcgctttccgaccgcagggcgacgtacgtgcagcacgcgcgcccgtatccgagcgccgcggccgagttctcgagcgcgctccgcgctgcgtcgccgagccgggccgcgctcgccacgcacacgacgcccgtccgcgcgccatcgaggtagggcgagaacagctcccacatctcttcgagcgctacctcgtacatgttaccatttgcggaatttttcacactgtcccttgcggtcgccgggcgttccacgtataacgatcatgataacaagaaccgacggcaacggcgaggcgcccttcggcgcgcgccgcgaaacgatacaggaggcagccttatgtgcaccaacggagtgaataccggacagctcgagcagatgatcgagcaggtcgacgaccacgtgaagctggagcgccgctgggcgcacacgctggggcatctggcgggcgacgccggcttcgccaccgtgtccgagaagatgcatgctgcccaggcgttgctcgatgacgtgcgtgcgctgctcggcgaggcgaaggacgccctcgaggacgacgccgcagcagccagcaacgtcaccgtcaacctggtctagggcacgtcgatgagcaacgatctgatgcggttctcggtggctatgcccgaggacctgctcgtgcgcttcgaccggctcgttgcccgccgcggactggccaagaaccgcagcgaggtcgtgcgcgacctcgtgcgcgatgcgctggtggaagaggaatgctccacgccgggcgccgaggtcatgggcacgctcaccatcgtgttcgaccaccatgccagcgacctgcaggagaagctgcatgccatccagcacgaatacttcgagtccatcgtgtcctcgatgcacgtgcacctcgacgagcacaactgcctcgaggtcatcgtgctgcgcggcgaaacggggctcgtgcaggatatcgcgaacctcatcttgggtacgaagggcgtgaagaacgggcgcctcgtagttacgaccacaggacagtatatataggtagaaggcccgtcggctcgttggcggtcgaaagcaggagggtttcaagcgccgcggaaacctccctttacgagccgggtcgaagatgtttcacttaaaccttcgtttgtatggacgaatcgaggcaaggagcgttatggatagcacggtgatgttgggacacggaagcggcggtacgatgatgaaacgcatcatcgacgacgtgttcttcgctgcctacgcgggtgacgagctgctgcgcggcgacgatgccgccgtgctgcccgcgccggcgccgggcgagcggctggcattctccacggacagcttcgtggtgacgcctcatttctttcctggcggcgacatcggtcggctcgccgtgtgcggcacggtgaacgatgtggccacgagcggcgcgacaccccgctacctgagcgtgggtttcgttctggaagagggtttccccatcgacgatctcaggcgcatctgcaactccatggcggagtgcgcccgtgaggcgggcgtggcgctggtgacgggcgatacgaaggtggtcaaccgtggccatggcgacggcgtgttcatcaacacgagcggcgtgggaacgctggcgccggacgtggaactgggcggcgctcggtgtcgcccgggcgacaaggtgctggtcactggaacgctgggcgaccacggcatcaccatcatgagctgccgcgagtctctgtcgttctcggccgaccttgaaagcgatgccgccccgctcaaccatctcatcgccgacgtgctggcggccgccccccatacgcgctgcttccgcgaccccacgcgcggcggcctggcctccacgctgaacgagcttgccgcgcagtcggacaccgacatcaccgtggaggaggatgccgtgccggtgaaaccggccgtgctgggcgcctgcaagatgctgggctacgatccgctgcaggtggcgaacgagggcaagatggtatgcgtggtggcgcccgacgaggccgacgccgcgctcgccgccatgcgcgcgaaccgctacggcgcggatgctgcgatcatcggcgaggtggctgcagcgcagcccgagcgcggccccaaggtgttcctgcgcacggcgttcggaggcacgcgcatcctcgacatgctcgtaggcgagcagctgccccggatctgctagagtcggctggcggatccgaggtcccgcggagagtattctacgcatgccgagggctcctgtgcggaggcccctcggcatgcgggcgccgcttccgggcggaagtcccgcatccttcgcgtgcccctcgttgtcgcctgcgcacgcgcaagcgcgccatcttcacgctgcccgagcgcacgccaagcatccatgaaagaattcgtaccgtaccctgaaaaatcgccgatttttcttgcatttgcatagaaccatggtatcttgcgggcagtaagtttttggggaagttgcccgtgtgctcgcgggtcttttggacgagaaggagaatgacatgtctcacccggttatcgatgccgatgagtgcattggctgtggcatctgcgtcgacgcctgcccgcaggaagtgctcgaggttgttggcggcaaggccgacgtcgtgaacgaggatgcttgcatcgcgtgcggcgactgcgtcgaggagtgccccatgggcgctatcccggaggtcgtcgaggactaacgcctcgcaagcgatccccgtaccggatcaaccggcccccgcatctgtggaagcagatgcgggggcttttgctttttcgggataacctgcaaaggtgctcggtgggtgcccgaaaaacgaaacgagaattccgtctgcggcgtgcgccgcccaataaggacgcgcgcagttgctcgcataatagcgcacaaatgtttcacgtgaaacattgtccgacgcttaccccttccctgcgccgccgccctctgtctctccattgaccgcacacactcgatcctattggggcatcgtgcgggaaacgaacgaatgcaggggccgtaacgctcttgtcccagccgtctcgttgccttccgtatgagtatagtgtgcattgttacaaaacatcaacagcaacttatgatataacttgacaacgtaagacttagattatatagtgcaaaacgtcgaaagaagattgagcggcaaagagcacccgttcgccgcccgatgttcgtacggcgaatgggtgcgcggttgcgcacctctttgcatagaaggcgaacctcagagcacgacccggcacgaaccagcacgacccaacaaggtaacaactccaacagagaggaacgataatggctaagattctcggcatcgacctgggcaccacgaactccgccatggcggttatggagggttcggagcccgaaatcctcgtgaacgcggaaggcgaccgtaccacgccgtccgtcgagggcttccgcaaggacggcgagcgcgtggtcggcaaggccgcgaagaaccaggcggtcaccaacccggagaacaccgtgtcctccgtgaagcgcttcatcggccgctcctatgacgagacccccgaagagcgcaagaccgtgagctacaagctgcagaagggcaaggacggccgcgctgtcgtcgacatcgacggcaaggactacacgccggaggagatctccgccatggtcctgcagaagctgaagaacgatgccgagaagcagctcggcggcccggtgacgcaggccgtcatcacggtgcccgcgtacttcaacgacgcgcagcgccaggccacgaaggacgccggcaagatcgccggcctcgaagtgctccgcatcatcaacgagcccacggcggcggcgctggcctacggcttggacaagacgaacaaggacgagaagatcctcgtgttcgacctgggcggcggcacgttcgacgtgtccatcctggagctgggcgacggcgtcttcgaggttgcggccaccgccggcgacaaccacctgggcggcgacgactgggatcagcgcatcatcgactggatggccgacaagttcaaggccgagaacggcatcgacctgcgccaggacaagatggccctgcagcgcttgaaggaagccgccgagaaggccaagatggagctgtcctccaccacgcaggccaacatcaacctgccgttcatcacggccgacgcctccggcccgaagcacctggactacacgctgacgcgcgccgagttcgagcgcatcacgaaggatctgctcgaccgcgtgaagaagcccgtcgagcaggcgctcaaggacgcgggcctcaaggccggcgacatcgacgaggtcatcctcgtgggcggctccacccgcatgcccgccgtgcaggacatcgtgaagaagctcaccggcaaggagccgaacatgtccgtgaacccggacgaggtcgtggccatgggcgcggccgtccagggcggcgtgctggccggcgatgtggagggtatcctgctgctcgacgtgaccccgctgtcgctcggcgtggagaccatgggcggcgtcatgacgaagatgatcgaccgcaacaccaccatccccacccgcaagacggagatctactccacggccgccgacaaccagacgtccgtcgaggtgcacgtgctgcagggcgagcgccagatggcccacgacaacaagacgctcggcaagttccagctctcgggcattccggccgcgcgccgcggcgtgccgcagatcgaggtcacgttcgacatcgacgccaacggcatcgtgaacgtgtcggcgaaggacctgggcaccggcaagcagcagcagatcaccatctccggctccaccgccctgaacgacgacgaggtcgagcgcatggtgaaggacgccgagctgcatgccgaggaggacaagaagcgcaaggaagaggtcgaggtccgcaacaattgcgacgcgctggtgaacgccaccgagcagacgctcgccgaggtgggcgacaaggccccggccgacgtgaagtccgctgccgaagaggccatcagcgaggccaagagcgcgctcgagggctccgacctcgacgccatcaaggccgcgaccgagaagatgcagcaggcgggctacaagctggccgaggtcgtgtactccacgcagggagcggacgccggtgcgcaggccgctgcggccgagtccacgccggctgacgacaccatcgaggccgactacgaggtcgtcgacgagaacgacggcaaggaagggaagtaaccgccatggccaagccgagcacacccccgtccgggcgcccggcgcagggcgctggcaggagcatccccatcgaggacacgcgcggggcggccggggattcccagccctccgcgaatcaggccgacacgggcaccggctctgctgccccctccccagagcccggtgccaccgccgcgtcgtccgacccgaagggatcggccgccggcagcgatgccgaccgtatcgtcgcagaggccgaggcggccctggaaggcgagcctgcagaggccgcgcccactgacagcgagcaggtggctgccgcgaaggccgaggcccaggagtggcaggacaagttcctgcggctgcacgccgaatgggacacgtaccgccgtcgtacgacggagcagcgcgaggtcgagaaggcccgcgcgaccgagaagctggtgtcgagcctgcttcccgtgctggacgacttcgagcgcaccatcgattacgcgacgaagaacggcgagcaggggctgctggacggtgtgagcgccgtgcacacgaagatggtcgacgtgctgaagaaggacggcgtggaggtcatcgacccgcagggcgaggcattcgacgcgctcgaggctcaggccgtcgccacggtggacgacgcgaacgtgcccgacgagacggtggccgaggtctatcagaaaggttacaagatgggatcgaaagtcttgcgaccagcgatggtgaccgtgaccagcggcggcccgaaacgcgagaaagcgcctgacgagggcacaaaagacaagaaatagcggcaggtggaagcgggcggattcaaggcccgcttctgcttgatacgagatagaacgaaaggtggtggagcatggcagcgactcccgactactataaaacgctcggcgttgcgcgcaacgccacggctgacgagataaagaaggcgttccgcaagctcgcgcgcaagcaccaccccgacacgggcggcgacgaggcgaagttcaaggagctcaacgaagcgtacgaggtgctgtccgacgacaagaagcgcaagttgtacgaccagtacgggaccgcgaacgagaaccagatcccgcatggctggggcggtggcggcaacgtgaacgtcgaggacatcttcggcggagccggagccggcgccggcgggttcggcagctgggccgacatccttgagagcatccgccacggcgacggcgccttcggaagcgattgggacttcggcgacctgtccggcttcggcggcggcgcgcgccagccacggccccgcaagggccaggacatgaacgtgacgctgaacgtgtcgttcgacgaggcgttcaagggcgcagaaaagctcgtgaccgtgcgcgtgcccggacgggccgacaaggaaacgctcacggtgaagataccggccggcgctgtggatggcggccgcctgcgcttcaagggcaagggcggtcccggcgagaacggcggcgcggcgggcgacctgctgatcacgacgaagatcgacgagcacccctactactctcggaagggggccgacgtggaggtgaacgtgcccgtgaccgtggccgaggcggcgctgggcgccagcgtcgtcgtgcccgcacccgacggcacgaaggtgcgcgtccgcgtgcccgccggcacgcaggatgagacggtgctcaacatcaagggcaagggcgccccgcgcgtgaagggcgagggcaccggtgacctgaaggtgaagatagacgtgcaggtgccgaaggccatgaacgacggccagaagaaggccatggaggacttccttgcggcaaccacggacgacgtgaggagctggcaatgaccgaccgtaccgaccgcaaccgcccgctctacatgataagcgtggccgcccagcttgccggcgtgcatccgcagacgttgcgcacctacgagcagaagggcctcgtcacgccgcagcgcacgagcggcaacacgcgcatgtactcgcaggccgacatcgagcggctggagctcatcaacgagctcaccggcgagggcatcaacctggccggcgtcatccgcatcctggacttgcaggggcggctggacgagcgcgacaacgagctggacgacctgcacaaacgcgtgcgccgattggccgatcgcgtgcacgagctggaaacgcgcgagagcgtgaactcgctcgtgcgggcatccgacatgcccacggcgctgcggcgccttccctgaccttgcattctcggcttttgccattggacgaaagcgaaggaggaacgaacctatgaacatgggcaacctgaacaaactggccctgaccgcccaggaggcgttgcagcagaccatcaccatcgcctccgagaacgaagcatcccaagcagagcccatccacatgttgaaggccctgctcgaatcgaaggagaacaacctttcggccatcatcaagcgcatcggcgccgagccgttccagctgctggccaacgtggacgacgagatcctgcgcatgccgaaggtgagcgcgagcggtcccatgatgatgagcggcgtgccgggcccggcgctcatggggctcatcgacagcgccgtgaagatagccgagaagctgggcgacagctacgccacgagcgaacatctgctcatcgcgctggccgaggaaaagggcgccgccggtaagatactcaacgccgccggcatcacgcgcaagaccatcgaggcggcctacgaggagctgcgcggcgacacccgcgtgaccgaccagcagaacaaggtgcagttcgaggcgctggagcagtatggacagaacctcacccagcaggcccgcgagggcaagctggacccggtcatcggccgcgccgaggagatccgccgcaccatccaggtgctgtcacgccgcacgaagaacaaccccgtgctcatcggcgagcccggcaccggcaagacggccatcgtggagggcctggcccagcgcatcgtcgacggcgacgtgccctcctcgctgaaggaccgcgacatcatcgcccttgacctgccggcgatgctggccggcgctaaataccgcggcgagttcgaggaccgcctgaaggccgtgctgcgcgaggtgaagcagagcgaggggcagatcatcctgttcatcgatgagctgcacaccatcgtgggcgccggttccaccggcgacagctccatggacgccggcaacatgctcaagcctgcgctcgcccgcggcgagctgcacgccatcggcgccacgacgctcgacgagtaccgcaagtacatcgagaaggacgccgcgctggagcgccgcttccagccggtgttggtcacggagcccacggtggaggacaccattgccatcctgcgcggcctgaaggagaagtacgagattcaccacggcgtgcgcatcaccgacagcgccatcgtggccgcggccgagctctcgaaccgctacatctccgatcgcttcctgcccgacaaggccatcgacctcatggacgaggccgccagccgtctgcgcatcgagatcgactccatgcccgaggaggttgacgccgccgaccgcaagctcacccagatgcagatcgaggagcaggcgctcatgaaggagaccgacgaggcctccaaggagcgcctggaggtgctgcgccgcgacatcgccgccgcccaggaggacctcgacaagcgcaaggccgagtggcagaacgagaaggatgccatcgtgaacgtgcaggagctcaagagcgagctcgagggcgcccagctcgaagaggagcgcgccacgcgcgagggcgacttggtgaaggcgtccgagatccgctatgcccgcatccccgacctgcagcgccgcctgcacgacgccgaagaggcgttgaatgtgaagcagcaggacggcgccatcttgaaggaggaggtgtccgacgacgagatagccgaggtcgtgtccacgtggacgggcatccccgtgcagaagatgatgcagggcgagatggcgaagctcgttgacctggaggagaagctgcacgagcgcgtggtgggccaggacgaggccgtgtcctcggtggccggcgccatccgccgcaaccgcgccgggctctccgaccccgatcgccccatcggctccttcctgttcctgggacccaccggcgtgggcaagacggagctggcgaaggcgctggccgagtacctgttcgacagcgagcgcgccatggtgcgcatcgatatgtccgagtacatggagaagttcagcgtgcagcgcctcatcggcgcgcctccgggctacgtgggctacgacgagggcggccagctgaccgaggccgtgcgccgcaagccgtattccgtggtgctgttggacgagatcgagaaggcgcacccggacgtgttcaacatcctgctgcaggtgctcgacgacggccgcctgaccgacggccagggccgcgtggtgagcttcaagaacgccatcatcatcatgacgtcgaacgtgggctcgcagttcatccgcgagttcgccgagcacggcgacgagaaggccatgaagcaggccatcgacggggccctgcgcgccacgttccgccccgagttcatcaaccgcatcgacgacgtggtggtgttcaacgcactgaacatgacgaacatcgagcccatcgtggacctgcagctggaagaggtgcgcgaccgcctggccgaccgccgcgtcacgctcgacgtgacccctgcggccatggagcacctgtccatcgacggctacgaccccatcttcggcgcgcgtcccctgaagcgcctcatccagcgtgagatcgtggaccgtattgcccagaaggtggtggagggccagctgcgcgaccgcagccacgtgctcatcgacatcgatgccgacggcaactacgagtgcaccgtcgaggccccgctggagctcgatgccaccgctttggacgacctgctgttggagaagtagccgttgtccgcttaggagcctcgtgtcccagcggtgagcgaaaaagacttgaaacgacccgtccgccagctgcgcggcgggtcgttttgcgtcttgcgacgtttgtgcggtttttcgggagcggtgcggcccggcgccatcctttacctcgatttgatcttcgtgctgcacggttctgctaccgtggtcccaacgtttgcaacgattctcgccgcgccgaggtgcggggcgaccttcgaaaggcggcattcatgggcatgttctcgttcagcagcaagaagaagcgcaagtacggccagggcggcagcacccagtaccagcagaagggcttcctgtccggtctgggcttcggctcgttcagcagctccgaccgtcgcaaggcggcttaccgccaacaggggtacggccagcatccggcgcaggtgcaggcgcaccagcagcctggcccgatgggcggcatgccgacggccgtcgcgcccatggccgcccccgccgccggcacggcttgcgcgcagtgcggcacggccatcccggccgggtccaaattctgcctccagtgcggtgcgaaggtgaaccagggcggtttctgcgcctcgtgcggatcgcaactgccgccgggcgcgaagttctgtccctcctgcggcatgtcgcggtagcgccgcgcgcgccgggaggcctcccgtgtcccgcgttgccgagcacctcgtggcgttgccgtaccggcgcttctgcgggcgcacggtgcagggctaccgcataggaaggctgacgggcatcggcggctcgggcgccgtgttcgacgccgtcggtcccggcggcgccccggcggcgctgaagctcctgcgtccccttcgccctgcctacgacctcgcctccgtgtggcgcgaggtggcgccgctctcccgcgttgaccatccagccgtgccggcgtggcgcggcatcgtgcgcgcaggatgcgcctacttcatcgtgcttgagcgcatgccgggcgactcgctcgccacctggctgttcgaacgacaccatgcgttcggagccgtagaagtcgcgggcatgggcgcgcaactggccgacgcgctcatcgccctccacgaggccggcgcggctcacggcgacctgcgcccggcaaacatcctgtacgatggagagcgggtctcgctcgtcgacttcggtcttagccggctcgtggaggaaggtgcggaggcgttcgctgccgcctgcgccgcggacatcgccggtttcgccgatcttgtgctttacctgcggtactcgtcattcgactcctcgcgccagggaggctcctggcgtgacgagctgccgcttgctcctgatcagcggtgctttctcgaggaggcgttcgccggtgcggatgcaccgggcaccgccctttccgcccgcgaggcccgcgcccgctttctcggcgcattcgcgtcccggtgtttcacgtgaaacaccgggacggctttcccgagtagacgaacgagaagcgccgcatcaacgtttagcggtgttggcacgtgaggcgtatcgcgcgcggggcttttgtactagaataccggcatgcgcacttcgaagcagagcatacggcaggctatcaccaccccgctgatcgggttcggcgtcgtgttgctggcgctcgcgtgcttcctgctgctgctatggacgctcatcatcgtggtgagggttgtgctgggatgacgacggacaaccaggctgcaccgtgcgccggccttcggaggggataggccatgtggcagcggttctccctctacgacatacgtgtcatcgggcactatctgggcgtgctcgtcctgttctccaccattgcgctgctcgtgccgctggccacggccatcgcgtgcggcgagtgggaaccggcctcgcactacctgctgaccatcggcatctcgctaatcctgggctcgggcctgcgcttcctgcgcattgagcccggtcggctcggccgccagcaggcgctggccgtgaccggcttcgcgtggatcgtgcttgcgtttgtggcgagcataccgctgtacctctccggccattttgccagctacctcgacgcgttgttcgacggcgtgtcgggtatcaccaccacgggcgccagcatcatcctcgatctcgaccatctttcgaatgccgacaacatgtggcgtttcatgatgcaccttttaggaggattcggcctgatcgtggtggcgctgtcgttcgggttgttcggcaagcgctcgggtgcgagcctgtactcgtcggaggggcgcagcgagcacgtcgtgcccaacgtggtgcaaacgtcgcagttcatcgccaagatcggcatggggttcatcattgttgccacggctatactctcccttatgtgcctgttcgtcggtatggaaccgctgcgcgccgtcctgcaatcgctctggctgtccatatccggcttcacgacaggcggcttcgctcctatgagccagagcatcatgtactaccactcgttccccatcgaggtggtgctcatgatgctcatgctactgggctccgtcaacttcgtgctgcactccgagatatggaaaggccacgtggccgtgttcttccgggatctggagatacgcaccatggtgctgtggcttgccgtgatgacgtgcgtgttcgcggcctcgctgtccgccagcctgaacttctccgacctgccggccatgctgaggcgcggcgggttcatggtcatctcggcattctccaccaccggctttcagaacatcaccacgaaccagctcaccggcgcgctgtcgtcgggcgcgttcctcgtggtggccctgctcatggccgtgggtggcagcggagggtccacgtcgggcggcgtgaagttcagccgcgtgggcatcatagcgaaatccatcgtggccaccatcaaggaggcgctcgcgcctgactccgcgcgtgtggtggtgtcgtacaaccacgtgggccgtcgcatggtgacgcccgaggtggtgaaggaggccatgacggtgttcacgctgtacgtgctcacctacgtcatcggcgcgctcgtgggcatctcgcacgggtacgaggccacgcaggccattttcgagtcggtggccatggcatcgaacggcggcgtgtcttcggggctggccgcgcctggcatgccggccacgctggaggtgttctatatcgtgcagatgtgggccggccgtctggagttcgtgacgctgctcgcgctgatcgtggagatattcgtgtcgttcaagccgcgccggcgcgcgccgcagatacggacaggtgaggtgctgtgatgcgggcgaccgaccaggcaagggagcgcgcctgcggggcgcggagcgccgaaggcgagggggcttgcggttgccgtgcgcctcacggccgtgaggcaggtttcttctacggtgaagcccttgggtggctgcgccgcgcccttgccgcgctcgtgctggctggggcgctgacgacgacgctcgtgccaggctcggcgttcgcggacgacgacgagaacctggtgaacccccagcagcgtcccgacagctcgttcatctacgacacctccatcgcggcgctcggcaacgccgatgcatactacgacaaccagaccgtgcaggtggtgggcgaggccatcggggacagcatccgcgagggcttggacaaccgccaccggtggatcacgctcgccgccaacgagaaggactccaccgcaacggtgtcggtgctgatgaccgtcgagcaggcggcgaagatagacacgtttggcaagtacggcaccaccggcacgaagctgcaggtgcgcggtacgttccacctggtgtgcaccgagcacgagggactcaccgacctgcacgccgacatcgtgaccgtggtggataagggcaagcaccatgaagacgagttcgacgtgaatgcgttcgttcccggcgccattgccacagcgttggggctcgcgctcatgggcgtgttctactatctgcgcgaacggcagcgctaggcaaggagggtacgtttgcagaagggccaggtcgtcaagctggatcgcgggtatccgctcgtgcggatggacgaggggcggctcgtgcgctgcgagcacgccacggcgcttgtgaagggcgagcaggtgcgggccgtcatcggcgactgggtggaggtgacggttcccgcgggccacgacaagggcatcatcgaggccatccttcctcgtacgcgcgcgttcgtgcgcaaggaccccacggagcgggcgctgccccaggtgctggctgcgaacttcgaccgcgtgttcgtggcacagccgctctccgatatgaatttcaagcggctcgagcgcgagctcgtgctggcctacgagacgggcgccgccgtgaccgtggtgctcacaaaggccgacctcgccgaaagcgaggatgccgtgcgcaccgtgcgcgaccacgtgcgcgagctggcagggcccgctgcggagacggtggtggtgtcggcggcggagccggcaagcgtggaggccgtgcgtgccctcgtgcctcccggcacgacggctgtcttcatcggcaagagcggcgtggggaagtcgagcctggtgaacctgctggttggtcatgaggtgcaggagacggccgaagtgcgcgagggcgacggcaaaggccgccataccacggtgagccgcgagatgattcccgtgccaggcggcggcttcgtggtggacatgcccggcgtgaggggcttgggcctctgggatgccgatgcgggcatcgaggccgcgttcgccgacgtcgagcagctggccgagcagtgccgcttccgcgactgccgccatcaggacgagcccggctgcgccgtgcgcgccgccgttgactcgggcgagctaagcgaggcccgcttcgcctcctaccagggcctgcgccaggagactgcccaggtgaaggagcgccgcgaggaagcccgacgcctgcgcggcgagaaagcctccaccagcggcaagcgccgcccacccaaatcccgcaagggaaagaggggctagcgcccgttgccgcctctgcgaaagaccctcctagatttttctcggggcagcctgttcgtcaaagaagatcgtgcggaatgctccgaccagttgggagcccagcttagatgagtgcccctctttatcatccaaaaacatcgaaggtcgatgtagattcgcccgaccgcgtatgacctgcgaaaacctgcacagccacgcttcgcacgcacccgatcctctttatctttcgcaatcatcctggatgtcgaagagcttgcgtaaccatggcagcggcttcttgatcaaggtttctgctatacttcgctgcggcggttcggctgtgcgttgcgcatggcgggggcgctccgcgtttgcatcgttgggccctgcactcgcggtttacccgttgcccaaagcccgcggccgataggtcgtgtggagacaaggagaaacccatgaacaagggaagatcgtcgtacgtcgcccaggcgggcatgatcgcggccgtgtacgccgccgccacgctcgtcgcgttgctgcttttgcaggggttggcatgggggccggtccagttccgcatatcggaggcggtgtgcgtgctggccgtgctcacgccggcggccgtgccggggctcacggtgggctgcatcgtggcgaacctcatcgcgctggccgtgaacggaacgggggcgctcggcttgctggacgtggtgttcggcagcctggccacgttcctgggcgcgctgtggtgttggaagatgcgcgagcgtccgaagctcgcgctgctcgggccggtgatcgcgaacgcggtgatcgtgcccgcgtacctgccgctcttgctgcagggcttgggcttctacaccatcccgttcacgagcatcgcgttggacggcgcctacgtgcccatgtacctgttcggcttgatagccaccggtatcggcgaggcgctggtcatgtacgtgctgggtttgccgctgctttcggcgctcaagcgcttccgtgtggtgaagcagccggcgaaggcgtcgtaggcgtaccttctcgatcgtgcctctccgggccgctttcgccctcggtgcccggatgggcgtatcggcggtgccggcggccgctccacaggcggcgcgcctttccgagcatgcactggccgggatggtgcgttcgcgtccccttcgcaaattcggtgtaatcaagagggtgcagggccaaagcgcgggccgcgcggtacaatagatcagttttgagggcggtcgaaggggaccgtcggctcgccgatttcaaaggaagcgcatgaacccggttatcgtcataccgaccttcgtctctgcccgtcgccgcaaggaaggcggcggcgttttgaccacctacgaccacgccacgcccatctcggccccgggcgagctgccgcgcctgctgcactcgctgcagaaggtgcgcggcatcggtcagatcgtggtgctggtggtgagcgagccgtccatcgagaaccaggcggccgagaaggtgcagacgcaggtatcgcagtacccttctctcaacgtggccgtggtgggagcgcccgagctcgcgctcatccagcagcgcatggagcagctgggcctgggcaagcttcagaaggagatcggcctgtcgggctacggcgccatccgcaacctgggtctcgtggtggcgaacacgctcggcttcgactcggtggtcttcctggacgacgacgaggtggtggacgacgccgatttcctgcagaaagccatgtacggcctgggcaagctcacgaagaagggcatccccatcctggccaagacgggcttctacttcaactccgagggcacgtacctctcgaagagccaggacaagtggtacaaccacttctggcagcagggcaaggcgttcaacaagatgatgacgaaggccatgcgcggcccgcgcctgtcgcgctcgaaccacgtgtgcggcggctgcctggcgctgcacaaagaggcattcaagcgcctgtcgttcgacccgtggatcgcgcgcggcgaggatctggattacatgctggacctgcgcatgtacggatcggacatctggctggacaaccagtggagcctgcgccacctgccgcccgagaccgagagcgagggcacgcgcttccgccaggatatcttccgctggctctacgagttccgcaagatggagtacagccgcacgcagatcgacctcttgcaggtgaagccctcctcgctcgagccgtatccggggccgttcctggagcccggcatcacgcgacgcatccgcctgacggcgtttttgcgcagcctggcgcgtcccgacaagaaggcctatcgccgcgccgcgaaggctgcgacgggagaggccaccacgtacgcgcagcgcaactgctcgaagtacttcgagttccagttcgtctggcccgagctcatggcgcgcatggagaacgaccagatcctgcgcacggcgctcatccagtcggccgcgcaacgacagctgggtgtggactccccgcgccaagcggcggcagtggctgctcaggcggccggcatcgaccccggcgtgacgagcgagatccgcctcaacatcgccgagtagcgctcgagctgccggaagcgcggcgggtgccggaccatcgccggtcgggcaaccgccagagcggcttgctgcaagccgagcgcgtgcggcgacctgcctgcgcgtaggttcagcaagctgccgcatcctccggggccgcccgtcggcgacgcggcggcaacgttgggcaacgcatgcctgacgcttgcggaattgacgcgcctttaacgtgcgtgcagtgccgtttccgttaaactgggtcgcggacatatcgttgatcggggaagggactggcaggcgcgcccatggacatcttcacttcgctcgtgatacccgcccttgtgggcatcggaatcggtattctctcgggcatgctgggaatcggcggcggcacggttctcgtgccgatattccgcctggcgttcggcatgagccccataatgtccacggccacgtcgcttttcaccatcatccccacctccgtttcgggagccgtgtcgcacgtgcggcataagacgtgcgtgccgtccctcggcctggcggccggtctgggcggtgcctgcacctcgcccatcggcgtgtggcttgccaccatatccccggcctggatggtcatgctggcggctgcgctcatcatcggctactcggcggtgaacatgctgcgtaaggcgtggaagatgaagcccgcccgctccgcggcgcccgcgcaggcggagcctgcgggcgagacccccgcggaggccgccgtggagcaggcgggcgacgccgcggcgaacgacgacgtggagccggatgtgccggccggctcgtcggagatcgctgcggacacgggcaagtcgttccccaagctctcgcgcaagcagctggccatcggcgccgccatcggcctgggcgccggcctggcgtccgggtacgtgggcgtgggaggcgggttcatcatggtgccgctcatgctgtcgctcgtgggcatctccatgaagcaggcgtcgggcacgtcgctcatcgccgtcatgctgctggccataccgggcaccatcgagcaggggctgctcggcaatatcgactatatggccggcatcgcggtggctgtgggctccatccccggcgccgtggtcggtgcccgcctcgtgcgtctcgtgcccgagcgcacgctgcgcttcatcttcggcggcttcctcatcgtggccgcagtcgtgctcgtgctgaacgaggtgggggtgctctgacaaacgggcgtgcattgcacgccggatgctggtaggatggtgccttcagacacgacgaggaggttcgccttgcagcaggtgcaacaggaaacgacggagaagaccgccctgccccgtttcttcacgctcgagatgttcatgttcaccgtagcggtgctgtcgggcctcgtgctcatctggtcgtccgtgtcgccgtaccgcagcatcgccgtgctcatcgtggcaggcatcgtgttcaccctctcgctcgtcatcgtcatccggctgctcatggatcccgattccgtgcgcgcgcgccagtccgatgccatgctgcgcctggccagccagacgctcgactgcatgaaggaggggatgaccagcgaagctgcacagcgcatctgccagctgctgctgccctcgacggcggccattgccgtggcagtgaccgacaaggaccatatcctgggctacgccggctacgaggaggccgacaacccctccggcagcgttatccgcacgcacgcaacccatgccacgctctccgatgggcgcggtcgtatcttgttcacaccagaggagatcggcttcccgtccggctcgtccaccatccaggccgccatcatcgtcccgttggtggtgggccgcacggtggagggcacgctgaagttctattaccgccgagctcgtcatatctccgagacgcagaagtccatcgccgagggtttcggccagcttttgtccacccagatggcggcttcggcgttggaggagcagacgaagctggccaccagcatggagctgaaggcgctgcagagccagatcaacccgcatttcctgttcaacaccatcaacaccatcgcctcgctcatccgcacgaaccccgagaaggcgcgcatcctgctgcgcgagttcgccgtgttctaccgccgcacgttggaagactccaccgacctcatcttgttcgcgcgcgagatagagcagacgaagcgctactttacgttcgagatcgcgcgtttcggcgaggaccgggtagccatggaagtggacatcgagccggacgtcgacgacatgatggtgccgcccttcctcatccagccgctcgtggagaacgccgtgcgccatgccatgccgtcggaaggcaagctcaccatcagcgtgacgggccaggtgaaaggcgacgacgttatcgtgtgcgtggcggacgacggcgtgggcatgaccgaggaagcgcgcctgaacatcctgcaccccgaatcgtccaccggatgcggcatcgccgtgaagaacgtccatgaccgcatctgcggctacttcggctccgacacccacatggaagtggagagcgagctgggcgtgggaacgaaggtcacgctcgtgctgataggcggcgcaaagcgcgagtactgaggcgcggcggcggacgggcaggggcatccccctttcccctttggcgatcgcaagcaaagatgcgcgccgaaatctcgttttcatggcaggattctcaaccttcgtcgacggggggcggccgcaagatccgcccgattctgccatcgcagtccaaattcctttccagcaccgtgctatcctgctccaccgtcgcaacgaacggttggggggagtgggatcgttcgttgtttgtccccttgtcggcatttttctatagtgaaaacgtcgaacgacgttcctcgcatctacgcgagggggaaaggggactgccatgtgcttcagaccacctgatacgacctcgggaccgctaatctgcccggcctgcgggaagaagatcgtgtcgcctaacttccgaccggtgacctgcccgttctgcaaggagccgctgccgccggccgacgagcctgcggcgcctgccatgccggggcagaagatgcctgccacgccgggcgcgcccacggcgcccaagccttcggggccgccctccgctccccaagcgtaaccgcacgtcggatgcgcagaagcggctctcccggccaacgggcgttatcttgacgccgcttctcaggaaattgccggtgcgacgaacctcgggtagactggggaggctatccggggccgtcgcgtttgagcgctgcacacatacgtttcaggggaagacgagaaggtgtggtcgcaatgcatatcgagtacctgtactatttcaaggatttctcgcgcacgctatcgatctccaagacggccgcccactacttcatgacgccgcaagggctgagccgggccctgcaccagttggagaaagacttcggcgtcacgctcatgacctaccagaacaacctgatatcgctcacgcctgccggcgaggagctcagccgccgcatcgacgccatcgtggagctgtacgacgaggcgaagggatcgctcaccgagtacaagctggccgacatggcgccgtcgaagggcctcgtgcgcatcacggtgacatcctgcgtgtcccagtacctcatctcgctgctgaacctgcagcggccgggccagttcccgttcgaggtgaagctcaacgagtcgaacctctaccgcattgtgccgcatatcctgtcgcgcgaccaggaggagtcgttcggcatcatatcgctgcccatgacggagaagtaccgcagctacgtggacgagctcgtggaggacggaggcatggtgtacgagccgctgttcacgtcgccgctcgtggcgatggtgtcgtcgttctcgccgttggcccggcgcgacgcggtacgaccgcgcgacgtggatccttacccggtggcacgctacaaggacaccgtgctgggcgatgcgctcgacgactacatcctcgaggacaacgtgaagacggtcacgaacgcaggagccatcatcttcgtgcagatcatggagcaccaggccgttggcttcgcaccgaagctggtcgagggcctgcgcacgctgccggaccgcgtggtgaccaagcccaccgagggcttcttcagcacggagttcgggctgctctccacgccggagaaccgttcccgggaacacgtggacgccgtgatccgctacataaggaagacggttgccgagaagaacctgcagccgcgttacctggacacctacgagctggtgtagcgcggaagggttgtgccgaaagcccgaaacgcaggttcgccatggaggctgtcccgtagggcaagggaagagcctctgcccttgccacagcctgctgggcgacctctgttgagcggcaagggcagagctcctgccctacggatagactttgcaggaaatcctgccagagacctcgtttaccgaggtcatagcgttttatgctccggtacaagcaccctgccaattcgtttaaccgttgcaacgatccattgatcgaccgccgccgggccgccgcgtatcttgggtggcacaaggtttgacgcggattgagcggggaagggggaaggcgcgcatccgctccgattcggccgcaccgccagcgcggtgaggcaaaggggagatccaattctttaaggaggttgatcgtatggcagatgccgtcgccgccggaggatccgcaccgcccgcggccaaggggagcgagcgtggcgggcaggacgggcgcgtttcggtcgccgatcgcatgaaccgcattccgacctcgccgcatacggcgcttatcatcttcttcgtgctcatgggctggttcgccgagaccatcgacctgggaggcaccagctttctgatgccggccattcgcgaatacttcggcatggacgccacgacgggcgggtattactcgtccatctgcttcctcggcatgttcttcggcgccatcgccgccggccgcatagccgacaaggtgggccgcaagaagaccatcgttgcctcgatgctcatctggggcgtcgccgggttcgcgctcgtgttctcgcccaacgtctactacctgttcgccatgcgcttcgtgctgggcctgggtctgggggcgcagttcccggtggccttgagctacctgagcgagatcgtgtcgggcaaggaccgtccaaagttcatgacgctctaccagcttatgacgccggtcgggttcgccgtggcgggcgtgctcaccgtgctcatcctgccgcacttcgactggcgcggcgtgtacctggccgaggcgctgccggcgttcttcgtcatcggcatcatcaagacctgccccgagtcgccgctgtggctggaggcgaagggacgctacgaggaggccgatgccatctgcacgaagttcgagcaggaggctatcgcgcggcacaaggagctgccgcccgtcgaggtcatcgtgcgctccgatgtgaaaatgtcgttcaaagacctgttcaagtcaaagtacctgaaggtcaccgtgctgtgcttcttcgtgtggttcatctccatgttcagcgactacggcctgaccacgtggctcaccaccatcctcatcgagaagggcttcgacgtggtgcaatccaccgggttcgtgaccatcggcatattgggcgggatcccggcatggttcttcgccagctggtcggccaagaagttcggacgtaagaagacgttcctcatcgcaggcttgtgcacgtccatcttcggcatcgcctacggcgcgtccaccacgctcgtcatgctcatcgtcacgggcatcctctaccagttcggcaagtacctgaacgccatgatgatggcgctctacacgcccgagctgtacgagacggccatccgcacgacgggcaacggcctggctacctcgtgggggcgcatgggctccatcgtcggccccatcgtgcttgccggcgtcatgaccagcttcggggtgtacgtgaccatgtacatcgccgccgccatggtcatcattcccggcctgctcgtgttcctgttcgggcccgagacgaaggacaagaagttctagctcgcttgtccgggaaagcggacgagcgtgaagagacaagagaaacgatacggaggtaatcatggagaagaaagtcaggaccgtctgtttcgactgccattccaagtgcggcgtcatcctcacggtcaacgacaacgacgagatcgtgcgcgtggagggcgataagaacaatccggtgaacgacggcatcctgtgcgtcaaggcgttctcggcccaggagatccacgcgcatcccgaccgcctcaagtaccccctgaagcgcgccggcaagcgcggcgagggcaagtgggagcgcattacctgggacgaggcgctcgacatcatcgagaagaagatccgcgagaccatcgaggagtacggcccgcagtcggtcatcatctcgcagggcacgggccgtggctcgaaccacttcctcgaccgcctgaacaacacgtggaacggcggcggcaaggtgtggccgacgcacgtgtgcttgctgccgaacctggcccagacgcacgtgacctacgggcgcatgttccatccgcacgaggcgtgcgactaccgcaacgccggctccatcgtcatgtggggcacgaaccccatccgctcgcgccagtacagcggcctgcgcatcatggacgcgaagcgcaacggctcgcgcgtcgtggtggtggaccccgtgttccgcgacatcgccgcgaaggccgatctttgggtgcccgtgcgccctggcaccgacggcgcgctggcgctgggactcacgaaccttatgttccagagcggcaagttcctggccgccgaggagatgcttaccacgtggacgaacgccccgttcctcgtggacaacgaggcccgcatgatgatgcgcgagtccgacctggttgaaggcgggtccgacgagcactacgtggtgtgggacaagaccgccggcgccccggctatctggcgtcccgagaccgaggacttcgaccgcgcgggcgtgaagccctcgctcatgggcgccttcgaggtcacgctcaaggacggcagcaccaagatgtgcaagaccggcctcgagacgtacaaggacgaggtggccgcctggacgcccgagaaggtgtcggccgtcacgtgggccccggtggagaagatcctggagatgttcgacatcatcacgaacccgactgatgacaagccctcgctgctcaccgcgtacctgggtgcctgcatgatgacgtcgaacgcgctgcagtccggccgcgccatcaccatcctgcagctgctgctgaacccgccgctggacgacaagggcggcatctacttcaacacgttctgggagttcatgctcgacccgaagatcacggcctacgaccgcgtgcctccgaagctgcgcctgggttatgacaagtatcccatgtacacccaagtgtacggcaacgctaacatcccgaacgacgtgtgggacgccatgctcaccggccagccttggcccgtgaaggtcatgatctcggtggcgaacgacccgctgggctgcttcgagaacgccacgaagatccacgaggcgctcatgtccgacgtgctggagctcaacgtgaacatggactacttcatgacgccgggcgccgagctggccgacatcgtgctgccggccgcgcactggtccgagcgcgtgggcaacttcgacgaggagctgtatcccgagccgtgcccgttcaatatcccgcagaaggccgtgaaggcccccggcgaggcgtgggacgactgggacttcatgcgcaacctgggcaagcgcttcgacccggagctgtggccgtgggagagctccgaggagatgcagctgtggcgtctgaacgagttccatctgatccccaacggcaaggagcctatcaccgactacgaggtggcggcgaagcagggatacttcatcgagtacggcggcgagagccgcacgacgcggcagcatgagaagggcctcgtgaagttccagacgcccacgatgcgcatcgaggtgtactccgagcagatgccgtcctatggctacgactcgccgctgcccagctacaacgagccgttcgagagcccgtactccacgcccgagctgtacaaggaatacgacctgtgcctgaccacgggcgcgcgcgactacgccttctaccactccgcgtggacgaacatcgcccaccagcgcatcctggagccgtggccctacatcgagctgaacgaggaggatgcccgcgagcgccagatctccgagggagagtggctgtgggtggagagcctgcgcggcaagatcaaggcgaaggcccgcatctccaagggcgtcatcaagggagcggtgagcatgtgccgcccgaactacaagcacgcctgcaaggagctgaacctgcccggcttcgactgggaccaggccaacccgaacgtgctgaccacggcggaaggctccgaccccggtttcggcgctgcccccatgcgcagcagcctgtgcaagatcagcaagttcagcgaatagcctgacttcatgagaaaaccgacgatgacgaagggaagaaaccatggctaagaagattggcgtgctcgttgagctcgattactgcgtgggctgctccgcttgccagctcgcgtgtcaggactactaccagctgcccgtgacggagacgtacatgcgctgtttcctgggcaagcccgatgtggtggacgggcgccacgagatgttcatgtcgccgtacgcctaccgcctggacaagtgtgctaactgcctggagaaggaggagggcaacgcaccgtgcgcggccatctgcatctcgaaggcgctgcacgtgggcgagctcgaggagatgaagcagctagccgaccagaccgacgggcatttggcgctgtaccggtagcgccatgctctcggcggtggccgaccgcatcccccccgcgggcggccaccgttgctttcgttgccggcacggcgttgctgtcgtgccggcaaccgttcgttctcggaggatgccaaggagatggttgattatgacgttcgcgtgcaccgattgctcgcgttgcggcaagtgctacgacaagcatggcgtgtgcgccgcatgcggcggtgcgatcaacctgctcgacgacgcgtgcccggcctgtggagagcccatcaccgacgccatgcgcgagcgtgccaagcaggcgtacctggagcagaagaaagcggagcacgcgcgcatcttggaattggcggctgccgcgaaggcacggcgggaggagcgccccgcaccggtgtacccgtgggacgagccggcgcagccgtagcgtgcggcgcccgagaggggagggaggcggacatgctgcacgccggcgtggacataggctcgaagaccgtgaagctcgtcgtgctcgatgacgacagggagctgctctacgactcgtacgagcgccatctgtcgaacgtgagggagacgcttggctacacgcttgcgcgggcgcggatgcgcttcccggaagagcggatgacgataggcgtcacggggtcggcaggcatgcagttcgccgacctgctggacctgccgttcgcccaggaggtcgtcgccgcgcgcacggccgtcgagcggcgcatccctcaggtggatgtggctatcgagataggcggggaggactcgaagatcctgttcctcaccggcggggaggaactgcgcatgaacagcacctgcgcaggaggcaccggcggcttcatcgacaccatcgccggtatgctggacatgaacgcggaggcgttgaactactgcgcgcatggctgtcgcaccgtccacgccatcgcctcgcgctgcgccgtgttcgcgcagatggacgttcgccccctgctgaacgagggtgtgccgaaggaggacatcgcgggatccgtgttcgatgccgtggcggcccagtgcatcgccggcctggcttgcgggcggcccatttccggaaccgtggccctgctgggagggcccctgcacttcctttcggctctgcgcgaacggttcaggctgcgcctggggctggacgacgcgcacctggaagtgccgcccgacggccacctcttcgtgtccgagggcgctgcgttcgaggcgtgggacagcgtgccgtatgggctcggggagctcatcgggaggctggagtccgtaccctgggaccggggcgccacgctggagcgcctgcccgcgctgttcgccacggatgccgagcacgatgcgttcgtgcggcgccatggcgccctcgcggcgccgcgggccgacttgagcagcgccgaggggcgcgtgttcttggggatagactcgggttccgaggctatcaagtacgtgctggtggacgagcagggccgcgtgctgcgaacgtactacgagcgctcggccggcagcgtggtggaggcagcccaggcgatgctcgtagacctgtggaagcatctgccgctgcgccacgacggcacgctggcggtggaggtggcgcacgcgtgcgtgacgggctacggcgaggagctgctgaagcgggcgtttgccctcgactcgggcgaggtggagacggtggcgcacgtgcgcgcggcgcgcgagctggtgcccgacgccgacttcatcctggatatcggcgggcaggacatcaagtgtgtgtggctgcgcgacggcgcggtggacgacatcgtgctgaacgaggcctgctcgagcggatgcggcgcgttgctcagcggcatggcgtggtccatgaacgtgcgcctcgaccgtttcctcgaggcggcggtacatgcgcagcgccccgtcgacctgggcacgcgctgcaccgtgttcatgacgtcacgggtgaggcatgcccagaaggagggtgccgagctgggcgatatcgcggctgggctggcgtattccgtcgtgcgcaacgccgtgtacaaggttatcagggcgcgcgacgccgcctcgctcggcaggcgcgtggtcgtgcagggcggcacgttcatgaacgatgccgtgctgagggcgttcgagaacctgtacggcgccgaggtggcgcggccggccctcgccgcgcacatgggcgcgtacggcgcggcgctcatcgcccgcgaccgggccgcggcaggcgggcgttccggcctgctgtcgcgcgcgaaggtggagcgcctggcaagcagcaagcgcacggaggtgtgcggccggtgcggcaacgcctgccgcctgacggtgacgtcgttcgacgacggcgacgcggtgcgcacgttcacggtgggtaaccgctgcgagcgcgggctgggggacggtgccgaggacaacgggctgccggacctgttcgcgtaccggtacaagcggctgttcgcgtaccgggcgctgccggaggacgctgcgccacgcggcgttatcgggctgccgcgcgcgctgggcatgtacgacctctacccgttctggcacacgctgctcacgcgccttggcttccgggtggtgccgtcgcgcctgccgcccgcggccctgcgcggccgtgcgctcgagactatcccctccgagtcgctgtgctacccggcgaagctcatgcacgcgcacctcgtggacctggccgagcgcggcgtgccggcggcgttcctgccgtacgtgcgcgccgaggggccggaaggccggtcgtgcccggtgctcgccggctatcccttcgtgctggacgcgaacgtgggcttcgtgcacgagcggggcatgcagctggtgatgccgcaggtggaagccgttctcggtgatgacggccccgatggccggctcgcggcggcgctgcaggaggcgctggagccggtggcgtgcggcctgggcttggaagaggtggagcgcgcggcccgcgcggcggcgtgcgagcaggcgcggttccgcgccgatatggtgtccgccggaagggcggcgcttgccctcatggccgagcgcggcgtgccgggcgtcgtgttggcggggcggccgtaccacggcgacccggcggcgaaccatgcgattccggggttgctgcgctcctacgggttcgccgtgctgaccgaggacgcgctgccggcaggggcttgcggcggaggggcgggcaagggggaaagtggccctgcgaagggcggtcggcaaggcgaggcggttggcggagacgcggcgcccgtgagggcgggcagcgcggatgacgggggcacgagccgctgggagcacccagcgcgcatcttgcgcgctgcgcggtttgccgccgggagggatgacctggagttcgtggtgctttactcgttcgggtgcggtctggatgccgtgaccgtcgaccaggcgcgcgccgtgctgaagaagcgggggcggtcgctcaccgcgctcaagatagacgagatggtggaccttgccgccacgcgcatccgcgtgcggtcgatggtcgcggcgcgcgaggaacggctgggaaggggagatgcgcgatgatcgtcgtgccgttcttctcggcgtggcacgcgccgttggtggaggccgccctctcggccggcggcgaggagtgccgcgtgcttgcggccggcggcgaggaggtggtgcgcgccggtttggaaacggtcaacaacgacgcctgctatgcggccctccttgccgccggccgcacggttgggttcctgcgcgagggcgccgcagccggcgcagccctggcagggcgtggcacctgcctgccgaaacaacgcatgcatgcgcggccggcggccgcgcgcccaggagttgatttggcgcacggcgaagctgcgcagcccatggccgagaagcctctcggccctcttgccgacccggtcgccgggccgctgcgcgtggcggtgccgacgccctgcgtgcgctgccgcggtgacgacgcgccgtaccttctggcgcaggcgctcgcagcgtccggcctcgaagcgcgtgcgtcggtgatcagcggcaccgatgcactcgaggcgcttgccgccgatgcgcgtgcggccgcgcgccttgccgatgctctggcgttcggggatgcgctgctccaagcgcgcttgcgcgtgcggccgtacacgcgtcccgccgatgcgccggttttcgatgccctccttgccgcgtcgagcgcccgcgcctgccgtgcgctggccgccaacgcgttcgtcctcgaaggaagcctgcgcgcattcggggcggcgctcgcaggtttcggcgtgtccgagcgcgacggccggcccatcgtgggcgtcgtgggtgcggcccctgccgtgttcgacgagcgcatgaacgcggggctcgtcgcgtgcatcgagcgcgaggggtgcgaggctgcgctgccgtacctgctgcccctggccgccgccgcgctgcgcgagaagggcgccgcggtaccgttgcacgccgcgctcgacgagcggtgccgcgtgctgcagcgccatgcgggcgcctgcctgcgctgcccaaccgtgcaggatttggaacgcgccggcacagaggtcgtcccgcgcttcttggtgcagggcgccggctggactatcgcgggttccgcgctgctgttcgtgcgcgcgggcgtgcgcgacctcgtgtacgcccgcgcgttcggctgcctggcaggccatgtggtgggacagggagcgataaagcccttgcgcacgtggtgcgcagccgacggcgtggacgcgaacatagccacgatcgaggttgaccccggcacgagcgaggtcaaccaggtgaatagaatcaagctgatgacggccgtcgcgaagcgcgcggcggcgcgaaggaggagcaacccatgaaccaccgtatgcgctatcttgccgccggcgtgctgtcgctgctttttctcggccttatctactcgtggtcgaacttctccagcgcgatagggcaggagttcggatgggatcgcgagagcatgcgcctcgtgttcacgctgtccatcatcacgttctgcttcggcgggttcttcggagcgaagctgaacgagcgcctgtcgttcagggccacgctgctggtggcggccgttcttctggccgggggcttcgcgggcacggctgcggcggtcgatgcgggcggcctcccggtgctgtacgtgggctacggcgtgctgtgcggcgcgggctgcggcatcgcctacaacaccgttatcgccacggtgaacgcgtggttccccgaccgcgtgggcttctcgtcgggcgccctcatgatgggcttcggaataggcggcctggtgttgggtacggcggcggccgcctgcatagaggtggcgggatggagggcggtgttcgtcggcctggccgtgctcatcgcgctcgtgctggttgcgacgacgctcgtagtccggccgcggccccaggaccggggcgcagctgccgcggacggggttcgtggcggggagaccgtgccggttcggcttgcttccggcttggttcccgcgcccgacgcgggagcacctgcgccttcccgccgcgcctccgccgcggctgcgccgcgcagcgaagcgccttccatggcgcgttcgccgctgttctgggtgtactgcctatgggcgacgtgcgccatctgcgcggggctcatgatcatcggcgacgcgaagtcgtccgccctggccgtggggctggaggcgggcttcgcgacgctgctcgtggggttggtctcaacgacgaacggcgcggcccgcatcgtcatcggcatgctgtacgataggaagggcctcgtggcggtcatggctgcggcgtctctcgccgcgctggcaggtgcgacggcccttgccggctcgttcgctcccgggatgcgcgtgcccggcctgttcgtggcgggcgcgctgctcgtcggcttctcgtacggttgcgtgcccgtcatcgcctcggcgttcgcccgcagcctgttcggcgagcagaagtacgccggaaacctggcgctcgccaacttcaacatggcaagcgccgccgtgctgagctcgctcgccgccggctttgcccgcggagccggcggtaccgagaacggcgacttcgccgtatacgccgctgtggtggccatcgtggtgctggcgctgctcggtttcgcggcgttcgtgcggctgttgcaccgccgggcgcggaccgacggtcggagctagggtaggcggctatggaaggcggaagggacgcaggcgcgaagccgcgcatcgggcaggaaggtcgccgtgcgctggtgcaggccgcgttctgctacgccatctggggcgtcgttccggtttactggaagctgttctcggcggttccgccgcttcaggcgctggccacgcgcatggtgtggtcgtgcgcgttctcggtggtgctttgcctggcgatgcgcgtgcgcttcctgccgctgctgcacgaccgccgtgcatgggcgacgttcggcgcttcgagcgtgctcatcgccgccaactggggcgtctacatctgggcgtccacgagcggccatctgctggagacgagcctcgggttcttcctcagccctctcacgagcatcgtgctgggggtcgtgtgcttccgcgagcgcctgacgcgtgcgcagaaggctgccacgatgctggctacctgcggggcgttgctgttcgcggcaacgcacggcggatcggtttggatagcgctcgtgcttgccgcgacgttcagcgcatacggcgccgtgaagaaacgcggcggctacgatgcgctgcccggcatggccgtcgaatcactgttcgcggccgtcctcggcgcgggcctgttcgccgtcggctgggccgatcccggtttctgggagcttgcgcatacggctcccgatgccctggcactcacgtcgcccgcgggaatcgccttattggcggtgggaaccggggtggttacggcgggcccgctggcgctgtactcggccgccgcgaatcgggcgccgctgtcgctcttgggcctgctgcaatatctcagccccacgctcgtcatgctgcttgccgtgacgtgcttcggcgagcttcccgacgcttggcagcttgcgagcttcctcctcatatgggttggcttggccgctgttgcctgcgagaccgtgcgcggacgggaggcgcgctcccgttcgtgccggcgggggctctagcgcggggcgatcgagggcactcgtgcagggcacgtgcttcgcgcggcctgcggcgcatggccgccaggttgctgaaatggggcgctggctcgttgccgatggctgttgctgccgtgcgccttgcgaaagccgccagctggttcggtccctatcattcggccgaggggcaccgtataatgggcggctgtggaaaaactagacggcatagcgcatcgcattccggcaggcgtttacaagctcctgttggttgtggccaccgtcatctggggtttgagcttcgtggtcatgaaagatgccgtggatgttctgcagccggcctacctcatagggtttcggttcctggccacgggtgcgatcctggccgcgctgttcttccgccgtctgcgcgcggcactctcgggcgagagagctctcgactacctggttaaggggacgattctcggcgtggtgtgctatctggcgttctgggtgcagaccatcgggctcgaccataccacgccgggcaagaacgccttcctcacggccacgtactgcgtcatcgtgccgttcgcctggtgggccatcgcccgcaagcggccgacggcgttcaacctcgtggcagccgtcatggccgtgtgcggcatagggctcgtgtcgctcgcgggctcgctttccgagctgaccatgggcttcggcgacgccatgacgctcgtgtcggcgctgctgttcgccgtgcacatcgtgtacgtgtcgaagttttccgagaagagcgacgtgctcgtgctcaccctgctgcagttcgcggtgggcggcgtgtgcggcgtggcatacggggcctgcttcgagacgctgcccccggccgagtccctcacgccggcgttctggatgaacatggcctacctcgtggtcttcgcgtcctgcgtggccctcgtcatccagaacgtggccctggcgcacgtgccgcctgcgcaggcctcgctgttcctgagcctggagagcgtgttcggcgtgctgttcagcgtgctgctgtatggggaagagatagggcttcgcctggtgggcggcttcgccctcatcttcgttgctatagtggtgagcgaaacgttcccgctgaaaagcaaggcgggcgacgacgcccctgccttggccctggaaacccccggcggcccggtggtgtcgccggagccgttgggcatgctgggcgcccgagacgccgacggcagggcagctgtcgaatcgatgcaagaggaggcatcatggagcaagagcggaacaacatagtgctgatcggcatgccgagtgcgggcaagtcgacgctgggcatcgtgctggcgaagatactgaactaccagttcgtcgacgctgacctcgtcatccagaaccagtgcgacaaaacgctgcagaagctcatcgacgcgtgcggcccggagggcttcatccaggtggagaacgagatcctgcgcgatatagaggcggagaactcgatcattgccacgggtggatcggccgtgtactccgacgaggccatgaagcacctcgccgagatcggccgcgtggtgtacctgcagatatcctacgaggagctggtgagccgcctgcacgatttgcaggagcgcggcgtggtgctgaagggcggcatcggcatgagcctgcgcgagctctacgacgagcgcaagccgctctacgagcagtacgccgagatcaccgtgaacatcgacgacctgtccattaccgcggcggcccgcaaagtggccgacgcgctgcgctaggacgctgccgtggagaccatcgagacggcgccggtcaagccgcccatcacgatcgacgacctggacaagctggacatccgcgtggggcgcatcgtgcgggtggacgacgtggagggttccaagaagctcatcaagatgacggtgagcttcggtgggttcacgcgcacgatcctctccggtatgaaggaggagcgcgcagattgcaaggccgagctggagggccgccaagcgttgttcgtggtgaacatggcgccccgcaagatggccggcgaggtgtccgagggaatgatctacgacatcggctacgaggacggcatcctccctgccctcgccgtccccgagcgcgaggttcccgacggcgcacgcctggggtaaggcagaaacagctccccgctgccttttcgaggaaagaccccgtgtttcgcatgaaacacggggtctttctgcgtgggatcccaagacaagacgcccctgcaaggaccgccggcgccacaggttgatgtgggaaaagagcacaatgcatcaaaaacgatgtcatgcgctctgggccgtcttatggagaaaataataagttaacttattattttctttcctcgacactgaatcgggataaactggaggggacgtacatcaggtatcacggaagcgcgaaagaggcagtgcatggcgaacgaggttgaagcggtgggcggcgccggggcggcgaaagggacggaccggttggggacggagcggatcggcaggctgttgctggagttctccatcccagccattatcagcatggtgttcaactcgctttacaacgtggtggacaccgccttcctcggccaggcgttccccgacggcacgggcgtggccgtcaccacgctggcgctgccggtcatgaccatcctcatgggcttctccatggtcgccggccagggcggcaacgcgctcgcggccatccagctgggcgagggccgcaaggcgcaggtggagaagacgctggggaactcggctgtgctgttgttcgggctggccgtgctggtggcggtggcagcggtcacggccatcgaccccatcctcgcgcttatcggcacgagtaacgagctgtgggagcctaccaagacgttcgtgcagatcatctgcgtgggtttcgccttccagtcgctcggcatgggcctgaacaacttcctgcgcacggcaggcaagccgaacctggcgctgggcaccatggtgttcggcaccgtgatgtgcatcgtgctgaactacctgttcgtgctcgtgctcggctggggcgttgcgggcagcgccggcgccaccgtgctggggcaggcgtgcggcatggtgccggtggtgtggtacttcacgatgtgcaagggcgcgccgttccgcctgcgcctgtcgtgttgccgccccgatgcgcgtctcatggggcgcatcctcacgctgggtctggcgtcgttcgtcatgcaggtggcctccacggtggtgagcgtggtgttgaaccaggtcatcgacatttacggcgcgcaggatcccatcggcgtgacgggcgcgcttgcggccatcggcgtggcgcagaaggccacgttgttcgccatcacgccgctcatcggcctgatcatgggagcgcagcccatcatcgggtacaactacggggcccgctcgtggcagcgcgtgctcgacgcgctcaagtgggcgtcggttgcgggcgtggccatcggggcgttcttcctcgtgctctcgcacgcgataccggtgcagatcgtggcgctgttcggcgtgacgggcgacctggagtcgttcgcggtcacggcgctgcagatctacacgctgctgtatccgctggtcgggttccagatcgtggggtcgagctacttccagtccagcggccagccgttcaaggccgccatcctggagatgacgcgccaggtgatcttcctcatcccgctgtatctgctgttgcctccggtgctgacgtccgtgttcgggctcacggggctgcagggcgtggtggtgagcgcgcctgtttcagacggcctggccacgctcatgacgacggtgttcgtggtccgcgaggtgcgcaagctgcgcggcctgcgcgaagcctcgggtggcgcagcgcgtcccgccgttgcggcgggcgagctgggcgaggctgccgcgcaacaggcgtagcgggcgccgggcgaagggaggggatgggccatggagcctctaagcgacgactccatcatgcgcgagatggcgcatatgagccaggtgatcgcgcgccgatcgcgccaggcgggcggcgcgacaggggcctcgttcgtgctggcggtgctggcgagccatgaggaggcgatggccgaggggttcgcaccgcgtccgctgtcgcaggtggagctggccgatatcgtgggcatccgcccgcagtcgctcggggcgctgctggcccggctggaagccgacggctgcatcgagcgcgccgccggcgagcaggaccgccgtgcccggcgggtcgcgctcaccgatcacggccgcgatcaggcgcaggaagctcgcgaccaccagcgcgcgttcgcgcgcgagacactggcggtgcttgacggtgcggaaaagcagcagctggcggccattgtgttgaagatcaacgccgcgctaggctagcaccgtccctccaagctgtaccggcgtcaaacgccgcgcgccgagcgggaaggctcggcgcgcgatggaaaagctatgggcgcatatgcccctgcggtcgctatgcccgcgcgccggccgtatcggagtcgggggcgttcagcgggtcgatgggcgggatgtcccagttgtcaccgggaaggtgcggctccatggcatcctcgtcgccggcagccttcaggcgctcgaagtagtccttcgtctccttcaccaccacgccggacagcgcgatgagcgcgatcatgttcggcaacgccatgagcccgttgaagatgtcggcgatggtccacacggccgccacggtcatgtaggggccgatgaacacgcagaagatgtaaagccagcggtacaccttcacggccttcatgttgccgttgctgaaatactccaggcaacgctcgccatagtagtcccaaccgaggatcgtggtgaacccgaacagcaccaggcatgccatgagcacgaacgacaccacctcgggcggcaggaacggcaggcccgcctggaatgcggccgtggtcacggcggcgccttcgaggccggggatctggtacgcgccggtcatgaccagcgccaggccggtcatggagcacaccacgatggtatccaggaacgtgccggtcatggacacgaggccctggcgcaccggctccttcgtctgcgcggccgcagcggcgatgggcgcggaaccaaggcccgcctcgttcgagaagatgccgcgcgcaatgcccttctgcatggccacgatgatggcgccgagcatgccgccggccgcagcctgcaggccgaacgcgctctggaagatgacggcgaacgcaccgggcaccttgtccaggttcgtgaagatgagcacgagcgagaagcccacgtacagcaccaccatggcggggatcacgcgctcggacaccttggcgatgcgcttcaggccgccgatgaccacgaggcccaccagcagggccagcagcagcgagccgatgacggtgaagatggagtagtccatgcccagaatgctcacggtggcgttcttctcggggtcgaagaagccggtgatagcgctggaaatagagttgacctgcgtgaacgtgccgatgccgaacaggcccacgcacatgccgaagaacgcgaacaccttcgccagccagcgccacctcatgcccatgccgcgctcgatgtagtagaacgggccgcccagaacgtgccccgtcttcttgtcgacgcgacggtacttcacggccagcaggccctcggagaacttcgtggccatgccgaacaaggcggccagccacatccagaacagcgcgcccgggcctccggcgacgatggccgtggccacgccgactatgttgcccgtgccgatggtagccgacagggccgtgcacagcgcgccgaagctcgacacctcgccggcgccgcccttctcgttcttcaccatgtagcgcagggcgcgcggcagctgccggaactgcacggcgcgcaaccgtaccgtcagcaggatgccgccgaacaggatgagcaccatgagcggcaccccccagatgaagtcgtcgatagcgacgagcccatcgttgataacgctgaaaaagccttccaccagtttcctcctcgatacaagcatgtacgtgcaatttcggcgaaccccgtccatggacgcggcactctggaggatatatgcgggaaaaagggaaggcgcgtgcgcgcaacaagctgcagctttgctctgtccttttgcctgagagtttcggcgatgcggccttcggccatccgccttgccccttcggcacccgacgatcgggattctccagaggcccctcctcgtccagtctcgtgcgatccaggacgtatcaacggggtgatgctatgaaattgtgccggcatattgtagcaggggaaaggcctgcggacaacggggcaatttcggaaagctgtcgccgtcctgacttcgcccgcccgcctctgttcggccccaaagcgggactaccctgtaggcaggctctgcgggtaataccctgtcgggctggttgatccgtttgcgcggcctgagccgccgtacccgaaggaggctgccatggccgatctgctctatgcgctggcggcgcttgccgtttcgttggcggcgctcggaatatccctttacgccgcgtaccggatcggtcggcgctgaggcgctgcgctagttgccggaaatggtctcagcgttctgcttgagggcggtcagcacctccacgaacgtgtcgatgtcctgctggtcgatgccctctatcagccggttcgccgtgatggcggtaaggggcagcacggtgcggatgagctcgtgggccttgtcggtggtgctcaccacatgcgagcgacggtcggtcttgtgcttgttgcgcaccacgagccccttgcgctcgagcgtgtccaggtaccgcgtgatggtcgcctgctctttgtgcgtgatggtagccagctctttctgtgacagctcgcccgcctgatcgagctggttgataaggttccactggccaggggtgatatcgtagggcttaagcgtgacctcgagcgatttcgtgatgtgcttctgcgcgtcgtacaccagataacctatgagacggttgtgcttgctctccatgttgaacccttccgatatgcgcagggcggcttttgcgttgtcgcgtgcggtggggcgcatcgcgccgggcgacgggaaggcgaccatgcaagggaagtggcaggatcgttcggtcgcggcgtttcgcattctctcgcctacaagaaaccataagcggctgggccccgtcaagaacgcggaagattatcggtcgaatctcctctttcattgccgtgcgaatcggttgctctacgcacgcttgtagcagttcaggactattctttgcaaatacctgttgcgctaatagttgtggttaatataattagcattgcaagtaatttgccaaggatgggagggcgcgtggggacgcgccgggtgaacgaggggccgtgcgcatcggagtggtgcacgcgctcgattcgccaaggggagcggccagcgttgtgcatgaaccgtcgccagtcccagcgggatctgcccgcggccttcctcctgaagcagatcttggccacgagaggcaaaaggaggaggagagatgtcacttaagatgagccgccgcggcttcgtgaaggcaaccgccgccgcgaccgcatcgacgctgctgctgggttcgcaggctgccacggcctttgcggacgatgcagcgggcgccgcaggggcgaccgcatccgacgacgtgaagaagatccccagtgcgtgccgccaatgttacggccgctgcgcgctgttcggtcacgtcaaggacggccgcgtggtgaagatcgagggcaaccccgatctgttcagcgagggaacgctgtgctcgcgcgcgtttgccattccgcaggagctgtacaacccgctgcgcgtgcgctacccgcagaagcgcgtgggcgagaagggctccggccagtggaagcgcatcacgtgggaggaagcctaccaggaggccgccgaccgcttcaccaagataggcgaggagcacggctggcacaccatcgcgcaccagtacggcacaggtcgcgacatgctgcagttccaggccatcaacaagctatggctggagctgggctccacggccacgttcggcgtgggcaacctgtgctgggtgggctcgtacttcaccagccagcgcctgtacggcgacgagacgcagtacaccggttgggacggcaacaatacgaactgcatccttatctggtgccgccaggagcgcagccgcggctactacgactggctcaccgtcaagcgcgcccaggagcgcggcgccaaggttatctgcgtggatccgcgctacacctgcacggccagcaaggcagacctgtggctgcctatccgccccggttccgacatggcgctggtgttggcgttcatcaacgagatcattcactcggacaagtgcgccgaagacttcgcgcgcttctacaccaacgccccgttcttcatcgacgaggagggcaccggctaccagctgcgcgagtcaatgatcaaagaaggcggcaacgaggagctgtaccccgcttgggacgaggcgcacgaccagctgatcttctggtccggcgactggcagaacaagcagggcgtgggcggcccgaaggccttccagtggctcgatgccgagggcaacatcgtggcggacgcgaagccggcgctttccggtagccgcgagatcaacggcaagacgtaccgcacttcctgggatatcctggtcgagcacgtcacgccgtggaccgtggagcgcgctgccgagttctgcgaactgcccgaagacaagattcgcgaggctatcgatatctacatcgaggccagtccctcggcgtgcttctgccgcggccagaaggtggagttctccatcaacacatcgggcatctcgcaggcgttcaccatcatgatggcgctcgccggcaacttcgactcgaagggcggccagaacatcggccgcgagcccgccaccggctacgactcgttcatgttcgacgtcgtgccgaacaaggaaggccggatgggcaagcgccgcctggaaacggcgaagaacatcaagaagctctccgtgtgccagaacaccggttaccagcagattctcgttgccgacgatgccacgggcgagctgcgcgaaaccacgcagaactccggcggccaggtcatctacggccagcagggcggattcggcgcggccaccacgaaggccatggcaaagggcgatccgttccagatccacggttactggcagcagacgtccgagcccatcctctccatcgagggcggtcgcgagatcgtggagggcttcaagaacctggacttcttcgtgaacgtggacatctacatgaccccctcgggcgagctcgccgacatcatcctgccggccgcgcaccccaacgaggtggaccgcgtggagtgggctcactcgggccacggctatcccaccagccacacctacctcatccgccagccgttccacgagccgctgggcgagagcaaagacgacatggacatctgcttcgagttcgcgaagtacatggacgtggacatgtactggaaggacaagtacgagttcttcgattacatggtgaagggccccgaaatgctgcctccgcagttgagctgtgcaagcttcgaggaattccgcgagcgcatcagcgtgaccggcgtcgagatggccaccgtaaagggcgcgccgaagtacgagacgggtttcatgcgcaagacgagcgacttccgccccggtttcaacaccatgtaccgtggcaacaagatggggacggtgtaccgcttccccggcacgaagacgccggatggcaaggtaattcctgcgcacccgcagtcggacaacggcaagatggaaatgtggtccgaagacctgctgctgtacggcaacggcccgctgccgctgtacatcgagccgcccatcacgccgctggcccgccccgacatgctggaggacttcccgtacacgcttatcacgggagggcgctcccatgcgttcttccacaccgagtaccgcaacagcccgtggatgcgcgaggtgcacatgttcccgaccgtggacatcaaccccgccaccgctgccgagcacggcatcgagcaggacgactgggtggtcatcgagacgtacgtggacaagattcgccagcgtgcgaacctcaccgaggccatcaagccgggcatgatccacgtggagcacgactggtggttccccgagcgcgaggccacggacgacctgcacggcgctttcgactcgaactgcaacgtgctgttcgagaacaacggcccctacgacccggcggtcggtaccgacaactacggcggcctctgcaggatctacaaggctgaggagggcgcgccggcgaacatctgcatgaacgaggaagacctgaagatattcctgcccatgagcgccgaggccctggcttccgacagccaggagaacggcgtggcgcaggtgacggtgaagggaggtgcgaagtagcatgacccgcaacattatctcaatcgatctggacagctgcatcgggtgccattcctgcgcggtggtctgcaagcaagaaaacggcgtgggcctgggcacctattacaacaaggtgctcaccgtaggtccctcgggaacctaccccgacctggagatgtactacctgcccgtggcgtgccagcactgcgacaaccccgagtgcgtgagcgtgtgccccaccggcgccagctacaagcgcgaggacggcgtggtcctggtggaccacagcaagtgcatcgggtgccagtactgcgtcatggcctgcccttacggcgtgcgcgcctacgacgagggccgcgacaagggcgtcatcgagaagtgcaccatgtgcgcccaccttatcgacaagggcgagcagccggcgtgcgtgcgccactgccccggccaggcgcgcctgttcggcgacctggacgatcccgagtccgcgccctcgaagatgagggcgtccaagaagacgtacaagctcaccgacgtggggaaccatccgggagtggactacggcttggacaagttcacttggaaaggcggtgagtagccatggcaattcagtggcctctgctgatcttcagcgtgctcttgggcattaccggcggcatcttcgtgttcttgggcgcaggcgagctcaagggcaagttcaaggaagtccgcttcataggcgcgctcatcgcgctggcgtgcctggcggttggcggctgcgtgtcggtgctgcacatggggcatccggagcgcgcgacgcacctgctgggcaacttcggctccggcttgtccaaggagctgctggtggtggcgctcatgggcatcgtgtctttggtgtacgtcgtcttggcgaagaaggactaccccggtgccagcaaggtgttcggcatcctgggcgcggttttgggtctggtgctgccggtggtggccggcgcctcttacctgatcgcagcccgtcctgcctgggacagcgcggcgctgccgctcatgtacctgggtgccggcctggccatgggcgcgcttttgatgtgcggtctggtattgcttcgcggcaacgcaaaggaagacggcgggtttgccctgcgcattgcgttggcggccgttgtcatcatggcagtgacgtcggtggcctacgtaatatggatagccatcgcgccgtaccaggcaccgtcgcgttccatcgagcgtttgttggcgggcgacctggcggtcatgttctggctgggcgtggtgctggtggggctcgcggcccctgtggcgctcactgctttggcctgcgtaaagtccacgaagggcgatgcgggctccggcttggctgatccgaagaagctggctgcctttatgttcgcggcgtttgcctgctcggtggtgggcgcggtgtgcttgcgcgtcatcatgtacggtgtgggcacgagcgtggagtcgttcatctactagcgatgcctcgaggcgggcgatgccggtacgtggcatcgcccgctcccgcaaaggtgcgggcaaaccatgcggcgagcgcgccgccggtcacagagccgtgacggacaaggcgcgctcgccgcatggcttgcgcacgagggaaggcgttcgcagcgagcgggcgtcttcgcaagacggagaagaaggggaagcatcatggagaatgccttgccgaccgagctggtcgagaacttaaccgacttttgcgaaaaccgcgggcgggtgtatacgctgctttcgcgctgctatgagaaagagatagatgctgcgttcgctgccgatttcgcgggacatgcagccctcgagtctgacgacgcggcattagcagacggctttgctgccttgcaggcttgcctggccgaccttgacgaggcggcgctcgagcagttggccgtggtgttcaaccgcgtgttcttcggcatggggccgcgcaccgcacagaaggcgtttccttacgagtcggtgtacaccagcccggacgggctcatgatgcaggaagcgtatgcccaagtaaggacgctctatcatgcagcgcgattcgcgaaggaccccaccttcccggagccggaagaccatctggcggtcgagctggcattcatggcacgcttgtgcgaacaggctgccggtgcactgcgggcgggcgagggccaggcggcggaggacttgctgggcggccagctggcatttttgcgcgatcacctgttgcggtggatagagccgttcgcggctgacgcctgcgcatcggcagaaaccggcttctatgcccatttggccaccttcaccgaaacctaccttaaagccgacgagagcgcgctggacgaggttgtggggtagcctcgcgcgcaagagcgttttcttaagggagcttccgatgcttctttgtcggcgttggacaggtgagaggggttgatgggtgtggatactatttcccggcgcgggtttctcgccgccggtgcggtcggggcgataaccataggggcaggggggttcggcgcggcgaccaagcaggccgacgctgccttcgtgcgcccgcctggcgtggagtccaacgcgcggttggcggcggcgtgcaaccgctgccagcgctgcctgcaggcatgcccgtacggcatcatcacgccggtgccgctctctggcggattcgtggcctacgggacgccaacgttggcgttcgagcaggcccactgcgacttttgcatgaagtgcgtcgaggcgtgccctaccggcgcgctggcgttcggcggtgcgcgcgagcgcgacctgggtgtggcggtagtggtaaaggatgcctgcgtggcctgggactggtccggctgcaccgtgtgcaaggacgagtgcccggtggagggcgccatctcgctggacgaccatgatcggccggtagtgcacgccgatctttgcgacggctgcgggaagtgcgagacgtcatgcccgtcttcgtcgttgcgtgcctacaaccccagcatcgcaaacaagggaatcgtggtggtctcacgcgagagcgaggctgcgcacgcatcgggcgcggtggccgacgcggagcttacctccttgcgcacaactgccgcagccgaagcattgcccccgcattcgcgaggcatgcaccccgatggtccggacggttccttgaggccggcttcaggagaggggaagggggccacccatgaaaacgcgtagcaaggctctccgcatagtcgttgccactgccttgctggttgcggcggttggagcggcgcatgttggcgggggcgcggcaatcggaacgctgtgcgtgctgtgtccggtaggcttcgcccagatagctgccgcatcgggcagcatcccgtggcagttgctgccgggtgtccttgcagtgctgctcatcgtgtttttggtgggacgggcgttttgcgcctgggcgtgtccctcccagctgctcaagaacgtcttcggcggccacgcgccgcgcggtctgcgcgggcgcaggggcgaagaccgcgccccggccccctcgcaagcatctgaagaggccgggaaggcggctggctgctctgcatgcgccggggcagggcccggcatcaaaacgcaaggtgcggtgttggccgttctgctgctggtgtcgtttgtcgtcaagttcccggttttctgcctgctgtgccctatcgggcttgtattcggcaccttgtgggccttgaaccgcgtgttcgtgctgttgcagccgggttgggagcttgtcgtgttcccgctcatgttgctggcggagctgttcttgttcaagcgctggtgctcggccatctgtcctttgggcttcttcttcggcctggtgggcaagctgcgcgccaggctcggtttcggcgtgcggccgcaggcaagctgcgccacctgcgtttcaagcgagggatgccgcacgtgctcgaccgtgtgcccggagaacatcgacgtggcccattcctcgacagagacgctcgagtcatgcacgttctgcctcgactgcgtggagaactgccccacgaagtccatctccctcgcgctcggcacgcggaagccggacgctcccgtttcgaaccctgtccgagccgacgagcccgcttcagcccacgagcctgcctccgtcggcgagataacctccgtcgcttcgggccctctcgaagattgcgacgacgacctcgccgttcgctagcctgcccgcaccaagggagtgtttcacgtgaaacactcccttactaataaggtcatggaagaaagagcaggctgtggcaggagtttgccaaggctatcatttattgccgcaaacggaaataatattgatctggcacgatgtacttctcctttcaagttcccgcgaccagttctttgaaacgtccgaccagatcggccatagcctccaatctcgtcccaccttccaccgtgcagcggtgcctgccttgtgcacgggaatgccccgtcgccactatggtcgcacgagggaagtattcgccctgtccgcaggtgaggggtgcgcatcgccctcgccttcacggcaatgcgccctcgccccttctgcagctgcagtcaacagggggactctcgtccttttccctgcagcagctagcgagcccccccctcacgctgcagcaggtcctcattcctgccgcagcgcttcgatgggcgtgaggcgggaggctcgataggcggggaagatgccgaacgacaacccgatgacggtgctggcggcaacggcaacggcaacgacgccccaagaagccgaaaatgccatccccatgctttctgccagcatgccgaacgcaagcccagccgcgatgcctgccgcgcctcccatgaggcttaccagcaacgcctccatcaggaactgccgcaggatgtcggagcggcgcgcgccgagcgccttcttgatgcctatctcgcgggtgcgctccgtcaccgacaccagcatcacgttcatcacgccgataccggctaccacgagcgagatgctggcaatgccggccagcatgagcgtcatggtctgattgatctcgttagaggcgcttaacatgtcgtcctgcgaaacgacggcgaactgttcggccgacagccccttctcgcccgacaggaagtggagcagagccgcctttgccgtatcgacgcttcctttgacggcgggccgcgcatacacggtctcgatcttcgtttcctctcccaggctcgggagggccgagaagggcacgagcgcaagagcgtcggcattgaggcccatggcttggccgatgggttccagcacgcccacgaccacgaacggcacgcccgctattttgagcgttttgcccaggcattccaccgtcccgaacaggtcgttggccgtggtggctcctattacgcacacattggagcggttctcgcggtccacgggcgacaggttgcgtccggttgcgagccgcaggttgcgtgtggggaggtagtgctcgtccgaggcctctgtcatgctgcgcttcgtggagcgcccctcggctgtcaggtcgccgccgaccctcttcgagggggcgaccggtcccaggcctggcaaaccgcgcagggcgactatgtcgtcgtagtcgagcgattccttgaacacgtaggccgacaccatgtcgccgcccagcgccttcatgcgctcctccacctgccggttcgagccgtcgccgatgccaaccagcacgatgaccgacgagacgcctatcaccagccccaacatggtgagggcggtgcgcagccggttgcgggagatgcttgaaagcgcggttttagcggtttgcgtccgtcgcacgccgacctcctttccctgcaaggccctggggctgcagtgctatctgacgcgtggcctcgcctgctgccgtcttcgaactgggatcgtcctcttcctgcagccgcccgtcggcgatgctcgccgtgcgctcggcccgggctgccaagctcgggttgtgggtgatgaggacgacggtctgcccttcgcggtgcaagtcctcgaacagctccatgatctcggtgctcgtgcgcgagtccagcgctcccgtgggctcgtcggccagtaggatggacgggctgcccacgagtgcgcgggcgatggccacacgctgctgctggcctcccgacagctggtgaggcagatgcccttcgcggcccccgaggccgaccttctccaggtagcggcgggcgagggcgtcggcctcgcgcagcctcgtgccgcgataggacaagggcagcctcacgttctccagcgccgtgagcgagtccagcaggttgaagctctggaaaacgaatccgatggtgcggttgcgtaggtcggccagcgcgttgtccgccagatccgcaacgttgagcccgttcagccaataggtgccgtcgtcgggcatgtccagcaatcctatgatgttcatgagggtggactttcccgagccggaagggcccacgatggccacgaattcgcccttttgcacggcgaagtcgacgttttccagtgcgtgaaccgtctcctcgcccatggggtagcgcttggccagcccttccatgcttatgaccggttcgcccatgccccgtgccttcccgggccccgcgcccgcggcccgggcattgccggttgcggccgtgcgccttgcggcatagcgcgggcttgtcgtcccggcggtcatgctgccgccgtcatggtcacgatagcgttcccggcgtccccgcccggcgcggttgcggattcgtggagcacgacgacgtcgctctccttgatctcgcccgccacctcgaccttagtgccgtccgacaggccggtggatacgccgacggtgcgcagcgagccgtcgggatccagcacggtcacggttttggcgtctccgtcgccctgcacggcgcttacgggaacggtgagcacgtcgatcgcttgggccaccttgaccgagagggtggccgacatgcccagccagatgctgccgtcgttgggcacctccacggtcacggtgaaccttgagccgctggcctggtaggctcccacctggttgatgttcgagatcacgcccgtgcgcgccccttggctgcccacgacaacgccgacctcctggccctcggccaggctcgccaggtcgctttcggctaccggcatctccacatggacggtgtccacgcgctccacctccacgaagtggtcgtcttgggaaagcgcctcccgggttttcggcacggtgcgggatttcgccaccaagtcgtacggcgccgacatgacctcgccgttcgtgtaggtcatcagcggttcccccgcgcggacgagcttgttcagcggcgcgtcgaacgatttaaagtaacgccagggggcgggtttgagcttctcggaagcgctgcctttcacctctccggtgccggagatggttttttcaatgttgcccctgctcacaggagcggtggaaacaggggcggggtcggattgtccgcggggtgccaggctgcccaacgcacctccgaacgcctcctcgcccgctgcgagccaccaggcggccgcgccgagcgcgagggccagcaccgccgccaaggcgatcaggccgaccgatacccttccttgccgtttgctgttgtctgacatgggatgctccttgccggtggtctactcgccgtcgctcgcgtcggtcagggtgtcgtagccgacggaggcgcttccggcggtgtccggctctgccaggcccgattcgagagcctgctcgcgctgtctttgggtaccgtcttcgctcccgccgtgctgcagtcccagattcttcaggacggccagcccgcccacgatcacaagggcgacggccaaaacgcctattacgatcttcatggtcttggtgctcatggttctccttccggtagctgccgattgcgtgggcatcttagcggaggccgccttaaaacttcctgaaataccagaaggtcccttcaacgaggggtgcgggtgcctgagcatcggtgcggtagccctcgcaccgcgccacgtttcagcgctttttaaggaagccgatgctagaatggccgcatgaagatactcatcatcgaagacgatcgcgccatctccggcgccgtcgccatggcgctgggctctcgttatgccgtcgaccaggcgttcgacggcgaagaagggctgttcttcgcgcggcaggacgtatacgacctcgtggtgctcgacatcatgctccccgtgctcgacggctacggcgtgctggagcagctgcgcgccgatggcgtgggcacccccgtgctcatgctgacggccaaaaacgcccgcgatgaccgggtgcgcggcctgcagctaggtgccgacgactatttggcgaaaccgttcgaccgcgacgaactggtgttgcgcgtagaggccatcatccggcgcagcttgggcgtgcgcaggttggacgccttcgggttccgcagcctgacgctcgatccgaacacgaggtgcgctgccgtcgacggcgtgccggtcgtgctcaagggcaagcagtacaacgtgctggagtacctggtgagccatgaggggcagctcgtttccaagacgcagctgttcgaccgggtgtgggggtttatgaacgacacgtcgtcgaatgtggtggaggtgtatgtgagcgcgctgcgcaaggcgctgaaagagcacgggtacgactgcttcctcaagacgatacgcggggcgggctatgtgtggacggccgatgatgagctttgaggagcggcgcgttcgccgtctgctcgcgcggaacaccctgctgttcttcgtgaccttcgccgtgctattctcgctgttcggcgtgctgatattccagatggtcagctccagcatctaccgatccgccgacgaccagctggccgagctgcgcatccttacctcctcggccacgctcgactgggcatcggaggacggcggagggggctacgaggtgctgtcggacgggaacctttcagccgaggctaagggggcgggcgccgggctggaggaagcgatggccgacagtgcttccgacggcggtattactatcttgagccggacgtatgtggcttcgaaccctcagctcatctacttgtggcgcagcgccgacggcaaggcggtgggcaccgaggggttttactccagctatccagcctatttcgacgacataccgttcgaagtcggcgacctggatcgcgtgtacgaggtgcgagcaggtggccacgcataccgcggcatcaactacgccatgggaagcggcggagctgccgaaggggaggtttcgaacagggcgtatctgcaggtgctggtgaacgtggattccgagatagcgttgctcgagcacttcacgcaggtgctcgttgtttacctggccgtggctgtggccgtggcggcggcggtgagcttcctgctgtcgcacaggaccgtcaagcccatcgtggccagcatgaatcgccagaccgagttcgtgcagaacgcctcgcacgagctgcgcacgccgctggccatcatccttgccgcgcaggagcggttgctggcggagccgggcgcccgcatcgttgaccgtttcgaggacgtgggcgcggtggcagacgagacgaagcgcctcgcgcgcctcgtggacgacctcatgacgctgacgtcggtcgatgcgagcgccgaagacgagtgcgaggcggcgcccgtcgaggtgagcggtctggtagaggacgtgggcagcctgtatgccgacgtggcggaggttgccggcaagatgctcacggttgccgcgctgcctgcgggagaagcgcacatcgaggcggacgccctgcggcaggtgttgggcatcctgctggataatgcgctcaaatacacggaagagggcgatgccgtgatcgtgagctgcgaagagcgaggcggccgggtggtgctttcggtgacagataccggatgcggcatctgcccggcggatcgcgagcgcgtgttcgagcgcttctaccgcgccgatgcagcgcgcaccacgcctggcagcggccttgggctctccattgcccgtgctcttgtcgagcgtgcccgcggtaccattgtcgtcgagaccaacgagccgcggggaacccgtattacggtcactctgccgaaggcgcgggcgcattgacatcgttcgttgctgccgctgtctacggttgcgttcgggcatcgaagaaagaacgacgccgctcaaggcggcgtcgcgagaaatcgatggtgcccccggcgcgattcgaacgcgcggcacccgctttaggagagcggtgctctgtcccctgagctacggaggcgcggcagctattgtagcattcccgacagcgcttatcccagagaaatggccgagtccgctggcgggcgtcgagccgttctcctgtcgacggtgctagaagcgcagggcgcaggtgaacttcgaccaggagagcgggtcggtatcgcgcacgagcaggcccctgtcgggcgcatggacgtagtgggtgccgccgttgctgacggcgatgcccacgtggccgtagcgccacagcacgtcaccggggcgggcttcggagaccggaacgcgttgacgggctgcgttgtactgagattcgctctgatgcggaacgtacatgccgatctggcggtacgcccacgtcaccaggccggagcagtcgaacgagttcggaccctccgcgccccattcgtaggggcagccgatacggctcatggcgtaatcgaccacggaaccctgcgatgggatgtccgcgccgttgccgccgcctccgctcggcgggttgccgccgccggtacccccgcctccgccaccgcccgtattgccgttgttcgcggcctctcgcgctgcctcggcttccatctcggcctgcttctgcgcggcggccgcctcggcggcggcgcgttgctcttcctcgagcaggacgcgcgcctcggcatcgagcgagttcatgagcgcatcggcctgggcgatcttcgcctcgacctcttccttgatggccttcgcctcggctgccttgtcggcggcgatcttctcctgcttggcgtactcggccttcgaggcctccacgctctcgcgcagctccttggtctcggcgaccatctgggagtcgttctcgttcaggacgttcaggatatcccagttctgagtgaactcggcgaacgacgtggagcccatgaggaagtccaggaacgtggcggagcccgagcggtacatgctgcgggcgcgggtgcccaggtgatcctgcaggtcggcgatctgggccgtggcctcgtcgatcttgacctgctcggcctccatggccgtgcgtgcggcgttctgctcgtccagcgcgccgtagtagcgctcggcggcggcctccaggtcggcgttcaggccgaccagctggttgcggacggcgtcggcctctgcctgcttctcggcggcggtcacggcgaacgcggtcgaggggaaggcgagggacgcggcggcgagggcggttgctccgccgacgaacgtgcgccgcgaaagggcgggtgagggctcttgcatgcggtacctccttggcgggcctggggcatgtccgagcgaatgtgccctctatcttaccacgcaacccatgcatgacgaaaatacccgtcaattatccagatacgagggagggtttgcgggaaggcgaggtagcgaggggaagggcggcgcggcgcgagtggagaggcgaaaggggcgaggcgcacccgctgctcccggccagctgcgcggcagtcatgcgatacgggcgggctgggctcggtggcaggtgcggctggctccttaacggcgccgatcgtcggtgcggtcgtccatggcggcgtcggccatggaggaggcccagagcatctgggggttcatgacatgcggagaggcgtcggcgagcgaggggaggcttccgcgcgtccaatcgagcgctgcacgccgcgcggcggcttccgactcgtagcgctgcggttcggacagccccagtcgcttggcgaacaggagggcggggaaggagcgctgcgcgttcgtggcgatggtggccacgttgttgtagatctgctgctcgtgcgcgagggcttccatggccgcatcgagctgcgcgctggccttgcgactggcagggctcgccacgaattccggttcgacttcggccgccgcgtagacgcgctcgatggcctgtacgagccggtcgtctgctgctgcggccgcatgcgggtcctccgcagaggcggaggcgcgcgaggccgcggcaacgtcgtccagggcgcggtatacgaccgagggactgctggctacgcgctgcgcggcagcctcgtcctgagagacggcggcgacgaacgccggcaccgcctccatgccgcggcgacgcaatccgtccaagcggttccaggcagcctgcacgtctcgctgctgcgccttcaagttggctacgacgagcccgcagagcgcggcgacaaggcccacgaggacgatggcaatgagggagaggttcatcctggcggtcctttcacacgtgtgatccgcccattgtagggctagctcgcatgcaggacgaggagggaccttgctcgttggcggcttgacggcgaagcgttgtcgtcaagcaggcgcgatacaggcgcgagacaggggaatgagacggaaagaaaggaggaccgcccgaggcggtcctcctagagatccgagcgtgaagccccgaacgtgtgcgcacggcacgaaaagtggcggctagttcgtcgggtcgggcgtcggcgtcgggtcgggcgtcgactgcttggcgaacaccacggtgacggcgatgctgttcttcacgttgctgacggtgaagctgccgccgctgggggacacgctgtagctgttgccgttcgtgtcggtgacggaggacaccgtgtagccgctgttaggcgttacctggaaggtgatgctgccgccctcttccacctccatggacgacggcgacacgtagccgccctcgcccgagaccgaggctttcacggtatagctgtcaggcttcgccttgccgctgctcaccacgatgttcacggtgccgccctctttgcccttttcgccggcggaggggctttggctgatgaccaggccctcggccacggtgtcgctgttggcgtagtcggtcgtcacggagaagcccgcatcgttcagcattgcgaccgcggcgccctcgcgctggcccacgacgttgggcacgtcgacgccctcggatccgagcgacacgatgtactccacggtcgagttcttctcaaccttggtgccgctttcaggattggtgctgatgaccaggcccttttcaactgtgtcggaataggctggcgttcccgcgctcggcacgagccccttgtccttgatcgcctgcttcgccttctcggcgtcgaggcccttcacgtcgggcacggtgatctgcgccacgccctgcgatacggtgacgttgaccttcgagcccttctcgcgcttgtcgccggccttcgggtcctggccgactatctgcccggccggaaccttgtcgtcgtacttctggtcggtggtgcccagctcgaagccggcctccttcaagatggccgtggcctcctcgacggtcttgcccgtcacgtcgggcacggggtcgcccgtggcgaagccgcccatgagggcgaatgccgcaaggcccacgatggccagcgcggcaacgatgcccaccacgatgccgatggtcttcttgttgttcttcttcttgccgtcgtcggaacggtagttcttcgtgccgccgggggttcccgcgggcttcgtgccgcccgcgcccatgccggcgggcatgacggcggtgccgtctgccatgcccatgggaggaacgacgccgcccatgacggccgtctcggcgctggtgaagccgccgcccacgttcacagggcgtccggccaggtagtcgttcagcgcgtagcgcatgtcctgcgcggtggcgaagcgctcggcggggttcttcgccatggcgcgcatgatgatggcttcgagcgcggggtcgatatcggggttgatctcccgcggcggggccggcaggtcgttcacctgcttcatggccacgctcacggcatcggggccgtcgaagggcagcttgcccgtggcggcctcgtacagcacgatgcccagcgagtagatgtcgctggcggcggtgagctccttgccctgcgcctgctcgggcgagatgtagtgcgccgtgcccagcacggacgacgtctgcgtcatgaccgagttcttggcgcgcgcgatgccgaagtccatgaccttcacgttgccgtcgggctgcaccatgatgttctgcggcttgatgtcgcggtggatgatgtccaggttgtgcgccaccgacagggcctggcacacctgcgagccgatctcggccaccttgcgctggttgatggcgccgcgctcgttgatggccgtcttcaggtcgctgccgcgcacgaactccatgacgatgtagtacgtgccgtcgtcctggccccagtcgtacacgttcacgatgtaggggctctgcaggttggccgcagcggcggcctcctgcttgaagcgcttggtgaagttggggtcggcggcgtactggggcagcatgaccttcaccgcaaccaggcgtccgagcacgttgtcctgcgcgcggtacacctcggccatgccgccgatgccgatgcgctcggttatctggtagcggttgttgaacaccctgcctgtcatgtttccggtcacgtttctgctcctttaggtcacatgctcagtggcggtactgcgtgtcaaggttgatatgatcgccaccagcataccttatttacaaaagcccttgcacctgcagggccgttctcaacacattctgcgcccgttcggtgcccatgccctcgtcggcaagctcaaggttgatggccaccacgacgcgcgggttgtcggcgggcgccattcccacgaaccagctgtcgttgccgttctccttctcggccgtgccggtcttgccggccacctccacgccggggagggcggcggccgtgcccgtgccgtccgtgacaacgcccttgagcacgtccttcacgcggttggccgtctccttgctcacggcctgcaggaacttgttcggcgtggcggtgaagctgcgctcgccgttggcgttgtagacgccctctaccaggtaggggttcatgatggcgccgtcgttggcgatggcgcagcccacgagggccatctccagaacggtggcctggggcccggcagggctggggtggttctgggggttcaccggctcgccggcggccgaccaggccagctcccacttcgtcatctcgtcgggctcggccatgagcgaggtggcggtgttcagcgtgaagtcgatcttgcggttgaagccgaacttgtcggcgccgtccacgagcttctccgcacccatctcaacgcccagctggccgaacacggtgttgctggacagttcggtggcgcgggcgagcgtgatgtcgccgtaggagttcttgttgaagttcgtgacgggcgcgttgccgatgtccatggtgcccggcgacgagaacacggtgtcctcgctggcaacgccgtcctcgagcgccgttgcgagcgtgacgatcttgaacgtggagccgggggcgtagagcgtctgtatcgcgcggttcagcagcgtgctctcgccgtcggggttggcgttggccttctctatctcggcggcgaagtcggccgcgtcgtaggtgggcgacgacgccatgcccagcacggcgcccgtctcggggtccatgaccacgcacgcgccggcgtagcccgagagcgcgtcctgggccgcctgctgtatcttcgagttcagcgtgagcgtgacgtcgttgccgggggcgccgataccggccagcgagttcagcacgtcggtccagctggcgaagttctgctggcccttcagcgtgtcgttctcggcggcctcgatgccggatgtgccgaattgggtggacgcgtagcccactatgtgggtggccaggttgccggccgggtagacgcgctcgtaggtgccgtcctcctgctgcacgctctgcgcgaggatcacgccgtcgtaggtggatatggtgccgcgctcggtgcgcgactccttagccagcgtatggttgttgccgggcatgttctggtagtagttcgcctgcaccaccatgatgagcgtgaggttggccacgagaagggcgaacagcacggcgaagatgcgcataccgctggtgagccgcttgcccagcgacacgcgcccgagcacgctgttcgcatgcaacgaggtggtggcgctggccatttcctcgcccacgcccgtgccctcgtcgccgcagcgcagcaggaagcccacgatgatgaagctggccagaagcgacgagccgccctggctgatgaagggcagcgtgatgccggtcagggggatgaggcgcgtgatgccgcccacgatgatgaacgcctgcagaaccacgatggacgtgaggcccaccgccacgaacgagctgacgtcgctcttcgcgcgcgcggccgtcacgaaaccgcggatggcgaagcacaggaacagcagcagcacgccagctgcgcccagaagcccgatctcctcggcgataatggtgaagatgaagtcgctttccgcaacggggatctggggaagcccgttgcccccgccggccaggccgcgtccgagccccacgccgaacaggtcgccgtcggcgatggagtagagcgattgaaccagctggtagcccgtgtcctgcgcatcggcgaacgggtcgagccatatgtccacgcgcgtttgcacgtgcccgaacgccaggtacgcgcccactccgccgacggcgatgagcccaaggcccaccacgaggtagaacttcttgcccgtggccacgtagagcatgataaggaacacgaagaagaacacgagcgcgctgccgagatctttctcgaacaccacgatgagcaaggcgaccagccacatgagcagaagcggcagcagcgtgcggatgtcgggcaggttgaacgggcctgcgcgccacgtgaacacggagagcatctcgcggttctgggcgaggtagcccgccaggaacagcacgatggctatcttggctatctcgccaggttggaacgagaacacgccgggaatgccgatccagatgcgactgccgtagatctcctgtccgatgaccggcagaagcggcgagagcagcaatgcgaagcccacgatcatgagcgtgtacttgtagttggccaccttgtccaggttgcggaacagcacgagcacgagcaacatgcacaccacgcccaggaacagccacatcacctggttgatggcgatactggacttgtcagcatagggtgcgagccgcgtgatgaacgcgatgccgatgcccgacagcgcgaacgcgatgggcaggatggccgggtcggacttgggcgcgaacctgcgcacggccaaatgcgcgatgacgaacgccgcgaagatgccgatgggcacgcccagcgtggtcaggccgagactctgaccttggttgacggccagcatggcgaacagcagcaccacgatgggcgccgctacgcacagcaggacgagctcgatgttgcggcgcgtcatgcggcaccgccttgcaagttggcaggctccggcgggttcgcgtcgtgcgtgccgccggtgctgccggctgcgtcggttgcgggagcgccggcatccgccgcatcgtccccggttggcttgctcttggcgtcgatgtcctcttggtactccttgaccagcgactcggcggcctccacgctgtcgacgcgccagccttccttaagccgttcctggaacccgggctgcagatcgctcactgacacgtcggtggtcttcaccagctcggagtagccgaggccgaacacgctgcccggcacgccgcggtagatggccaccttgccattgtcgtttgcgaggtaggcggcgttgtgcaggtactcgttcgtgccccaggccgtgccgcccacgatggcggcgaacagcacgagcacgagcgcgatggagagcttcgtcttgcgcgctatcttcttgcggcgcacctcggcgaagcccgtgacgtccgccacgatgacggtgacgttgtcgtggccgccgttggcgatagcctcgttcaccagctgcgatgcgcagcgctgtgggtcgcgcacacgggcgagcgtcgattctatgtcgttgtcgcacaccatgcccgacaggccgtcggagcagatgagcaggcggtcgcccgtctccacgttgatctcgtacagatcgggctgcgtatgcgggtcgctccccagcgcccgcgttatgacggagcggttcgggtgcgtgcgcgcctcctcgggcgtgagctgcccagcctctatcatgtcggccatcaggctgtggtcgcgcgtgagctgttggagcttgccctggtgcagcaggtaggcccgcgagtcgcccacctgggcgatgatgagccgttcgccctccagcatggcagcggtcatggtggtgcccatgccctcgcggccccgcccctcgtgggcagcgacgatgatggcgcggttcgcctcctccacggcgcgtcccagcgcctcggggtcgggatgcgcgggcgcgcgctcggccagcacgttcacggcgatttccgaagccacctcgccggctgcgtgcccgcccatgccgtcggcgacggcgaacagggggggtgccaccacgaggctgtcctcgttgtggtcgcgcaggcagccgatgtccgtgcggctcccgaacgtggtggtggcgcccttgcgcgtgtgcggcgtggacttgtacgggcgctcggcggccatcaggcaaacctcacgcggatggccacgtcgcccacgttgaccacgtcgccgttcttgagcgctaccggttcgccgatgacctggccgttcacggcagtgccgttcgtcgatcccaggtcttccacgaacaggttctgccccatgagggagaagcgcgcgtggcggccggacacgtaacccgcgcccaccacgatgtcggcgccggggctgcggcccacgatgacgggcccgcgcacgacgatggacacgccgcgcagctccttcggcccgcgctctaccgacaggttccaggtgcgctcctttttacgttggccgcgcacgaggcctatccccgtcttcatgagggcgaacaggaacaggtagagcagcgcgacgaacagcaggcgtccgatcagcagtacgacgtcgatcacgagtacacccctcgctctgtgcggttaacaactttcacgcatgcgcctttcgcgttattgggcctgggtgaacacgtagttcgtcatgccgatggtgatacggtcgccctcgcgcagcgggtgcgtggcgatctccgcgccgttgacgagcgtgccgttcgtggagcccaggtcggtgatggtccagacgccctggggctcgaagcgcagctcggcatgggtgcggctggcgttgatgtcgtggacgacgatgtcgttcttcgactcgcggcccatgagcaggcgcgccgaagccagcgagtaggtgcggttgttcgtggtgtcgatgaggctggcgcgcacggctgcctggttcggcacggggctcgcctgcgccgcgccgcctgcgaacaccaccgtgtcggcggcgacgggagcgccggcgggtacggctgcgccgggctgggcagcgtaggaggcggcggcgcctgccatgccagctgcggcggcccccatggcggcgccggccgcaccggagacgggcgcaccctgcgagcggccgttctggcggtagtcgtcgaaatcctggctgtcgaacgtgtactcgccgtagtcgatctcgtcctcgggcacatagggcagcggcggcttgccgttcgggtcgaagtcgccgtaggcgtcctgtgcgccgaactcatcgaaaccggcgtcgaggtcctggtaaggctggggctgcgggtgggcgggcgccgctgcagcgttggggtagcctgcggcattcggggcgggatattccggcgccggctgcgcggctggggcatagccctgctcgaccgccccgggaaagccggggtaggcggcatcatcgtaggcgtcaactgcataggcgggcgccggggcgccgtagccaccggcgggggatgcgggggcgggctggccgtagccgtagggctgtgcgggcgcggcgccgtagccgggcgcgggcgctggggcgccgtatccggccggggcctgaccgccgccgatgccgtagcgctgcatctcctcggcgcgcagctgggcgattatgggcgccgccaccggttcggcgatgacgtcgaacttgccgtgcttcagcccgtcgtccacgatgaaacgcacgagcggctggccgtccatgaccaggccctcgtccgcggccttcgccgccagatacgtctccgtctcgccggccaacgtggggtagtagccgaacaggcgctggtcgtcgtcggggttcaccagcaccgtgtagagcgtgggggcgtactgcttgccggcgcccaccatcttctcgcggcgcatctgcttctcggccttcttggcaatctgcacgggcgagatgggcgcgttggccatgcggtcggccgcgccctcgaacgtgtcctccatcttgccctcgaacctcgaaagaaagcccattgcgtctcctttatagcacgcgcccggcccgggagggctgcctcgcgggggcggcgccgagcgtcgcatcgtgcgcggggcgggcatcgtgtgcgcatcaacggttcgcgcctgcgcgaccctggttgccgtgtgtccctgcatatgactatgcaatgctccatcttgccataaacccgttgccttctcggcatcctttacgcaatcgtcattattctgaagagcaggaatctctttccggaatcttcgatggagcctttccttgaacctctcctgtccggggttttcgccaaactgctttggcagtggcttccgactgcgccgcttcgccttccagatcttgagatgctcgccaggactcggtgtgctcgcgccgggagtttcctgaaaatcgtgtgccacgctacgaagggaggggcatgtcaagtgcagcgtactgcgcaggatgagcggccgtcgctacgtgtggcggccagtgagtgtgcgagcatggcccgaccgtgcggtgatccggccgggccaagcgctttacttggctgcgtcgtcctcttccagaatgaggctcacggctttctggatggtttcgcggtcgtagggaactcccatgaagcaggagttgatgatggcgccttccatgaacgcgcagaggatcttcgcgcgctgctcgtccatgaacggcgcgcacctgcgcaaaaacgactcgaaggcgctcctcgtgatgtcttcgacgtccggatcctcgatggccgcagcatagagggcggcgtcggcgtgcacccgctgctggtccgagagatactcgttgatgaagtcggcaagcgccgtcgcgttctggattccctgctcggtgacgcggaacgcctcgtcgtactcgtgctcgatcctgcgggcgacctcggctaagccctcgcggcgcagctcgtcgatgctcttgaaatactgggtggtcgagcccaagggcacgccggcctcttccgccacccgcctgttggtgattttgctgcttccctcacgtgctatgaggttggcagcggcgtcgatgatggcctgccgtcgaccggcagggtctcgcggcgcgcgcttcttcggcttcttcccggacctctctgtcttcgtcgtgtcttcttccacgggcaacctcctgtgccgtccgctgtcttactgctgtctccgtgatcctattctagtcgaaatttttcttaatgtacacttgaacattaactttccagctgctatgctttgtagtgtacataagtacattaactaagttccaagggttttcgaagggagaagaggtcgatgaacatgaagaggataggcaccctggcagccgctttcgccttgaccgcgtttgccgcctgcgcgctcgccggctgcggagcgagtctggaccgcgaagtgaccgtgcaggacataacgttcaaggtcccgaaaacgtggctggaaagcccgggcggcaacggctcgagcggagcggtcgtgttcacggaggacaacgaggacttggatgaggacgagacgggcaacagcctgactatcagctacgagaagcttggcgcgccgacggccgccgttgtcgaggaacaggtcggggccgccgagcaagagggcgaggtcatcgaggaagagggtgccaagccggctgagaaggccgaaagcgccaagcccgttgctcgcacggcagccgaggccatcgcggccaagcggaccgatctggagaagaagtatgggattaccgcgtggagcatcgacaaagagaagtccaaggtgatcgatggtgcccaggttacggtgtacgagtacagcttcgtcaaggacattgagggtcagaagcgtaagtacgagagcaagacggcctacgtcgtcactaccgacacgctctacgagattgcggtcgtgggcgacaaggcggacatcaacggcgtcgtggacagcatcgagctgtaagcgtcgagaaggagagcaacgtatctgagagaacaccggtaggaaggtacacccattatggatgattctattgttatcaagccgcaaacgctctcgaagggccgtttgtggacagctctcatcgcgatattgttgggacagttcgtggtcgccatcgacctcaccgttctcaacatcgcgctgcccgagctcactcgggacctcagtccctcgtcagaccagcttctctgggtggtcgacgtctactcgctcgtcttggcgggcttcctcgttgccaccagctcgctttcggataggttcggcaggaagaagatgctcctcgcaggcttcctgatctttggcatcggctcggtgctggtcgtgttcataaacgacgcaagccagctcattgccatccgggccttcttgggtatcggcggtgcgatgatcatgcccatcaccatatccatgatccgaagcatcttcacggattcgaaggagcgcgcgatagctgtggccgcctggtcggccatcagcgccatcggcatggcggccggcccgctcatcggcggctttctgctggagcacttcaactggcactcggcgttccttgtgaacgtgcccatcgtgggcgtcgccttcctgctcggcatgttcgccatgccggaagtgaagctcaagaaccccgggcgcttcgacgttctgggatcggtgcttgccctcgccggcatggtagcgcttctgtggggcatcaagcaccttgcggccgaactcgcgttcgacgttcccggcgcggcggcaaccctcggcggcctggcgctcatggccctgttcgtcttccgatgcctgaagtcgccgcatcccatcgttgatctttcgctgttccgcagccggacgttctcggccggcgtcatcgccaccatggcgtgcacgttcgccctggccgtgctcttgtacatgctggcccagtggctgcagctggtcaacggcgacggcacgctcgaatcgggcatccacctcattcccatgtcggtggccacgctgatctcgagcttgggcgcggccgcccttgccatgcgctatcaggcgcggcacgtggtggcggccggcctgggactcgcttcggtggccatgctcatgatgttcttcttccaggacgacctctccctcaccgtcgtcatcgtgtccacctgcctggtgggcctgggaaccggcgccctggcaatcggcgcatcgctcatcatggccgagacgcccgttgagaaggcgtcgagcgcgggcagcctccaggagatatcctacgacctgggcaacgtgctgggggtggctatcctgggaagcctcgcctccatcatctaccgctcggagctcggcaccggcgccctgcgcgccatgggcctggacgggcagctgatcaacgccgcgaagcagtcgttcgcggcgaccaccgagatcggcaacatgctcggaatgcccgagctgatccaacgaggtgcggacgcgttcaaccagtccctggccgtgacgtgccttgcgggtggcgttatcatcctggtggcggctgttctcgtgcggaggctcatccctaaggggttgaagatcaccgaggaaagcgatgcggaagtcccatcggacgatcgctcgctgcccgcatcgggcgaaggcccgtcggttgacggcggcgatgtcggtgccgcccagcctgagcctgccgggaacgcatccgccgcgaacctggacgacgtgaagatgctgcccggggccttccccgtgcctgccgcgaccctgtcccgcgggggaggcgccctggcgcagtctgcggcgattgccaagatcattgaggatgcggggataggcgtggtgaacgtgcccctcgacatcgccaccttggatcggatgggggagatgtgcaacgacctggggatcgacgtgaccacggcgttcatcgtgctcgccaagaaggcggtcgaggaaggccggctcccgctcggcctgcccgccgacgcggggtgcggcgccgaggatctggctcgcatcgaacgcaacgtggaggccctcgacgagggacgcggggtaatgcacgagtcggacgaccggatgaggacgtgggcccccgaggcatgggcggactaccgctcgtggaagagccaagacgaggatgtccaccgcttggtcaagacgctcgtcgcgagcatcgagtccgacggagcgggcgcggggatcggcgatccccggccgctgaaggcaggcgagacgtcgctctggacgcgccgcatagccgacgaccacctgctggtgtaccgcatggacggcgacgacctgcagatcgtcgcgtgcagaagccacgccgacaccccggtgcagccgtcgtaggagccttccctccctcctcttcggcttgagcaaggcggccctcctattcgggagggccgccgttgctttgtaggatacccggctaatcagacagagggtccgaatcgttcggtaagagccgctcggttgccggtgcagcctgcgcttcgagctgcgttttgtccgattccgcctgtgaccctacttgcgcatctgtccccgcgtccgcctttcgtgcggcacgctgcggcaggtactcgctcaccacgatgccggcgaagatgagggcgaagccggcgaacagcggtgccgagagcagctcgcctaggaacagcaccgagaacagcacgccgaacaccgactccgtggccaggaacagcgaggcgggcgccgggtccacgtgggccactgccaggttctgcagcagcagagcaacgcaggaggcgaatacggccaggtaggccagactcgtccacgtgtcggcgccgagcgccgcgaagttcggcatcggctcgagcgccagcccggccgcgaggcccagaaggcccgccaccaagaactggatgacggtaagcaacgtcatgtcgcacccgggcgcgaacttcgccgtgtacaccacatggaagctcaaaaacagggcggacagcagcgtgatcaggtcgccgaaacgcaacgagaacccggccgcgcccgcgaacgacacgcatcccacgcccgccacgcacaccacggcggcggcgaggttgaagcgcgtgggccgcggcccgtgcagcgcccagccgaggaacgggatgatcacacagtacagcgacgtgaggaaggagctgttcgacgccgtggtgtcggtgagcccggtggagttgctccagtaggccaggaacaccatcacgcccagcacggagcccttgcacaggtgctcggcgtcgatgcgcttcctgaagcggggcagcatgaccacgcccaggatgatgcccgcggccgtgaagcgcacgcccacgatccatgcgggcgggaacgcatccaccgtcgacttgatgacgacggttcccagcccccagatggcggcagccaccagcaagaacgccttgtacgtccaaagcggcagcgaagcgggtgttttcaggatgcgggccatggtcgctgcatcataccacggctgttccgacagggcggcgtccaggtttcagcttgctgttgaaagagggcatcagaagccttgcccgaacggcgcatgctacgatggggcggttaccatgacgaggaggcgaaacatgcccacgttccgcgaggtgctgcgtgcggccgagatcaccatcaaagacaacacgtccggtcgccgcatgcatgagatagagaagatactccgcgcccatcacgcgttctccggcctgacgcccgagaaggccacggccattctcgaggatctgggacccacattcgtgaagatggggcagatcgcctcgaatcgcagcgatgtcattcccaaggcctatgccgatgcgttcaagcagctgcgcgccaacgtggcgcccgtgccgttcgaggtgatcgtgcagacgatcgaggaatcgctcgggcacccatggcgcgagacgttcgccgacatcgaggagaagcccctgggctcggcctcggtagcgcaggtgcatcgtgcccggctggcgcaagggctgggcgacccggtggcggcgggcgcacaagaggagcggcccacgacgaacgcggcaggaggcggcgccgcaacggcgcaggggccggtggtggccgtgaaggtgcgccgcccgaacgtggtggagcagatggccgaggacatcacgctcatccggcacgcgctggcgctggccgacctcgcgcacatgaccgacggcatcatgctcacgctgggcgatttggtggacgagctggcgcgcacgacggccgaggagctggatttcaccgtggagctgggaaacctggagcgcttcggcgccgagctggcgagccaaccccatgtggagagcccccgcccgtaccctgagttcagcaccgatgaggtgctggtcatggagtacgtggagggcgcgcacatcaacgacctgcccgcgctgcgcgcccagggcgacgacccggccgcactcgggcgccggctggcggagagctacgtgacgcaggtcatcgatgacggcttcttccatgccgacccgcatccgggcaacatcctcgtgcgcggcgaggacatcgtgtggatcgacctgggcatgacgggcaccctctccgcttccgagcgcgccatcgtgggccggctgttcgcttccgtggcgaagaacgacccatacgccctgaaggacgcgttgctggcgttggcgaaggcgcatggcccggtggaccacggcctgctgctcggccagataagcgcgctgctggattcgtatgcgtcgatcgacctggcggacatcaacgtgggcacggcgctgctcgacgtcatagaagtcatgcgcacgcagaacctcacgctgccgccgtcgctcaccatgctcgcgcgcggcatggtgaccatcgagggcgtgctggtggacatcgcgccggaaacgagcgtggtggagatcatctccgaccacgtgaagcggcaggcgctcagcttcgatgccttggaatcgaaggcgaagagcctgctcatggcctcggccgcttccgccgaggcggcgacgcggcttcctacgcaggtgtcgcacacgctggacatgctcgatcgcggccaggtgaaggtgggcgccgacctgcatgtgccggcggacttcacggcggcgctctacgcggtgagcggtaccgtggccatggcgctgatctcggccggcctcttcgtgggctcgagcctcatcgcccagacggccatgcagccccagctgctgggcgtgcccctgctgggcatcctcgggtacctgggcgcgttcgtgctgggcgtctacgtcatctggcgcgtcctgctgacccgccaccagcagcgcaacgacgagaaagtggagtagggggttccgccggcctgacggccgtcggaacctgccgacgctgcgaaaggccgtggcgcccgatcttcgcgggatcccaaaagctcacgttccgaagtacgcttcgctttcgcgatcccgcgaatctcgggcaccacggcccttctcgctgacttactgcgccaacctgtgcgtttttacccgaacacgacgatggcggcggggtccttcacgcgcagggcggccgtctccatgatgcggaacgtgtggttgaagtcggcgagctccaggtagccaaccgagaggtccaggcccacggccaggtccatatactcgggctcggcgcacacgagcgcggccttgccgggggcgagggcgctcgtcatgaacacgttgtcgccgatgagcttctggatgcggtcgatctccagcatgccggtgctcggctgcaggcgctgcaggtccaggaacaaatcgggtgcaaccaccagcgcatagcggcccaggtagccggtcttggccagctgcgaaacggcggcggccacgtcggagaagccgttctcgccggccttccaatcgcccttcttcactttcgccgagcccttcacggtgagcaagccgtcagcgccgagggccttgctaccgttcaggacgaggtcgtcctcgcggcgcgcggccttcttggcggcggcgacggcggcggacaggtcgatgggcaggccggtttgcgcggcgagctccaagtcgcgtccgagcagggtgaagtcctcgtagaacagcggcagctccagctgcgtgcgtccgacgatgcggccgatgccgtcttccaagatctcttccttgcccacgccgtcaaccgcgacggtggtggtgccggggcccagcggcccgaacaccttcaggaagcggcggcaggcaagctgcttgcgcgccgtgccgatgacggtgtcgtcgatgcggttccagagctctgccgacaggtcggctgattctcgtgccaagtagtccataatgcggtcctttcgctcatgggaaaacgatacgcggagcagatggcttgcgccgggcggtcgagcagcttgccgcgcggccacctcgtagcaaacaaatgtttcacgtgaaacattcggtagccgtcaggcgggcggtcgtcgggaaaaggtgccgaagcgagcgtccggtgggagggcgcgcccccaggttcgaacgagtgtttcatgtgaaacgctcgttcgaggcaggcgttcgctactctgacaggtcgcctacggtgggagcggctgcgggcgtctcgggcgccggggcaatctcgccgtccgtcacgatgccgagctccgccagctgctcctgcacctctccctcgccctccaggaagaactccgtttccttggggtccagatggcgcatgagcgtgatgagctcgcccatgtgggccttctcctcgtcgcggatgtcggccagcacggccttggccgccgggtcatccgtggccaggtagtgcgcctcgtacaggaagatggcctcgagctcgcctgcgatgtcgatgcgcagggcctgcatgagctccgcgttcgtcatcttgcggtcgacgttgccggagaacgggttcgggaagttgggcatgatggtccctctctttcgctgtgccgcggcggtgcggccgactgtccgaagcacgaagcactcggacgagcaggcgatccgccgagcggcggttgtctctcttaccttgggggatatggtactgcggatgtcagcaaaagtctcgataaataatcttccttattgagaacttctctcaataagcacaattcggcagctcgaagaaagccggcacgcgtgctgtgcggctattcctgctccgtagcctgccgggcggccagacgacggtaggccaccaagcctgccgccacgagcgcgagggtgagcacgacggtgacggcggccacggcgtagttgccgtcacccaacgcaccggcagccagcgtggacgagacgatggaggggatgcggcctatagtggtgagggccacgatgcgccagatggggctcgttccaagcccggccacgtaggtgagcaggtccttcggtgtgccggggatcaggaataccaggaacagcagcagctcgaagcggcgcgcgtcacgcagccaccgcaccgacgctatcttatcgggtggaaagaacagccctacgaggcgcatgccgaaggtgcgcaccagcaccatgaccagggcggtacccaatgcgctggccacgaggcaccacagcgtgccctcccagaagccgaatgcgtagcccgcgcccagctcaagcggctcgcccggaaggaacgcgagcaccacctgcgccatgttggccacaacaaacagaatgcgccctagcgccccggcgtcatcgacccacgcgcggaaccgcggggcgtcgcccacgaacgccagcagctccggtccgaagcgcacgcagagcgccgcgagggcggcggtgaggcacagcaggccggcgacgacggcgatgcgcttccgtacgatcgcccggtgcccgacggagcttttctgcgaaaccgcttccgtcgaggcgtcgttgcgcgcctcgcctgcgacggcgggcttgcgcgacctagtcgtcgcgactggcccgtgcgtttcgcctgcccgccttggcacgttgcccgccgtcgcgtccgcctcagcgacccggtgcgcccggcgccctgcggcgtcgccgggtgtcgggcgcgggacggcgggggccaaaggggtcgcggtgtcttccatgggatgctccgtttctcgggtgcgttcggtacgcctccgatgctacggggcaaatatctactggctgtcaacggcgggaaaaatcaaggcaaagcgcgccgtcgcccgcgcgccgccctcggcgcggttctccaacgccaagtcgccgccatgcttgtcgcagagcagcgcggcaatgttcaggcccagaccgaagtggtccttcgacggcgtctcgctgaagaacggcgcgcatccccgctccagcgccgcgggcgagaagccgggcccgtcgtcctctaccgcgagcacgaggagcccatcgcgcacgtccagccgcgcatcaacgcggccgtcggcgaagcgggcggcgttgccgacgaggttctcggccacttcctccaccagggaacgatcgacgccgagtacggggcgctcgacgttgcagcgcgcgctgatggagagcgcgaatgcgacgtgcgggcccgtgctacggttcccggctggcgccttgcccgcctccacggtcgcccgggtcccgccggcttgcgcgcagagcgaccggccgatgtcttccacggcgtccgccacggcatcgaacggctgcgcatccggccgcacggcgcgatcctccagcttttgcaatccgctcatggcggctacgtaacgctccaggcgctccacctgcgcggcgagcgaggctgcagaggatgccagctgctcgggggacgcatcgccggcctgcaggtgtgcctccagcagctccacctttcccttcaggatggtgagcggcgtgcgcaggtcgtgcgcgaacgcggcgttcaagcgcttgcgctcctcggctgtgcgccacaaggcccgctgcgatgcggccagcgaggtgcgcatcgcctcgaacgatgctgccagcctgcccaattcgtcggagcgtccgtatgacacggagaagtcgaggtcctggtcggcgatcttcgccgccgccgcatcgagcgtggagaagcccggcgccagccgcatgcggtagaaccgccgcgccgccgcgaagatgcatgcgccgaaccacagcgggaacatgaggaacgtcagcagtccgaacagcgtggaaagcgcccgtgcatcctccgagggtaccgtgtgcgcgtagtagcctatgggcgatacgagcaggtcgccgaactgcgatgactccgacgcatcgctccctgtctccgtgtcgaggaacgcacggtacgggttatcggggtttttggccgcccattcgtcgaacagcttgcgggcgcgtgcgtcgtaggcgggaacgtcctgcaccgcgatgccctcctcgccctcgaaggcggaaagctcgctgctgtccgcaaggtacccttcgagaacgagatcgcccccctcgccggtttccacccggtacgcatacgggtagctctgggcgctttccaccagcaggcttgccggagggttgtcgatgggcaacggctcacgcccgtcatcggcacgctgcacgaacagctcgttgccctcctggtcgatggcaagcgagcgagcgggcacgagcgcgttcgtcccggtgtcgtacaggtagagccccgacgtctcgtaagcgtcggcggtcacttcgttctgcagcgcggcgaacaccgatgcggtgacggaggaaaggacgagggccgccaccaggaacaccagcatgtagcccatgaacgaggtcttgagcgatgcgttgcgccaccgctcgcgcaggcgggcgatgcgtccggaacgtgccggggcggccgcacccgacggtccgcccggatgcgtcggcatgttggcgaccggggcgccgccggccgtctccgcgctctgccttcctcctctggcgcgccgcttcctcatgcgcgccatcggtaacccatgccccataccgtctccacgggatcgtgctcggcgccggccgcagccagcttcttgcggatgcgccggatgtgctccgtgaccacctgcgaatcgctctcgctctcccaaccgcccacgcgctcgtggatgcggtcgcggtcgaacacctgcccgggatgcttcgacaggaacgccacgatgtcgaactcgcgccgggtgagctcgacgggagctcccgccaccgctaccgtgcgggtccggtagtccacggcaaggtcgccgtcgaagcgtacctccgtcttcacctgctggcgctggtcgcgcgcgaggtgggcgtccacccgcgcgcccagcacggcgagcgagaacggcttcagcacgtagtcgtcggccccgcaggcgaagccctcgagcgcgtccacgtcctccacgcgcgccgtgaggaacaggatggggcaggtcaggtgctctcgcaggcggcggcacacctcgaacccgtccaggcgcggcatgcccacgtccagcagcacgaggtcgggtccgtgcgcggcctgctcgagcgcttcctggccgcttccggccgtgagcacgcggaagccccggccgacgaagtattcctgcagcatctccactatctcgggctcgtcgtcggcgaccagcaacgttgcctggcgctcgcactcggtcatggcaggttctccttcgggatgtcggtcggccgctcacgttggagcgctcgaaggccgagcatagcacgagaatgtcgacaaaccatcaacggccgtgcttcctccatcgttccgcaccccgcttcgcgcaattcgggcgaaggccctaccgatctgcgcgctgcttcacgatgagcacgggcacggcggcctcgcgcagcacgtggctgctcacgctgcccaagatgccgcgcagggcgcccaggccgcgcgagcccatgacgatgaggtcgcaggcatgctcgtcggcgtaggtcacgatctgctcgccgggcaccgtctcgtccagaagctcgaccgttatctcgttcatcaggcccttcaacaggccgtcgatctgtcggtgaagcgccgcgtccgcttcggcgagcgcctcgtcgtagtgggcgtgcagcagcacggacgacagctcgtcggtggtgttgcggccttccttctccagtttctctatgaccaactgctccgtgtcgactatctgcacgatgcgcaacgcggctcccgggtcctcgcgggcgtagcgcacggcctcggccagcgcggcccgcgccgattccgatccgtcgtagggaaccatgatgttgtcgtagagcatggccgctcctctcgccgggcgcccgtcgtgggcgcggtcacgttggctccagtatagcagggcggctatcgcaggttctcccgcagccgtgccgggttttccacgcgttcgcgacgtcgcgccgcaaggcccgatccgcaaacgcaggcgagggccgaaagggccgcggcgcagagaaccgctgtagttgcggcggcgtcgcctgtgggggcgagcttttgcgcgtcgccgggcttgggcgcgggcaggggagcaggatccgccccgcccttcaccgtgatgcgaccggcgccgttctcgttcgcgtaggcggagtctgcggccaccacgccgcccaggtcgttctggatgaacgagatgagcgcctcgtaatcgagtccctgttccgccaccagcacgttcgcgtcctcgaacatggagaacccgtcgccgccgtcgcgcagcaggtaggtgatggacgcgacggtgtacgtggcgcccaggtcgatgggctggccgttcacccgcacgttctgcacgcggcgcgggccgtccgcgcccgcgaaggcgccttcggcatccagcttcacgggcgaggggacgtcggtgcgcacctcgaaggagagccccgaggtttgcaggaaggagccgctcggctcgggcaggttgcgcacgcccatttccagcgcgtcgacgatggcctggcccgtggcctccaccatgcagagcgcgttggcgaacggcagcaccgcgatggcgtcgccgtaggtgacctcgcccggcgccacgtccgagcggatgctgccgccgttcgcgagccctatgtcggcgccgagctcggcgcggaacgcgtcggccacgaggtcgcccaggttcgtctcgcgcgtgcgaacggcccaagtgaagccgtcgtcctcgtatgcccgcagcttcacctcggaacgggccactaccgcatcgagcgttttgcccagctcgtcctcgatgcccttgatgaaggcggcggttccggcgtcctgcgtcacgggcggcttcgcgagctcggccgagatcgtgtcggtggcggggtcgatgacgatcttcccgcaggtttgcagctgcgtgccggtctgtgcgagcaccacctcctcgccgtcctcgttcgcaacgcgcctctcgtactgctcatgggaatggccgtcgatcacgacgtcgatgccggaagtgttcgcgatcaccgtgcttgcgcgccactgcgcggcgacgcccctctcgcccaggtgcgcgagcgccaccacgtagtcggccccggcggcgcgcgcgtcgtcgacggtctgctgcacgcggtcgtagagctcctgtcccgtttcatcctggcagaatccgtaggccaggtttccgtcggcgtccttgaagtgggcgggattcgatgcggtgagcgtctcgggcgtggtgatgcccacgtaggcaaccttcgtggggccgtaggcttccatcacatacggagcgaactcggttttgccggctgacaggttgtcgaagttgcacgacgtgtacgccgcgttcgaccggttgacgaggtagcgcagccggtccatgccgtagtcgaactcgtggtttccgggcacggccacgtcgtagcccacctggttcatgatgtccaccagatacgacccttcggagagcgtgccaatgggcttgccctgcacggcgtcgcccgcgtccacgagcgcgacgttgcccgcaccgaacgcggcctcggcctccttcttgatcgtcgagaggcccgcgtagccgatgctcgtggcgttgccttccttgtcgaaggtctcgtccacgccgcagtgcacgtcgttggtgtgcaggatggcgaaggcgcgctcgggtgtctgcacggtgtaggccttcagcgtggcgttgttgaaccagaaatcatcgctcgcgccctctccgcccatgtcgtcaagggcgaggtcgaaccagttgtcgatgccggtgggctcgtcggtgtagtagctctggccgggcgcgcactccgttttggcgacttcgtacgagccgtcgtcgcactcggcggatatctggtacgccccatcggaaaaacgtatggaggacacgaccgagaacgtgtcgccgggctccacctcgaatgccgcatcgcccagctcgaaggtgcgatacccggcgtagtccagggtctggaacgtgctccacatgagctcgccgcttgcggggtcgagccttcccgtctcggagacgatggtggaggggttcttgtacacggccaggtcgatcgtgctgccggcctcgttcacgagggcgctcaccgcgctcaccgtttcaaagccgcgcgcttcgaacacgttggcgaactgcatgggcgtgctgctgtaccaccatccgtcgcccatgcccgcgccgtcgtactggtagatgccgtcgtagacgtgctcggtgctctcggcggcatacgtcgcatcctccgccacgtaggacgtgaagtcgcacaaggtggtgtcgtagtaggagaggtagaagtagcctccgtcgccccagtcctcgccccagctgttcttgacgatccacgcgccgtcgccttcggggggatcttgggagaggatgaacgacggataggaggggaagggggcgtaggacgtcgggaacttctccttctcgaaggagtcgtcccagccgacgatggccacttgatggttcgacacctgcgcggccgtttcgtacgggtcgtactcgtacgcgcaatagtaggcgctctcctcgtggttccagtggaggctcgactcgtctccttggccggaggagcggtacgccgcatccacggctccgcgctccatgagggtggccttgacggcgtctacggcggatgcgtcgcgcgtgtagtcgtagcggtcatcggcctcgttgtaggcgaagacgttgacctccggcaggtagttcacgttttgggcccgcacgtccgagcgcgtgcgcaagccgtcgtcgacgcctcccatgcctgcttctgcctgatgcggggcggccgcctcgtcgacggcgccgtacccgcgcatgagcgtggccgccgccttgtcccgcgtgccgccctgcgtataggcgtcgttgccgttgccggtgacgaaggaatcgccggccgcccacaggcttgcgtcgtcactgtcgtccgcgccgttgtacgcaaaccaggcaagatggcgttcggaaaggtcgacgttggcggcctttcccgttttgagcaggttcgactcaagcgacgacaacgtgccgaacgcccagcagtcgctgtagactccctggtccttcacgctcgtgacgagcgaggcgccgttcacgttgcgcaggtcgaacctctccggcagcgcggcaaacgtcgcgacgcccgcgttcgggttgtatgtcgcgccatcgaacggaacgaacgccggcccccgctccgtctgcaccacggagccagcagggtgcttcgcggatgcggcgggttccgcatgggctatgagcggcatgagcgcacaggcgaacgcgagggcaagggccgctcgcccgatgcggccaaggcgggcgagcaggcttttcggcggcgtgatcatgggcattccttcccgaagggagagcgttgcccctatcctacacggcaaacccgccttaaggaaggtcgggctggcggttcggctcgcatgcgggcgacttcgtttccggcgccgcgcccgcggcatcggccgggtcctccagccgccttcgcatcagttgcagcccgcccaccaccaggccgcccgccacgaagtagagcgggctgaacgtcgccagctccatggccggctgcggcaccgccagcgtgagagggccctgtgcgatggaatacagcgagcccgccatcatgccgaggacggcgtacacggtctgcgagcggaaccgctccaggcagcgccggatgagccgcacgaacaccagcacgccggttgcaacgcccgcggcgaacaccacaagtacgggcaggtacgccatatcgaggctcatcacggcgcgcaccgcccccatgacgggaacgtacaggccgaatatcagcagcagcgtggagccggagattcccggcagcaccatggcggtgatggccaccatggccgcgaagaacacgtaaacggcgagtctcaggtcaagatgctctaccgccacgctcatgccgctgcccgccgtggggttcagcagcgtgacggccacgacgaacgccgcgcccagcaccgcgaacgcaagattgcgcgcacgtcccttcagcacgcgcttctcctccagcgccacaatggggatggcgaacacgatgaatcccatgaacagcgagctgacctcgtagatgtgcgagtcgaagaagctggtcagggccgccgccgacaggccgaacccgacgatccagccgaacgcaagcttcaccaggaaggagagcgccgcgacccttgccggccccttgccgtggaacaggtcgtccagcgagccgatgaagcggtcgtagaatcccagcaggaatgcgatggtgccgcccgacacgccgggcacgctgtcggccagcgccatgcagaatccgcggatgaagttgatgagaagctctttcgccttgcgcatgggggcctttcgcgccgtgtcgtgggcgccgcggcgtggcggcgcaacgcgatcgctgcgtctggtgcaggataacgggcggagggcgaaagaccgggggattttgcgagaatcttacaaagggaagggggacggggccgcactcgacacaagctgcccacaacttcgccgggccggcgcctccgggcttcgggcgggctcgagccgatcgggcacttgacgcgggcttgcggcaacggcgcagtccggcggagcaagatgcggagtggcggttcgggttgggcagtccggcttttacgcctgcctgacgggacaggtggtgcgcaggagcgggcgggcttgcggctacggcgccacgagctcgaagctcgtgcaggcgtcggggctgtccaggagcgtgcgaccgcctttcacgaagcggaagcgcgcaggcacggcagggctctcgcggatcgggcgcgccatagatccttgcgcgggcgcctgcagacggtgaccgcccgcctccggcagctccacccgcagcgtcatgtcgccttggcgcacctccacggccctgtcgctggcctcgcggatgcgcaccccgcggtacgtggcgaagcggtgctccacgcccgctatccacaccacgccgatgcagccggtgaagcgcaggccggcgagcgggatctcggccagggcgagcatgacggatgccgcgcagccgaagtcggtgctctgtatccaggtgtagccgcggggaaagctgtgcccgcggtcgccttccatgtagcctttggcattctcgaagcgcagcgtgcggccgttcagctccacctcgccatccacgcggtggcgcatgctgaacaccgtgtgcttcgtctccaggggcaggtaggcgaacggccccatgatgtcggagcgcagcggcgtgagctcgcggtagcgcaggcggccgaccagctccaggtcgggcgcctgcacgtccagcatcatgccgatgggcgagaacaggctgcggcccacgcgcatgctgcgggttcccgtttggcggaagtcctccagtgggaaggggaggtaatgggcgccgtccgccgtgaccacttggatgaaggcctcgtcctgggcgcggccgggtatgacggccaggatgtcgccgccctgctgctgcttcatgtaccagccttcgtagtacggtctcatgcgcgctcctcgcatcggcatcggtgagcgacgatgatagcatcgcctccgccgcagtcgcgaagccgtcaagtccccgttcgcgaagcgatgaccgaatagaatgccgcgctgggcgagctctgggacgaacaggccgaggagcggttcttcacggtgcgctaaaaacgcacaggattgttggggggggggcgtgatcgaggcttcgaaggaagaggttgagcgcggtcgcccagacggggaggcgtcggacagtggcaatagtgaacaacgttcacaaatacttgcgctttccgttatcatgtctataatgaacgccgttcagaaatatgaacaatgttcattttggagaaacggagcgtgccatgtcattacaacttatcttggcgacaaccactatcagcctcgccctcgtgttctacaccatcggtgttttcgacgagcgccgccactcgctgacgaagcgcaacctcgtgctgttctggacgggtttcgtcttcgacgccaccggcactaccatcatgacgctcatggcccaaagcggcggaaacgccgcgttgggaatgcacgccgtctccggcgtgctggccatcgtgctcatggcggcccatgccacctgggctaccttcacctatctgcgcggcagcgagcgcgcaaagcagcggttccacacgttcagcatcgtggtctggctgttctggctcatgccctacacgctgggcattctgcagggagtgcccgctcttcatctggcgaacttgcaggcaggcatcggctccctcgcggtcgtgtccgttgccgccgcggtcattgccgtgagcacgctgcgttcccgcaagcaccatcacgatcatcggaggtagcgcagcttgcacgcaggcaggttacggaaggggtggccctcgctgcgggatacgccgcaaggaatgccggtgtggtaaggtgggtcgcggcggcaggttctgaggtcgccgctttcgacgagcatgctgccggcgggcgaaagccggccggcagtcaatttgttcccggcgtgaggaaaggcgttcaacatggagagcaagcaaccgtccccgatcgaccttctggtggaagcgcacgccgggctggagaggcagggccccggctgcgctaaggagacaggtagggctctcgccttcctcggcgatctcgaccttattgcgaacgcggctgacttgggctgcggaaccggggcccagacgctgctgctcgcgcagcacctgaagggatcggttgtcggcctggacttgtttccagccttcgtcgacgtcctgaatgggcaggcacgcgagcaaggcgttgcccaccgggtgcggggcgtcgtcggctcgatggatgacctgccattccagagggagtcgcttgacctgatctggtcggaaggtgctatcgacaacataggtttcgagaggggtctggcgtattggcacggcttcctcaaacagggaggttatgtcgcggttacctgcccctcctggctcacggacgagcatcctgccgtcatcgagcggttctgggccgatgccggaagtaggttggattcggtggcctacaacatcgaggcgctccagcgatgcggctaccagttcgtcgccgcgttcgccctgtcggagacgtgctggacggacgagtacttcaccccgcgcgaggcggcgctcgaaggcctgctgcggaaataccccggcaacgagatcgtggaggccttcgtcgccgacaaccgccacgaggtcgagctctacctggagtacaagcaacactacggctacgtgttctatctcggcagaaagaggtaacgggataatgatccggcgggccatgctcgccggatcggctacttcgacttagcgcgttcctgccatctttccgggtctctatagcccaaagcgccgggcgacatatcgagacctcggcaatgcgacacagcaagtcgaatcccacgttgacgcgtcccgcctcgataccgctcacaagtacgaccgagctttgccgactatgtcggcaaagcgttcttgggtgatgttctcggcttcgcattttcttattcgcgacccgagaagttcttttcgagattgagcatccatatccgtccacgatatgaagcaactcggtttcctttatatgcgatcactgatatccacaccgattgatctaaaacggacacgcttcagccgggagtgtaagagttggtattagctcaatcaaaatgcgccgtatagagaatgatgcctttcattgcaatttgagcattggcgggaagatagcttctgctagtcatttttagtaatgccagctacgggcggctttccgcccttctacaggttgcgggacgtggcgagaaactctccgcctacggaaagcttagaaagccgccgtcgaaacggcgtgcaccaacctgatgctcggggggggcatgtcgcgcctgaggctgtccgggccacgtcggggcacctcccgcgtcggccgttcctttgttttgctcggtgaacagtggaaatgaaagagaaagccgggcgactctgaacaagttcccggcttaatctaaacaacgtgttcgatttgtcgctggggctgtacgaccccgctaactctgatcgatggttcaagatgttctcagtagatcacggccccggagagcacggaaccgtgatgaaaaccttcactgattcgctgggcgtcgaacatcagcggggcaaggactatcggtgcctcaagccccacatgccgaggcgcggccaggcagctatcctatgcacgcaggtggtggatgcgaaaacgactcaaggcagttaggccacttgaacttcgacacgacgatgaacatctacacgcattttgagaaggaaaacgaccgcattgtaagcgaagcgtttcggaacgcgctatcgtagaaatagacgtagccaagaaacgaagaaagcgccggaggtaggtgataactcaccgttcgggcgctttgctaagtacatattacagcggaatcacctaatgtcaatcacggttccgctacggttcacataaatcagacgcttgatcgctttgaccttcgcgcagccgttcctcagctcgcgttctatgatcccatcggaagcacccttcatgcgccgggaatcgaagatgatgttcgctgcttggtggcttgccttgcgaaggttgcgctcaatcgcctttggattgatagctttaggagccttgatctcccatgctgcgccgtcaatgatcacgtcagctgacgtagttcggtactcctcgctgcggcggatgaactctacggtcatgcctgccatcgcgagcgacttggccgtctcgtattcgtgcggccagacgttgaggtctggtgcaatgatgatctttcccctaggttgtttcataacgatcattatacgactgctaaggttgctgaaggcttcaacttgcacgccgtaggcttcttgcccgagaaacttatcaggtcgcgaacttcgacgtcgagagccatggcgatacggtgaatcgcgctgatgctgatatggagcttgtcaagctcgatgcgtgatatatacgcttttccttttgagctgcctatcatgaaagcgagtttatcctgcgccatttcctgttccaagcggaatcgtcgtattcgcataacgagcttctgcaggaaaagaagggttcgtgggaatacgcgacgaagacgaaaagtggcctcaatagtgatggactcggagcgcttctttcggaaatgatagcaagatagtgatcgtattatgacgatggacaaaaataattttcccgcagttttccccgcgagtagattgaaagatgggaacaaagaaacaggccagccaagtttcccaagctgacctgcactttttctggagccaacgagcggattcgaaccgctgacctacgcattacgagtgcgttgctctaccagctgagccacgttggcgtcacggcttctttgcgaagcgcgaatacgcagtataccgaaaggtgctccgacctgcaataggccgttgcgagcaatcctcaaatttatcttggaacgtcgtttgcctccgtgcgcatctggacgctaatacgggggcgcggttcgagagggcgcggtcgaggcgttccggctcgctgccaggccggtaacgaccttcgcaagccggccgcacgacgcggagaagcgcgcgcgtgccgcgctacgatcgggctgcgaacggcaaagaggttttaacgaaggcggaaggagcggtccgatggtgaaatcgagcacagagccagacatgcaggcgatcgtggtaaacgcgttcggcgggccagatgtgttggtggagcagcgcgttcccctgcccgagccgcatgaggcgaggtgcgcgtgcgcctgtgcgcagccggtgtcaacccggtggaaacctatctgcgggcgggccagtacgcccagctccccgagctgccctacgttccaggcaacgacggcgccggcatcgtcgacgcgtgcggggcgaaccttccctcgggcgctccgcacgtgggggagcgcgtgttcgtggcggcggcgcgtgcccgccgctgcaccggcacctatgccgagttcgtcgtctgcgacgcctccgccgtggccccgcttcccgacgccgttccgttcgagcagggcgcgggcctcggcactcccggactggcggcggccgacgcgttgttcgtgcgcgcgcgggtgcgtcccggcgaaacggtgctcgtccacggtgcaagcggcggggtgggaatcctcgcggtgcagcttgcgcatcgcatcggggccgtcgtgtacggcacggccggcgacgcccgaggtcggcagctcgtggagcgcctcggtgcccggcgcgccttcgaccaccacgccgagggttacttggatgagattctcgcggtcacccagggtcgcggcgtcgatgtcgtgatcgacatggccgcgcaagccaacctcatgaaggatgcgaaggtggccgccgtgcgcgggcgcatcgtgatcgtcggcagccgcggctcgctcgacttcgatccccgtgcgctcatgaaggccgacctcgacgtgcgcggcatgggcgtgaacaacctgcatcccgacgagctcgatttggtgatgcacgcgctgtccgccgcgctgcagggcgggatgcgggtgatcgtcgcgcgttcgttccccttggaggaggctgccgacgcccatcgcgccgtcgccgagcgcggcaaggacgggaagatcgtgctcgtcatgcctggtggttgcacatgatctacgtcacgggcgacacccatggcagctaccggcacgttcgcgctttcgcgcgcgagcacagcctgggccccgacgacgtgatcgtgtgcctgggcgacaccgggttcgactacttcggcgacgagcgcgacgacgccgtgaaggttcgcgcctccctggcgggcgtcaccttcctctgcatccgcggcaaccacgaccgcaacccggcggcgctctccggctaccacctgcaaccgtggcacggcggcgaggcgtacgtcgacgaggcatatccccgaatcctgttcgcccgcgacggcagcgtgttcgacctcgagggccgccttgccatcgccatcggcggcgcctacagcgtggacaagcagcaccggctggcgaacggccatctctggttccccgacgagcagctcaccgaagccgagaagcggcacgtcgagcaggccctcgaccgccgccgctggcgcatcgacaccgtgctctcccacacctgccccgccgcgttcgtcccgcaggaggccctgctgccatccatcgaccagtccacggttgatacctccatggaggattggctgcagcgcatcgagcagcgcctcgactaccgccgctggtactgcggccacttccacatcgagaagcaggtcggccgcctccgcttcctccacaaggacatcgtgccgctctaggcggccccctcgcgcccgccctacgccggcgggaacctcaccaccaggtacagccccgcaataaccacggtgagcagcatgatggggaagccggtcttcaggaactgcacgaacgtgatctcgtggccgttcttcttgctgatgtcggacagcaccacgttggcgctggcgccgatgagggtgccgttgccgccgaggcaggcgcccagcgacacggcccaccacagcggcgtgacgtccatgccggtggactccatggccagcaggatggggatcatggtggccacgaacgggatgttgtccaggaagctggagatgacggccgagcccaccagcagcacgagcatggtgacgaacacgttgccgcccgtggcgtcgatgagcgcatgcgccagcatctcgatgacgcccgtctcggccatggcgcccacgatgacgaacaggccggcgaagaacgcgagcgtggtccactccacgttcgcgagcgcctcctcgatgctctcgcccgagatgagcatgatgatgccggccgcgccgagcgcgatgacgctcgactccagccccagcgccccgtgcgccatgaagcccaccaccacgaggcctatcatgacgtagctctgcttcagcagacgcttgttcttgatcatggcgtgctcgtccagctccatgatgcgtgcacgatgctcctcgttcacgtgcatcttccggccgtacaggaaatagaacaccaccagcactgcagccaggatgaccacgacggccggcgcgtcgtacaggatgaaatcgaagaacgtgaatccggcggccgagccgatcatgatgttgggcggatcgccgatgagcgtggcggtgccgccgatgttggacgcgaggatctcggtcatgaagaacggtatggggttcacgtcgagcagcttgcacacggtgagcgtcatggggccgatgagaagcacggtggtcacgttgtccaagaacgccgatagcacggcggtgagcagcacgaacagcagcatgaccttccaaggctcgccttttgcgagccgcgcggccttgatggccaggaactcgaacatgccggacagcttcaccaccgaaacgaacagcatcatgcccaggagcacgccgagcgtgttgaagtctatgtgctccatggccgcgtcgaacggcagcacgtgcagcgccagcaccagcatggcgcccacgatggcggcaagcgagcggtgcagcttctccgtcatgatggccaccatgacgatgacgaacaccgcgatcgatacgatttggcttacgtccatgcgagctccccctgcgaaccgggctgtacgatgtccaccccgccccccgcctgctcgaagcagtcaagcggccagatcacctcactataccaatatcggggagcaagcgacagggcgaaatcgccctgtgcatgacggcgtccgcgacgtgctgtcggcgacacccggctggaggtgcggtgggcgagctctgcccctgcggctacgacaaggggtactggaggagctcgtcgatggtgatgaagcggtagccctggtccttcaggcgggggagcgccttcttgagcgcctcgatggtctgcgagcgatcgccgccgccgtcgtgcatgaggacgatggcccccggccaagcatcctcgatctgcttggcgatggcgtccgctcccggtctgcgccagtcgctcgaatcgatgttccagccgatctccgccttgataagcgggccgatgttcttcaccacgtcgtcgccgaaattgcccccgggggtgcggaagatacggctcgcctcggcgccggtgacggcctcgatggcggcgcgcccttttctctacctcggctttctgctcctcgggcgacatgaagcccaggttcacgccctggccgctgccggcggcgtggtcgtaggagtgcgtgcacacctgatggccctcggagactgcgcgcttcacgaacgcgtcgccgttgtcctgttctatgcggttgcccacggtgaagaacgtggcctttgcgccgtgttcggccagcacgtcgagcacccggccggtctggtcgccccaggggccgtcgtcgaacgtgagcgcgatcaccttgtcgtcgcccacgtcgggcgatacgttgcggcgcacgatgttgctgggctcctgcttgacctgctcggccgtgatgccggacgtcttgccggtcttcgtggcctttacgccgtccttgccctcgccctccaccaggtggatggcgccgttgccttcctgtgcgaccgtccagggaatggccgtttccacggagtcggacggctcctcgatcgggccgccgtcgccgatctccactacgtctcccgaccccagcttcgtgtcaagctcggtgaccttctcgccgttcaccgtggcgtggaacggctcccccttgcctgcctccagcacgctgccgtccacggccagcaggtcgcccggctggggcttgacgccgctggcggacagggcgtcgccgagcgtcttgccgccgtgcacttcgacgctcgccccgttcagcgtgatgttggcgggcaggctctgcacgaacagcaccacgccgatgatgacggcggccaccaagcccacgccggcgagcacgctcgcaagtcgccggcgtgggcgctcgggcttctgcgcgatgcgcatatagcggtcgtgatcttggtagggggccgaggcggcgtcgacttgcgcaccgcgccccttgccgcgggaggcgtcgctcgcccgacgcggccgcgcccctgcacttgccgatgggctgtagcgctgaccggtgcggttttgcgggggaatgcgccctgagtgggagggacgtcctcccgcgcgcgacgagggatgggatacggggcgtcctgcagcgcgttggctcggcgcggcatcgtcttcccgcgcggaaacgtgcgtgcgtgcaacgccggcgcgtgcttgatgcgctggggagccttcggggatgtggcggtgggcggcatcggtgcgctcgcggccgttcggccgcggcatgcgcctgctatccgcgttgtgcgaggggtgttctccgaattcgtcgtacatctctgcccccatggcgatcgaacgccgtgcttagtcgtcgttgtcgtcgtccgcttcattctacccgaaacatgcgctcggcgagcgcgcaaagcacggttcgtcaccgacgaaccgcccgtatgatccaatttaacaccatagcacgttcaaacctttgccgcggaaggtcggcaagcctttctactgaaatttgtatggagggaacacgacggcaggccgcggtgcctgcggacccgtcggcgataagggttatactggggcgcgtctcgaaccgaaaggattgcccatgggcttgcagttcgccgccgcgcgcgccgtcagcgccgtgtccacgtggggcttgaagcacgtgttccatcgtcccgccgcaaacttcccgggaaaggttgccctctacgtcgacccgcgcgtcatcgccgacctcgccccgcgcctgcagaagggctcagtgtgcgtggtgggcacgaacggcaagaccacggtgacgaacctcctggccgacgcgctggaaaccgccggtcagcgcgtggtgtgcaaccgcacgggcgcgaacctggactccggcgtggccacggcgctgctgcatgcccgcgaggccgactggggcgtgttcgagtgcgacgagctgtggctggcgaagatcctgccgcaccttcaggcagactacgtgctgctgctgaacctgttccgcgaccagctggaccgcgtgggcgagatcgaccgcatccaggagagcatcgcgggcgcgctcgcagcgtcgccgaagtccacgctcgtgttcaatgccgacgacccgctgtgcgccgccatcgccgagcgcgtgggcaaccccacggtcgccttcggcgttgacgaggacctgcacctgccgcagaacacggtggccgacgcgcagatgtgccagcgctgctccaccatgctggaatacgcgtaccgccagtacgggcagctgggggcctaccgctgtcccacctgcgggttcgcgcgccctgcgctggactgtgccgcccgggacgtgcgcttgggcgccgacggtctgtcgtttgccgcgcgcgggccgcggggtgatgccgcgctcgaggcaccgttcagcggcgcgtacatggtatacaacctgcttgccacctgggcggcagccgatctcgtgagcgtgccggccgaggcgctgcagcgtgccatcgacgcgttcgacccgcgcaacggccgcctgcaggagttctcggtggcggggcggcgcacgctgctgaacctggcgaagaaccccaccgggttcaaccagaacatcaagatcatcctgcaggacgaggggccgaaggcggtggccttcttcgtgaacgacaaggagggcgacggccgcgacgtgtcgtggctgtgggacatcgacttcgaggagctggcaggccagcccggcctgcgcgtgttcgcgggcggcatccgcaagaacgacgtgcaggtgcgcctgaagtacgccggccttgatgccgcgctcgtcgacgacgcgtcggcgatgttcgctcagatggacgccctgccgtccgacgcccgcgcctacgtgatagcgaactacaccgcgctcccgcccgtgcacgcagagttgggaaggctcgcaggcgaagcgcccgatgctgcgggaggggcttcttcctcccctaagtcgcccggggatccttccgggtcgggagccgcccaggcaacggatggcgccgccgccccgatccgcctcgccagccaggtgacggagggcgaccgcgctccggtcggcccttcctccccggcgcaaaacgagaacgtcccagccgccggcgccgatcccgccccgctcatgatcgcgcacctcttccccgacctgctcaacctttacggcgacggcgggaacgtcaaggtgctcgagcgccgggcgcgcgagcgcggcattcccgtggaggtgcgccgcgtgaaccacggcgagcacgtggacctggcggacgtcgacctggtgttcctgggcggcggcccggaccgcgagcagcggctggcgtccgaggacctcatacgcatgcgcgacgacctgcatgcctacgtggaggacgacggcgtgctgctggccatctgcggcggcttccagatactcgggcgcgagtggctgctgggcgaggaagtggtgcgcggcctggggttggtggacatgaccaccgagcgcgcacccggcggctcgggcaaccggctcataggcaacatcgcactgcgctcgccgttggccgaacgggttgtggtgggttacgagaaccacgcgggccgcacgcgcctcggcgtcggcgtggaggctttcggcgacgtggcatcatcgacgggccacggcaacaacgacagcgacaagcgcgacggcgtgcgctacaggaacgtggtgggcacctacctgcacggtccgctgctgccgaagaacccccaggtggccgacgccctgctcgcccgcgcgctcgaacgtcgcgcacgacgggccggcgtgcccgtcccggagctcgccccgctggacgacgccgtggagaacgcggcgaacgagtacgtgcgcaaccgcctgaacgcgggctagggaagggcggcaccgtgctccggccctctgctcccgtcgccgtgccgtgccttccgccgagccctatggctttttcctagagacgctggccagcccttgccctcgtgcgcttcgcccgtcaaaatagttcctcatgagcagcagaagaagcaatcagcgccgccccgctcgccgaccgtccaactccacgggattcgacggccgctctgacagggcttcccgcgacggtgcgtatacgcgccgcgattcgttcgatccgtcggcgtacggacgctcttctgattcctcgcgcaccccttccccgcgctcgacgcgcgacgacgacaatccctacacccgtcgcgtttcccaagtcgagtacacccagcgccgcaagcgtgccaagcgcaagcgcatcgcgctcgtcgcggtggccgtggtgctggtgctgtgcctgggtggggccggcgcggcgttcgcctactaccagacggtgtcgaacaaccttcaccagggcatcgacgacgatctggcccgcacgctcgcagccgccgaggcggcccacccctacgagggcggtcccttctacatgctgctcatgggaacggacggatcatccgaccgcgaggcgtccgcagagtacgcgggcgaccagttccgctcggacagcatgatggtcacgcgcatcgacccgcagggcaagaaggtagcgctcgtgtcgctccaccgcgacacgctcgtggacatgggcgagtacggccagcagaagctcaacgcggcgcactccatcggcggcgcatcgtacacggtggagacggtgtcgaagctggcaggcgtgcccatcacccactatgccgagatcaacttcgacggtttcaaggacatcgtggatgcgctcggcggcgtggaggtggacgtgcccatgaccatcgacgacgaggatgccggcggccatgtggacgagggcctgcagacgctcaacggcgaccaggcgctcatcctgtgccgcgcacggcacgcctacgacgagttcggcgacggcgaccgctaccgtgcggccaaccagcgcctcgtgctgtcggccatcgcgaagaagatcctcacatccgatgccgccaccatggtgggctccgtgcaagcgctttcccagtacgtgaccaccgacctcgagatcaccgacatcctgtccattgcccagagcatgcgcgggttggatcccgagaaggacatctacacggccatggaacccacgacctcggcctacatcaacgggggttggtacgagtaccttgatgccaaggcgtggaagaccatgatgtcgcgcgtcgaccagggcctgcctcccaccgaggaggacgaggtcgacgagacgtccggcaccgtgctcgccaccaccggctccggcgaggcgaacgaggagaagaagagcgcgccgccctcctcgaacgacaagaagtccagcaccgtggtagtgaagaacggcaacggccttgcaggcgcgggtgccgaggccgccgagaagctggaggcccgtggctacaccgttgagacgggcaacgccgacagcttcgactacacgcagaccatcgtcatctacgagcgcggcgaccaggccacggaggcgcgcgagattgccaacgccatcggtgtgggcaaggcccagcagaacaccggcgagtacgtgttcgacggcgacttcctcgtggtgctcggcgcggactggtaaaccccaaaatcagcctacggggacgaatccccgggatcattcgaccctggggaaggaagcgtctcccaacacccctgccttagaatagcatcacgcgatgaggggaccgccgcagcgacgcgggtggctgagcggcgcttacttgaggggtgaatgccatgtacgaggaactgtacgagaagcttccggatgcgaatcggtactgggagaagctgggcctgtcccgtcccgaggcaccgcttgccaaggacgatctggatcgcatcatcttcgcgcaccagtgccgcattcccttcgagaaccttgacgtgcgcgatttccaccgtcccatcaagctcggcatccccgacctgttcgagaagatcatcgtcggcaaccgcggaggctactgcttcgagctcaacgctctgctcgatgcgctgctgcaggacgcgggcgtcaagaccatgccgtgccttggccgcagcctgaaggatcgcggttacgtctaccctatactgcaccgcggcatcatcgtcacgctgggcgatgggcgctacatcgccgaggtggggtacggcggcccgacgccggcgtgcgccattcccttggtcgacggtgcggagctcgagtcgcgcgggcaggtgttccgcgtggagctgcacgatgggggttggtggcatgtcatctactgcgggaccgccgcaaagctcgccgctgcgcaagaacgtggcgagaccgtggcccctacaccggtgttcgccctgctggacgccccggcggcgctgaccgactgcataccgctctcgtattactgctcgacgcaccccgactccgtgttcacgcaatggaggatggtgaaccgccgcacggaagacgggaacgtgtccattacgaaagaccagttcgtgcgtgtggctccggagggcaaggaaacgaggacggtcacgtcggaggatgagtaccgcgcgctgttggaggaatttttcggtatcgtgctgcccgcttagtctctgcggccgccggggccaatccccgaccccctttgcgcaggcggccgacatgctgggcgggtccttcaagcacggtaaacgtttggccgggagcttcgcttgcgaggccccggcctttttgatggggttggccggcgccttcatgccagggcggactcccctggagcaagttgagcatgccggtcgctcggcatggaagtgcgctatcatctctccttgaaggaagggccgttcgggaggcgaggcgcatgaagttcacagtggttgcggtggggaagctgaaggagcggttctggacggacgcgtgcgccgagtacctcaagcgcctgcagccttacgcgaaaaccgaggtgcgcgagatagccgacgtcgatcccggccgtgccgggggcgtggacgcggcgcgcgaccgcgagggtgcggccatcgtgggggcgctttcgccgtcgtcgcacgtggtgctgttggccatcgacggaaaacagcgttcgagcgagggcttctcgcggcgcatcgacgcgctcaagctgaacggcgcgagtgacatcgcgttcgtcatcggcggttccgacggcgtgagcgaggctgtgcgagcccgcgcggacgagacgctgtccttcgggcccgtcacgctgccgcacaacctcgcgcgcgtcgtgctgctcgaacagctctaccgcgcgcagaagatctcgcgcggcgagccgtaccacaagtaagggaaaggcggggttgctttcagcgcgctcgcattgggcggagcttgccctgtcgggagcgctataatagcgaaaccgagaaatcgtaggcgggggcgacatgccggagcagcggaacggggaaatgtaaccgcagaacgaccaagtcgaccaacgaggaaaggcaccaccatgcgcttcatctcgtggaacgtgaacggcctgcgtgccgtgcagaaaaagggtttcgaggacatcgtgtgcgagctcgatgccgatatcgtggccttgcaggaaacgaagctgcaggagggccaggccacgctcgatcttcctcagtaccgtgagtattggagctacgccgagaagaagggctactccggcactgccgtgttcaccaaggagcagccgctgcaggtgctgcacggtttgggcagcgattacctggatgccgaggggcgcatcgtggcgctcgagttcccgcagttctggttcgtggacgtgtacacgccgaacgcccagaacgagctcgcgcgcattgcgcaccgcatggagtgggacgacgcgttccgcgacttctgcaaggggctcgaggagggcgtgctgcccgccggcgtgccggtgcagcgcccggcgcccggcgagggccacgtgtgcatcagcgagctgccgcgcaccgagccgggcgagacgacctcgccgaagccggtggtcatgtgcggcgacttcaacgtggctcaccaggagatcgacctgaagaaccccggcccgaaccgcggtaaagccggcttctccgacgaggagcgcggcaagttcaccgacctgctggaagccggtttcgccgacaccttccgccgcctgcaccccgacgtgacgggcgcgtactcgtggtggagctaccgcttcaaggcgcggcagaacaacgccggatggcgcatcgactacttcctggtcagcgaatcgctggccccgaaggtggcgagcgcctgcatctacgacgaagtctacggcagcgaccactgccccgttggtttggagttggagctgtaagcagaactcgcttcctccgacagattgacgatccgacaacaatcttgccgtaaaagagttctcgagggcggtttccgaaaacgcgcgttcaagcgcgaaagtatacgcggttgatccggccatgttctcggcgttctcgccctctccgacgcgcgacgaagggcaaaagcttgaaacggcggtgttcaacaggcttcgacgtcagacgaacccggttcggcagggaggcatcgcccgcttgtcgttcgagaagggctcgtccaggcacgaggctgatttcgtcgtcggcgatgcgctgctgcaagaggcgtggcagctcgtgcaggtgtcgtgcagcttggcggatgcgagaacgcgccgtcgcgaagtgcgcgccctggaggccgccatgccgttgtacgatgtgaacgagtcgtagatcatcacattggacgaaaccgagacgatcgagaccgcggtgggaaccatccacattgtgccggcttggagctggctgcttgattgaggcgccagagccgaaggctttgcgatcaggcgatccgacgacgatcggggctgaaggcaaaatacgattctccatccgatgccgcagcggcgcgcggggagtagagttgccccgaacgtgagaacggagggaaaggggagggccatgggaatgatcgtcaagccgctgtacacgccgcgctacgtgccgaccggcaacgaggtggccgtgttcgagacaagcaagggaacgatacgcgcgcggctgttcgggaaggacgcccccgtcacggtgggcaacttcgtggagctggcgcagaagggcttctacgaccatcagaacttccacggtcgtgtggaaggcgacgtggtggtgggcggctgccccgtcacgcgcccgcttcgtccgcagcaggtgcgcatggccgtgcgcgagcagctgcgcggcgtgcacccgggcatcggcgacgccggttacgtcattgccgacgagtgggaggcgaaccagcgcaaccgccacgtggaggggtcgctgtcgctcgcgcacaagaaggatgcgaacaccggcagctcccagttcttcttctcgctggcggaccatccggaatacgacgaccgcttcactgtgttcggtcaggtggaggaaggtctcgacgtgatgcaccgcctgcgcatcggggacgacatcgagagtgtgcgcgtggagggtgccgcccctcttccgagcgacgaggacctgcctgaaaccatcgtcgtcgacggcgaggatggtccacaggaggtgccgaaccctgcctaccaggccatgcaggcgctcgcgcacctgctggagcgcaaggccgtggtgtagcccaggcgcccgggcacgcgcattcgtcgcgtccccgatgtgtgcgagcggtagagcggctcgcacacatcggggacgcgtcagttttcctcccagctttccacgaaatcgatgaggtcctgctgcttgtggatgtcggttttctggtagatcttctctatgtgggtgcgcgcggtgttcttcgcgatgtgcaggtcgcgcgccacgatggacagcgtgcgaccccgggccaggaactgcagcacttcgcgctcgcgcggcgtcagaccgcacgcctcggccacacctgcgcatttctgctccagcgtgagctgtgggtcgggacgctcctcctgctcgtcggtcggcttctctgcgcggcgaccggcacccttgatgagggggatcgaggataccacgctttcgggcagcacgaggaacgcgatgatcaccaggcaaagcacggcaaccagcgcaacggcgctcagctgcagcacgccctcgtgcaccagggggatcatcacggcgctcgccacgtatcccgcagccatccccaggaacatgtaggccacgcctacgccgaacacgtacggcgcggcgcccgggcccatgcgccgcgcgatctcgccgaacaacacccaggccaggatgtcgaacagctcgtagcccgtggcgatgagcagcacggccagcggggcgcgctcgccgaacacgagggcgagtgctatcagccctcctatcatcaccggtagcgacaggcggtagacgagcgagatgttcatgcggtccttgatgaagaacaccagcacgaggaacacggctcccactacaacgaggctgaacgatccgatccctcccaacaggtcgaaggggtcgtcgccggcgatggggaaggcgtccagcatgcggacgaggaacgagaacaccatgatggaaaccatgagcttcgttgagggcgcgtcgaggcgaaggtatccgtgcgatgcgcgggctcgcgagaaggaggttcctccgccttctcgctcggtggcggcttcgctttcctccggatcgtcctccatctggccttctggcagccccgtcttccacacgatgccgcaacggcggcattccaaagccaacaggacgatcgacgcggcaggcaacgcgatgaaggcgatgagatttccgtcggaggacatggccagcacgagacccgtgaccacagcggctgccggggcgcaggcgagcgagaagtacaggtcctgcgcggcgaagcgctctccccacatgacctgcagaaggcctgccgccgcacctcccgttatgagtccgagcatgagcagcgacgccgagtcaaggcaggttgccgctgggatgcacagtgccgacgacgccgcaaggcccagcatgatgtcggtgagccgctcgtgcatgcgcggcaagctgcccacgaagcgcgtcatgaccaaggctgcgagcgccgcggccacggcgccggccacgaggaacacccaatcggcgcgcgcctcgaagctcgagaccgacgccgagagactgaacacgatccaggcccggcacaagccgaaccccgcgatgacaataaggtagtcgagcgagaaccggacgggtgacgcgcttggagcgcgctgcccgtccggcgtcgcatcggctgcggacgtcttgcttttcatgggcttcccctcgccatgccgcgcacgacagggccgtcgtgccgcgcgcctccccttacccctggccccatgccgctctcgcaaaatcccacccccgagcacgcatcgaacgagcggcgcgtctgtgggatacgggaaccgctttccatcatacgggcgaagcccttcggcatcaatcggatcgataatgtgagaggggcacatcacgcctgatcaaaagttgataattggttaaacatgacaatcacaccgatcatctggtgtgctcgcgggaaaacgcgcctagaatgcgcctgttgacggacgggccgtcaccgaggagggggacggtcgatgcggggagcgtcgatcacaggagcccgtccggttcgcaaggaggaaccatgagcgagatttcacgtcgcaacttcctgaagggtgccgctgttgccggtgccgccgtggccggctccgccgcgctcgcgggctgctcgtcgggcggatcggccgcctcgggcgactggatgccgaagtcgtgggactacgagacggacgtcgtcgtggtgggctacggcggagcgggcatgtggtcgtcgctcgtcgcggccgacgagggcggctccgaggtcgtcatcctggagaaggcgccggtcgagggcggcggcaacagccgtatcaacaacggcgaatggacggtcatcaaggacgagaagctgttccgcgactactgcgtggcgttcggccacggccttatcgaagaggacatgatcgacgcctacatcggcgaggctacgaagcacaccgactacgccgacaagtacggcatgacctacgaggtggccgagaaggcgctcgccggcaccatccccgagtactggttcctggacgatggaaagtacgcgggctgcatcggcgtgtccaacgtcgagggcttcggcatgaccacgttccatgagctggaggccaagcgcgccgagctgggcctgcccatcgagatcaagttcaagtgcaccgaggagcacctcgtccagaatcccgacaccaaggagatcgtgggcgtgcgcttcctcgaggacggcaccgagaagaccatcaaggcccgcaagggcgtcgtgctgtgcacgggcggcttcgagttcaacgaggagctcaagaacacctacctgagcatctatcccttcaagttcgagggctggcagtacaacaccggcgacggcatccgcatggtggaggaagtgggcgccaagctctggcacatgaacatggtcatctccaccacggccatgtggacgcgcgaccccgactacgacttcgccatcttcgccagcccgcagtccgacgcgttcttcacggtgaaccgcctgggcaagcggtaccagaacgaggccaagacgggcggcacggcgcacaacggctggcacaccctcatgtcgttcagcgacaagatcgacgactacgaccgcatcccgtcgtggcagatcttcgaccagaagggcatcgacggcggccccatgggcacgcagcagggcggctggttcgagtgcggcaactacaccaccgacctgcccgacgagatccgcgcgtgggacggctggtccgatgacaaccaggtcgagatcgaacgcggctgggtgctcaagggcgatacgctcgaggagctgggccagaagatcaaggacttcgaccactggatggacatcgacacgctcaaggagacgttcgccgagtaccaggccttctgcgacgccggcaaggacgcgcgcttcgaccgcgagctcacggccgaggagaacaagctctccgagagcggcccgtactacgccatctccatctaccccgggtcctgctctacgctgggcggcccgaagaagaacgtgaacgccgaggtgctcgacccggccggcaacgtgattccgcgcctgtacgccgcgggcagcttcggcaacttccaggcacacagctacggcattaccggcggcaacaactccgagaacatggtgtggggccgcatcgccggccgtcactgcgccggcttggagccttgggacaagaagtagtcccgcaacctgacgacgccgcgcgccgcgccctccctccctgcggcgcgcgagcgcacttgcgaccgggcccggtcggccgtttgcggccggccgggccgcaaccatgataggaaagctggctatgacgaacgaaacgacgaataccgcccgcaagggcctcatggccttggccgttgccgtggccgtggtggccttgtccgtggcgctgggcacggccgcgggctgcgcgcctaagcaggcgggcgagggcgaaggccccgctaaggctccgaaggaagatcccatggccacccagcaggtagactggaccatggatatcgattgcaagacctgccatacgaccgagacggagaccttggccgacgcgcagtgtccgcaggcgtccgagcatggcgacctggcctgcaaccaatgccataccctggaagctcccctcaaggaggcgcacgagggtgtgacctatgccgacaagcccgcctctaaggccacggtggtcacggtggatgcggccacctgccaagatccggcatgccacggcacgatggccgacatggcggtgcagaccgccgacaacacggagttcaaggacgagaagggcaaggtccagaacccgcacgagtacgtgagcaacgagcagcatgacgcgaacccgcccacctgcaccgactgccataagatccatagcaagaacctgcagaaggatgccatgatgtggtgcgcccagtgccatcacaagggcgtgttccaatgcgggacctgccatgagctgcgcgaacgcgaagtggcctagcgcttgaacctcgccttcccccgggccgcgctatcctgcggctccggcgaagcggccgcgccctcggcggcctcgaggcggttgcgaccctgcggccgcctccggctggctgccttgcggcggcgagcctccttagaagacccggcaactctccctccccgccgggtcttcttccttttccgtggcccccgcggcgcccgggcgggcgccggcgcgcatccgtgctatcatgcattcgaccaacgacgaggaaagacggttatggacgctgcgaaaatcgaagcaggggtgcggctcatcttggaaggggtgggggaggatcccgagcgcgagggcctgagcgagacgccggcacgcgtggcacgcatgtacgaggaggtgttcgcgggcctggagcaggacccggcggagcacttcgccaccacgttcgacgagcaccacgaggaaatggtgctggtgcgcgacatcccgttctactctatgtgcgagcaccatctggtgccgtttttcggcaaggcgcacgtggcctacatcccggcggccgacgggcgcatctgcgggttgtcgaagctcgcgcgcctcgtggacgtgttcgcgaagcgcccgcaggtgcaggaacgcctgacctcgcagatcgccgacacgctcatcgagcagctgcacccccagggcgtcatcgtggtgttggaggccgagcatctgtgcatgagcatgcgcggcgtgaagaaggccggcgcgaagaccaccacaagtgccgtccgcggcgcgttcgagcgcagccaggccacccgtgcggaggccctgtcgctcatcttcgcgcgacgagactaggggctccaccgcacttggcggcgtggccgagcggcaaagccgccgaaccgccgaaatgtttcacgtgaaacatacgttcgttacgaggtgcgaggccgattcgcgccacgaggaaaggaaccaacctatgaaatgcgtcatctccgttctgggcaaggatcgcagcggcatcgtggctgccattgccaccgcgctggccgactgcggcgcgaacatcgacgacatcagccagaccatcctggacgacatcttctccatgacgatgctcaccaccctcgacacggagaaggccgacttcaacaccgtgcaggaacgcctcgccaagatcagcgacgacttgggcatgcagatcatcatccagcgcgaggacgttttccagtacatgtacaagatttaagatgattgccaagaagcagttatcttgaatagaacgcttagagcaaggttgaacgggcgtctggctgctccgaaatgatcctcccagtcagtcttcatcaggaaggtagcttaaaagatccatcggctggcacttgagctctcggcaaagggcgtttaaggtagtgaatcgtacgcacttgacttttcctttcttgaatcgggaaaggttggtggaggtaatgccaaccttgcgcgcgagctcggtcgtgcccacgccccgggcagccataacgcaatctagcttggatataatggtcatgaccgtcactcttttgctcgcccggttgcagttttgcactgaggaaattgggataacctgtcgtgaacagtagcatgttgccaagtcaaatgctcactcaaagtgatgcacttatcgtcaagtggtgcgcgagcatgggtgaatgtccactttacgggtacaattcggctggcgaatcaaggatctgcgcgaagagcgcggtctttcccagcgtggctttgccgaaaagatcggtatgagcccctcctaccttgccgatgtggagcgtgggtctcggaatatcagcttggacaacatcaaacgtattgccgatggcttcgatataagcgtcgccgagttgatggaagttttgcgggaacgcggttgatcttctcgtagcttcagcttcccgccgcttgttctcgagtgcgatgcgactgttcggcagagcgatcctgaggcaggtcggaaaccctcggaaccctttggatggattgcctcacagcagcagttcctcgcggtggcagaagcgaatgcgcttgcccatgacctcgatgtcgccggctagctccatctccttgagctggcgggttagcgagttgcggttcacgcaaaggtactcggcgaactccttgcgagaaaaagggatgacgggggtgtccgtaccctgcttctcggcgaacttccgcacggtcatgagtattttcgcccgtaagccccgctggctgagcacttccaccttgtttcgaaagaggatgatcttctcggcaaaagaggtgacgatgttgctaagcacgatctggtcgatttccggatcagcgcccccggtgggacggatgaacgtgcgcaggtcgatgaagagcacggtggtgttgacgctcgcctgcacggtgatggggacgcgtgggtaggaaagccagttgaacggctcaccgtagaactcgccgggtccgatatcggcgatgatggactggttgccctggaagctctcggtcatgatcttcaccttgcccttgagcaagaggccgcacacctcgatggggtcgccggccaccaacaggatgtcgccccgcttgaaggagcgcgtgtagccgcggttgcgttcgactaagttctctatttgttcgagagtcaagttcttgaacagcggtgttttcgccatgagctgcaagtcggcgtatttcatcggtcgtcctttcgcgaggggacgagcgcggcgaatcgggttcggaagcgataggctgcgggcgatccgggaaaccggacactgcgtcccgcgtccatcctatccgattggcccggcgagggagggcaccgggccaatcgtgtttgccagggcgttaccgcccggtggtgggaaacgctattgctcgggtgcgcttgcttgcgaggcgggctcgctccctatcatgcggtagcggtttgcgacgaaggccagcaccacgagcagaaggccaaagggcagcagcgccacgccgacttcgatggcgttcggagcataggcgtaagtcgaggcgaacgcctgcccggtagcgaggtagcgtcccgtggaaagcgggtagagccattccacgcccatcgatgtgacgagcgagaaccgcgaggtggcgaattcgggatacagcagcataaggcgatgcacaagcgtgcctgcgagcacggcgatgctgccggcaatgagcagccccgattgccgcgaacccgccttggtgaagaacagcaccatggcgccggccgtcagcacgatctccagcagatagagcaagccgtacgtgctggtgatcgcttcgagcagtgctgccgattcgccgcctcccgtccacgcaagcagcacgagctcaaccgcgacgaagaagaagtgtacgactagagccacggcaacaatgcgcgcgatggtggcgagtccgttggcgtactcgctccagtgggcacgcccgacaacggccagcgcgatgatcagcaccagtgcgccgcccgacgccacggccatggcgatgaagtcggcgggcagcatggcggtgtgccaccatggatgtccgttttgcgtggcgaagatgagcgcggtgatggtgtggatgagaacggccaccggcagcgccacgagcgccacgatgcgcgaccaacgggcggagatagcgtcgacctcgtcctcggtgcgcctcgcgatccagccgttcaggaaacgcttgcccgagcgcttgcagccgggaagcagttggaagtacacgctcaggaacgtgagaatcagatacagcgtgataacgacgatatcccacacgagcggcgaagcgaagttcggatggatgagcatctgaccgatgttctgaaagcggcccaagtccacgatgaccatgcacccggccgccaggatacaggcgaacgccgtaagcgaggctatcttgccgaacggcttcagccgttccacgtcgaacaggtagatggatgacgagatgatcatgccgccggccgccacgcccacgaggaacacgaagcagccgatatagaagccccagctgaacaggttggacatgttcgtgaccgccaagcctccgataagctggtatatccaggcggcggcgcctatcacgacggccgcgagcccgatgatgagcggaatccgtttcatgggatcacatcccctctccgtagacgagcgccggcttttccttcgttcccgcctgcacgtagaacaccttggggtcgttgccgagctcctcctgcagcctcacggcgggccggccgtcgaggaagcggctcacgtccgaggccgggtcgtccaagtcaccgaagatgcgcgcgttcgcggggcaaccccgcacgcacgcgggcttctcgccctcggcgcggtattgctggcagaacgtgcacttctcggcgacgccctgtggccgatcgcgcgtgtagaccaagcgcccctcgtcatggctgtcgagcgggtaaccgtagcagtagcggtcctcttccacacccttcgtcttggctggatcctcccagttgaactgccgcacgccgtaagggcaggcggccaggcagtagcgacagccgatgcagcgctcgtagtcgatgagcaccgtgccgtcggcggcttggtagctcgcgcccgtcgggcacaccttcacgcacgaggcgttctcgcagtgctggcacgacacgggcagaaacgccatctcaaagccgcctcctcgcgtttcggtggcaacctggtgctcgtcgctgcccacggtgaacacgcggttccaccagatgccctcgggttgggcattgtggttcttgcacacgaccatgcacgtgcggcagcctatgcaccggtcgaggtcgattgccatccctagtttcattgcgcacctgccttcctcacatcgcagaggcattcgttccatgccatgttcgtcgaccacgtggcgccgatgaagtagatctcatggatgggattgatgaacgggtagatgagcgtgttgtacgacgacccgccggtatagcgggcccaccagcccatctcgaagatacattgcttcggatagaggccgggctctagcacgagcttgcccttcacgtggcctcggtcgttgaacacatccacctcgtcgccttcggccaggcccttcgccatcgcgtcatcggggttcatccacacgcggggcagcccgtcttgcagctcgagcatcatggggttgctcgaatagttggagtggacgcgatacaggctgttgcgcgtgaggtagttgaaggggtacttctcacgggccgacgggtcgagggcgtactcggtgtcttcgaacagaggcttccacacgggtagctgctcgccctgcgccaggaacacgtcgtggtctttgtagaactccatgcgcccgctcggcacgaagtggtcggtcgaacccggcgcgttcggcagcgatgggggcgggaacggcgtgcggttgtggatctgatcccagaagggaatcatcttgtcctccgggttcgcatgattcatcttcacgggaccgcgccgcaggtcttccaccgtgatgccggccaccttctcgccgccggttgcgaggaacttctcgagtacggcttcgatctgcttctcggagtcttccggcgggaagttggggaactgctctccccaggccgggtcgatgcgccgggccagctcggagaatatccagatctcggggcgcgcctcgcctggcgggtccgccgccttctgctgcagttggatgtaggggtgcagcggcgtggtgcacacgtcggtcttctcgtaccaggcgcagccgggcagcacgacgtcggcgtactcgaccgtggtggtgtgcaggaagtcgcaggtcatgacaaactcgagctcgccgctctccacgcgtttgcgtagcgcgtcgcagacggcgtgctggtcgaaggggttcgcccagccggtgagcagggcgtggaagccgttcttcgggtagggtgccgacatcgtctcggtggggccgttcacgaagtagtggtagggcgttgcggttgcgttcgcgttcggcggcatgaaccacgaggccggcttgaagcgcaccttgtattggccgatgtagtcggaaatgccgccgcccagcttgccaatgttgccggtgagtgccgccagcagggtgagcgcacgacccttgaggtcgccgtgatggtactgatgggcggagccgccgaggatgatgtgggctggcttgacggtggccgtcagtcgggccagccgctcgatggtctcggcgggcacgtcgcttatgttctgcgccttcgcgggcgtgtaatcgcgctcgagcaactctttgagtagctggaacgcgggcttcgcctccacggtggaaccgtcttcgagcgtgagggagaacgtgccctcaagcgcagctgtggatggcatttccagccgggtagggctgatagcagtgggcgctccgtccacaatggccacgtagacctcgcgcttctcgggcgtttcctgcgggcgttcaagcccctgcacgtcggccgcaaggacgcgcttgcccgtggctgtgttcacgagcagcggctggtcagtgtatgttttgatgaaatctgcgtcgtagagttcctcgtcgataatgaccttcgccatggcgagcgcaacggctgtgtcgctgccgggcgcaagccgcacccattcgtcggccttcgccgccgtgaccgtgtagttcgggtcgaagtagatcaccttgccgccggcctcctgcgaccttgtgagaaagtgcgagtcgggaagacgggtggtcatgatgttcgagccgaagttcagggtgaggcgagagtcctcccacgcatagctttccagctcttcgcattggcagccgaacgtttcagggaagaacatgggcaggtcgccgttcatctcgtagccgggaaagttcgtccaaccgctcatgtttaccaggcggatgaacgttcccttattgatgtagttgagcggcggcacctggtagtcgacggctatcgagtccgcaccgtagtgctcggttatctcgcggatgcgcttggcggcgaagttgagtgcctcgtcccacgtgcattcacgcagttggccgccgtctttgtagggcgtctcgcgaatcatgggatgtagcaggcggtcgtcgccatacatcatggtgttgaatgtggtgcctttcaggcagccgcgcggattgtagccgtcgttctcgtagtcggccgcttggatgagcgtctttacctgtccgtcgtacgttgcggccaccatgccgcaagcgccggtgcagttgggcgagcaggttgatcggacgtgggtgaggcccatgccgtctgtttcgtccatcataccgtcgcccgtcatatcgtcggcgagcgcttgcgcgagtggcgccacgcttccggcggtgcaggcgacgacgccggctgccgctgtggtttttagaaatcccctccgtgtttgctgcgggccacttggcccgtgagcgcgtgcgttgtgctccttcatgctgatcgcaccttcctttcggtgacatttgcatgacccacccttccatcaggcaatatatcctgatggatcgtagcgtgggcacgggaatgccgtggcaatcagcgcgcgcttttggttgtatacagaattaccagcccccttgcgggcgagtatatgcgggctagttcgatggcgcaagaagcgcaagcgagaaagtttgaattgacaaaatttacaaataaacaacataacttttttgatttttgctgcattcatggccgacaagcgcgagttttcagttttaaatacaatatacctatgcccaattgagtgaacgcctcccaagcccccgacgcttcgctttttttcaaaaagtcgcgttcttttctcgtccgttacctcgtggttgctggccttgcgagtttgtttcatatactggaacctatgacatcagggaacgacaaggtggggcgcgacgagctggggccggcttgcttgagcggcgatccggcttgctcgcctacggagcgcatcttggagccggaggtgcggcaccatcatcggcgtaggcgcaagctcctggagttcacgcactcgtccacccgggcgactatgctcatgctcgcggcggccgtggcggcccttgtcatcgagaacacgccggtgcttccgtattttgcggagttctggcacacgttcgagcttggcttctcgctggggtcgttcgcgccgcacctcacgctcgagcatttcatcaacgacttcctcatggccatattcttcctgctggtgggcttggagataaagttcgagctcacggcgggcgagctgcgcaacccgcgcaaggccctgctgcccatcttgggcgcggccggcggtgccgtggtgccggccgtcgtgtacacggtggtgaacatgggcagcggcttcgagcagggctggggcgttcccatggcgaacgacatcgcgttctgcctgggtatcttagcgctgctgggcagccgcataccggcggggctgcgctcgttcttgtccacgctcaccatagccgacgacatgatcgccattctggtgatcgcggtgttttacacggccgacctcgatatcgcctggctggcaggcggcctggcgttgttcgccggtgcgctcgtcatcaaccggctgcatgtgtacgacctgtggccgtacgtgctcatcgggttggccatgtgggtgtgcttcctgctctcgggcgtgcacgccaccattgcgggcgtgctgctggcgctggccattccggcgaagtcgcaggtaaagctggatcgggcgccgggttggttcgaggcgcgggcgcgcaaagccgacgagcgctacgaccccggcgagcccgacatcgtgcagaaggagtacctgggcgaactcgacgagatcggccgcgtgtcgcgcatggccattccgcccatcacgcggttggactaccgtctgcacatccccgtgtactttttcatcctgccgctgttcgcgttctcgaacgccagcgtggtgctgacgggtatggaccccctcgccgtcatcgcgaaccccgtgaccatcggcgtgttctgcggccttttgttcggcaagccgctcggcatcttcctggccacctggctcacggtgaagctgcgcttaagcgatctccccgctggcgtgagctggggccatatcgcaggcgtgtccgtgctgggcggcgtgggcttcaccatggccatcttcgtgacgaacctggcattcgtcgatgcgagcaccatcgccatggcgaaggcggctattctggcggcttcgctcgtggccggcgtcgccggcttcctcgtgctgcgccgcgtgaccgacgaggaagaggaataaggggctgccgatgacggtgaaatcgcgaaagaaagatgaaggactactacgtcactgctgattctgctcaagcagcttcttcagctccgatgagctatgtatgcccagcttcctgtaaattgagtacttgtgtgctttggcggtagacggggaaatacccagcgcgttggagatatacgtggggtttcgctcgttcgcaaggtagcggaggatatgtccctcgcgttcggtcagcccgtattcccgttcaagtgccagaatggctttctttctcctgccgggaatgttcccgccgataatatcgaacaaaggcgttcccgaccgggtgaactctatggtatctaaagcatcgatcagatctacaagaaggtgtccaagctgctgcttgctttgcgtttcggcgagatagccgggaatggcattataaagcagggctgccgcttcgagcaccttcgtttcgttttcgtccataacaccgcacttcccttgatagtaatactattgggtattatatccatagtgtaatcaaagtagattgatcaacgataaagaatcttttgccgacaaaagggccctttgaaaagggccccggaacataacagtttagtgctggcttgcttctgcctaggggatgaagcacgttactttcctaccgtgatcggccatcgccgtggacagatcatcgagcgcgacgagctctatgcattgggctaggcaatgatgaatgcaggcaggctttttcccggctttcacacggtcttcgcacagatcgcaaagatctgagggaacaggcacgtaatcccagagccaagagcctttcatcttcgcaggacccagttcgttgaccttgatgccccactcgtcaagcgggagatcatgctcttttcggcatgagacttcgcacacatgacagcctgtgcagtatttataatctatcagcagtgcatattcgctcatgttaggcctccttcctcgtggcaacggggcttgctggatcaatgccgatcgcgccctgctcggtgtcggggctcaaggtgccgagtgcgtcgagcccgtccaccttgtatatcttgcataggacgtttttgaatggagcaccgaagccaatgcggcctatagcacgatgtggcacgagactgttgatgttggacttccacacaccgctgagattgggtgcttctggatcctgttcggggaaccaccatccgtgctgggcgtgtatgactcgcggatcgataataggggtgacgtgcgctttctcgatagctttgccgagcgggttctcgatgcacacccaatcgccctcctcgatgccgtatagtgctgccgtttcggggttgatctgcacaagagggtacggcatgagggcgcgcaaggacggcacttgtcggtgctcggagtggaaggaagtggtttcgcgtccacccgtggtcataatgagcgggtattcgttggcaagttcgggacggctgaacggcgtgagtgcattctcttcgaagtagggaaggggatcctcaccccaatcctcataaaggctcgagcatagttcgaccaagcctgtgggggtgttgaagcccggctcgccatctggtcgcagcaggcccttctcgtacttgcggtactcgaattcctgctgcacccagcccagctcctgcagctcctcgaaggtgataccgagctggggcttgatctgctcggtgaagaaatcggccacgttgtcccatggccatgccttcggattgagccgcttgcccaccatgaaatctatttcgaggtcggagtggcaatctcccacctcgacgcacttgttcatggccatgaccatgtgcgtgttgcgcccgaagtggggaagcaccacgccgtcgtgctcggcgaacgtggtcactggcaggaacaggtcgcacaggcccatggccgtaggagtcatgaagacgtcttggcagacgttgaactccatcttctcgagcgccttgaaccagcgtttgccttgcgcgttggtggtgttcgctatgccgttggtggcgtagaaccacgccatcttgagcggataaggctcgtcggtttccagtgtgtcgaggatgcagtcgggatgtgctatgaggtgtgcggcgcgaaatccctggtaacgggggtcggtaatctgcttttcgagcatgcccggcgggagctgctgggcgcattcgtatcgccacttccccatgaagctcgctggcacggccagtgtcacccctcctggcacgtccagatcgccgaggatggccgcgaggatgagcacggtgtggccggcctgcaccccatttgcgttcgtgtctatggcgagcccccacatgaacgatgaaggatggttctctgcgatggcgcgtgaggcggcggcgatggtggcggccggaacccaggtgatctcctccaccttatccagcgggtactcggcagcacgctccttgagctcatcgaagccgtagcaccagttctcaacgaagtcgtggtcgtagagatcttcctgtatcagatagttgatcatacccaggccgagtgcggcatcggtgccgggacggagctgcaggtggaaatcggcatgagcagccatccatgtgacacgcgggtctaccaccacgtagcgcgatccgcgcttcatgaggtcgatgagcgtatggccgaagaacccgtcggggttcgagaacaggggatcctttccccataacacgatgtacttcggcacctcgtagcgcgggtcgtcgtagcggtcggggaagaaggctgcgtagtcgagctcgggatagcccgccccgagtatgaagtcggccaccgagcagcgtggcccatagcacgagtcgccgctcatggggaagcacgagttcggtgtgccgagggcggcataggcgagcggtgttttgtagagtgtggcctcgcggcccgtgccctggaaggccacgatggactcggcgccccagttctccttgacgtagctcacccgctcttcgatgatgtcgagcgcctcgtcccaggtgatgggctcccaggcgtccttcccgcgatcttcgcgtgcgcgcttcaaagggctcaggacgcgcttctcgctgtacatatactcgggaagcgtgaggcagcgcacgcacaggcgcccttgggtgatggggtggtccggatctccctctacgtccaccaccttgccgtctttaacggtcaggtacatgccgcaccccaccgggtggtcgcccggcggcgaccaggcgcaggtgcggcacttgaccacgccgtcaccgcattcgattatccgctctgacataacctctcctctctcgtgctgtttatcgcgtggtggcacttttccggtttcaaggatgatttcgctgagaaaggcgacctctaaatgccggaaagtgccggagccacgggcctacttgctgatgggcgctcccggcgccttcggggcagagggggcgttgggcatcccatgagccgttggtgcgggtacgactgccggggaagccggtgcgggcgcgtcgtcctcggcgccttcggtcggcgacttgcagaaggggcatttcttgggcagctgccccgctacgcggttgatgcgcttgccgcaagacgggcaggtggcggggggcagttcggtctcggctggtctgaagcacatggcgaacctctttctctcaatgctctcgacgtgcgatgactaaaccgaaatagtattaattctttgccatcgcctttcaataaaataatacgaaaggggttaaatgaatagtactaaaaagactatgtactattctattttaagaatatgttacaggattttaaaggaacacttagttcgaaaaaagcctaatatgcaggtaaaatatctgttaaatataaacacaccagtttatttatccaaaaaatagtataaatagacaccttgataactaatactaaataatattattttgatgtcacaaactaaaccaaattgacctaagccaaaagtggttagttaaaggaggatcgtatgtgttttaggcctgcggcggtcgaaatgtccaacaagtgtccgcagtgcggaggcgaatgcgcgctcaatctcgagcattgcccgcaatgcggagcggcgctccccaaggtgccggccatgcccggcatgcccggtgcccccggtgtgcccgttccgcccggggccccggctccgcctgcgtctccatcagcgccccgtgttccgcacccatgagcgttgcgcgtaggcaacagtcccgtttctgtaagcttccggccaacgctctgcccgcccgaggtttgagcgttggccggctgccgaaaacccagatcgatgaatcgccaagaaaaggaggaggaatggattaccaagagttcctcgattcggtcgaccgcgaggcctaccacgagggggaatggcggtggcaggagggcgagtacaccgtcacccgcaccaatcattggtcgccccctggctgccataacgggtgcggcgtgctgctctacgtcgaccaagagggcaggcttgcccgcatcgagggcgacccgctgtcgcccttcaacaacggcaagctttgcatgcgctgcctcgacatggtggaggccgtaaaccatcccgaccggttgaagtaccctttgcgtcgggccggcaagcgcggcgagaacagatgggagcgcatcacgtgggacgaggcctacgatgagatcgtggagcgcgtgaacaccgtcaagcgagacttcggctcccacaccatcctgttcgtgcatggcacgggacgcaacatcggctggcagctgccgctgttcgcatccactgccctcgagacgcccaacgtctgcaacttcgggttcactggctttgcctgttaccttccgcgtatgatcggcgcatcggcgaaaatgggagagatgaccatcgccgacgtgtctgaaacgcatgagatgcgctatgccgacccatccttccgccgccccgatgtgatcatggtttggggtaacgagcctcttaaggccaatgccgacggcttccttggccactggatcgtcgaatgcatgcagatgggtacccagatcatctccatcgacccgcgcctaacctggctcggagctaaagccgcgtactggttgcaggtgcgccccggaaccgacggcgcgctgggcatagcgatgctgaacaccgtcatcaacgaggatatggtcgaccatgagttcatcgacagctggtgttacggctacgagcagctcgtcgaatcggtgcagggcaaggatgctgattgggccgccgagatatgcggcgtaccggcggacgacatacgcggcgcagcccgcttatacgctacggcggaaagcgcgtccatccagtggggcctcgcgttcgagcagcaactgtccgcgttgggcgtcaccgcggcggcgtgcgatctcatgggtgttaccggcaacatcgacaatcccggagggaacctgctcatcaagtgcgcgttcgatatcgagaagcgctacggtttgggtgacttcaaaatcccgcgcgaaaactatgcaggcaagcttactttgtcggcgggcatcgaatcatccgatatcgtggcctgtgcgtcctcagatgccctactgcacgccgtggagacaggcgagcccttcatgccccagattatctggctgcaaagtgccaacccgctctcctgctcgggcatggacgcaccgcgcatgtacgaggccatgaacaagataccctactgcgtggtggccgacccctatatgacgccgaccgccgtggctcatgccgatatcgtgctgccggttgccatgagctgcgagcgcaactccgtgcgcacctggtggacgcccgcccggtccatctccaagtgcgcgagctactacgaagcaaagtccgatgagcagatcatcctcgatctgggtcgccggctgaagcccgagaactggccctggaaagacgacagggagttggccacgtggtacctcaccgaccagtacgccgagggcggcacgcgctacgagggtgacttcgaggagctgcaggagcgcggcggctacaagtacgatccgtgggatgccgagtactacaagtaccagaagggcatgtgtcgtcccgacggccagccgggcttcgacacggcaacgggtcgtttcgagttctggagctgggggtacaaccattggggagtcgatccgatgccctaccacattgagccgaaggatagcccagtatccacgcccgagaagctggcagagtacccgttcatcgccacgtcgggtggaaggtcctacgagttcttccactccgagcaccgtcaactggaaaccatgcgcgagttccatccttggccgcttgtgaccattcatcccgaggccgcggctgaatacggcatcgaggatggcgactgggtgtggatcgagaccacccatggccgatgccgccagaaggcgttcctcttccccggcatcaagaaggacaccattcatatggagcacgcttggtggttccccgagcaagaagccgcagagcccagcctgtacggcacgttcgactcaaacatcaataacatggcgctcaacttcgaaacggggcaaggcggcatcggttccggtatcaagagcttcttggcaaagatctacccctacgtcgagggagaccagatgcccggcgagaaggtcacccgcgagggcggctggggcgactacctgcccggcgttatggcgggtgacaaagaatcggcagagaggcaggctgccgagggcaacagcgccttgctcgcccagatcgaggccgctcggcgcgccaaggagatgaaggtagaggacgccgacatgcagggccgcaacgcgctcatctacgcgaaagagcacgccgacggcctgcaggatgcctgaccgcccaaacgacccaagaaaaggaggcgaacgaccgtgactaaggcgattctcgtcaactacgactactgcacgggctgccactcatgcgaggtggcctgcaaaaaggagcgtggcctgccgaaaggcgagttcggcatcaaggtgtgcgaggtggggccgttccagtacagcagggaccaggggctgaagggcgtatgggaatggacgtatatgcccgtcctgacgcaggcatgcaatctgtgcgccgaccgtacgaaggagggcaagatgcccatgtgcgtgcagcattgccaggcatggtgtctgtactacggtgaggcggaggacctggtcaagaaaatggacggcaagacccgttggacgctttcgaccaccaaggagtaagggggccgggcggcttagaccgagaggggaaccatgcgcgaagtcgcccggaaaccattgaaaagggggttccatgaacatgaccgacgaagtttgcgcgcacgtcgcggccgcagactacgcgatactcgacgatttcaccgtcgggcgagtcaagacccgtgtgctcgacgcggtgggcgtcatagctgccggggtgcacgcgcctcgttgcgacgatttgttcaacctgctcaaaagctatggaacagcgcctcaaagcacggcgttttttcgcggcgagcttatgggcgctccgcaagctgccatggtgaacagcttcgccatgagatcctacgatttcgaggccatcgaggccgagaacgagaatcgcaagagcagtgccgctcacatcagcggtacgacggtgcccaccgccttcgccgccgcagagcgcgtacatgcgagcggcagggagttcctcacggctttggtggtgggcgatgacgttgccgcgcgtctgggggcggcatctggcttcgatgtgtatggaggctgggataacaccaacaccatcaacgggttgggcgctactgttgtcgccggcaagttgggcggcctcaacgagcaggagctcaacaacgcgctcggcctgagcctgaacatgctgggcgggtcgatggacaacatcaactacaagacgctcgcgttcaagctccccatggcgcttgctgcccgcaacgccatcttctcggccgactttgccgcccgtggcatgacggccacccacgacgccatcgggggcaagaaagggtatttcttcctgttctgcggcgagaagcagcagccggagctgctgtgcaaggacttgggacgcgttttctacggcgatgtggtcatcaagccgtggtcggcctgccgcgccacgcacccctcgatcgatgcctgcatgaagatcgtcgaagcgcacgaattcgatccaacgcaagtggagagcgtaaccattcataccacgccccgcacagctcaagggttcgtggggcagccgttcgaggtaggcgaagagccccaggtgagcggagctttcagcatcatctacacggcggcagtcgcccttgtggaaaaggctgtgcgccccgagcacatgaaccgggaggccatggaggatcccgcgctgaaaagcatgatagcgaagatcgccatcgatccctccttgccgcccgacgagtaccagacggcggaggtagacgtggtcatgcgggacggcacgtcttaccacgcacgctgcgacgtgcccaaaggcgatatctaccgcagccccctgaccgaaggggaggttctcgacaaattctaccggaacatcgagttttctcgcacgctgccgcacgaggctgccgcacaggtggttgagatggttacgcatcttgaagagctggacgacatcggggagctcgtggcgttcatggaagagaggagaatgaaatgaccgcagaacagaaagctaccgcgaagaaggcgctcggcatcacggtccagatagccgcgctgctcgttatcacgctgcagtatgcgaagtcgttctcgacgccggccatgtcggccattggagcggcatacgcccctgcgggcgtcgattcgctcatgcttaagaacatcgaagggctgccctcgctcatggctattgtaggcgcgttcgccgtgggcatcctcgagcgctatatgaaaaagaagaccatgcttatcattgccatgacatgcaccctcgtcggtggggtggttgctggtctcatgccggagaccatcgagggcttctacggcatattggcgtgccgcgtggtgctgggtttcggccgcggcatgatattccctatggcgtcatcgttcatagccgacttgttcgagggcaggcagcgcgaccgcctcatgagtttcaaaacggcagtgggaggtctctcgggttcggtgttccagctgatcggcggtttcctggccgtcatgtcgtggcgctattccttcatcggctacctgttcatcatccccatcgtggcgatgattgtgctctggcttccggagcccgacgtaaagccggctgggacgacggccgacggcaagcgtggtaacgcgctcaaatccatcacggtagccgcatggatcgtcatcctcttggcaggcgtgtggaactttttccagttctcgtacttcaccaacatctccttgtgcatcaaggaggcgggtttgggcgacacgggcttcgctggcatcatcagctccacgcagacgcttgccgccgcggtgggcgccatctgctacggtgcgtttcttaagggtcgccttcggggattcgacctgcccatcgctctactcggcgaggccgtgggcttctggattctcacgcacatcgtctcggtgccgggctactacgcaggcgccattgtatacgggctcgcgttcggcatgttcaaccccgccctcatcctgcagatcgtgaaggttctgcccaaggaaggtgccacgttggggctctcgcttttggctgcggcgcagaatctgtgccagtacttctccgcctacgtgcttgcgttcttcgccggtctcatgggcgtggcggctacgggccaatttgccggttggaacgtggcatggccgcttgcgacagctatggccgtgcttgtggccgttatcatcgttatcactaaagcgaagcatcccgagttgatcgccggcctgaaagaaccgggtaagcaatccgatatcgagaaaaccgtctagttgggggaacggcacgtaaaagatggttgtactggattcgagtgatcggggccggcgcccgccggcctcttctgccgaagggggatcgcatgctagttcgcgatggcaagcttctagggagagtaccgtatgcattcgtgatcgtggggtgttgctgccttctccaggcgtttggcatgggcctcatattgaactgtggaagtctgttctatgttcctgtctgcgaggatatggggtttcttagatcggagattgccacgtacatgacaggctatttcgtcggaacgacgttggtaacgcccttggccggaaagcttctctcacggtatgacatacgcgttgtcatggcattggccatcgtggtgctctcgttctccgtcggagtcatgtcaacctacacggcgatatggcagtggcaggcatcagggtttctcgtcggggcggctggttcgtgcatattcgtgctgccttccgcgacgctggtggggaactggttcgtcaaacggcgcggtatggtatacggcattgtcatgacttgctcgagcgtatcggcggcagtgttctcgcaggttctgcacggcatcatagtggccgacggatggcgagaggcttatttgttcgtcggtgtcgcctcgttttgcgtgatctttccctgtgccctgctgctgagaaggaatccgtccgacgtgggtgccgtcccctatgggctcgtgcccaataaggtagtcggaaaagcgtcagttgtacgaggtgttgcggtgaaggtagccgtggtctccttggcgttttggtgcttgttcgtattcgccggtattgcgtcgttcattcatggaggcatcgagcagcatcttcccggttacgtcgagtctgtcgggttcacctcgtcattcgccgcagctgtggtatcggcccagtccgtcggatcggtggtcgacaaactggtcatgggctggctgaacgacaagctgggggtgcagcgaaccaccatcatcgagcttgtgctcatcgtgctgggcattttagggttcgttctgctgcacaacccggttttcctcatcgtgtccgctgttttgttcggcgtgcaggattcgcttatgtcggtgagccttcctctgctcattcgagaggtattcggttctaagaactacacgcagatccatgcgtggatacgcaccggcgtgggggtgttcggatcgttttcgggcattgtcgtcggtgcggcatatgatttcgcaggcaccttcgtccccgcttttctgggattgatggtcatctgctttttggccatggcctgcatccgcgttgcctaccgaacaagcaagggattggtttgggaagcgacgggctgcgtatcggatggagacgccaagaagtaagaggattgctctttcccgattgcagaaagctttcatagtgctggacggagtcaaggggggcccggctgcttgcggccgggccccttgtagatcgctcgcttgcggcggacgcctcttgtgcgattgttatgacggccacaagctgacgccaggggcgtctaccgctcgtacaccacttcgccgcccaggatggtcgtcgccaccttggtggttcggtaatcctccacgttgccggcgatgaagtcgttgtcgaacaggcacatatcggcgaagctgcccacctccaccgagcccatcttatcgtcgtcgtggctgaagaacgccgcgttcttcgtccacatgatgagggcctggatgggcgtgaccttcgactcgtcgcccttggagagcgtcttgcccgtggtctcgtcgacacgggtaatggcgtagtacatgcccagcagagggtcgggcgtcacgacggggcaatccgagctgccgccggcgatgatgccgtttgagaacatgaggcccggcgactggaagcgctcgacctgctcgggccagaacagcggctcctcgcccatctgggacacgagggtgggctgcaggcacacgcccacgcccagctccttcatgatgggacactggtcctcgtagggcagctggtagtggatcaggtagtggcgcagctccttcaccgggcggatcttgttggcctcctggaaggcgtgcagcgcgcggtcctcgctcgcgtcgccgatggtgtggatgccgaactgccagccgagctcggtcgccttgcacaccagcgcgtcgatctcctcctgcgtgtagatggtgtcgccgtagaagccggggcgctggcggtactcgcgccggctcatggcggcggtgaacgcggccgtgatgccgtcgagcgtgaccttgcagccgttgagcttcagcatctcgtcgccgaagccggtgacgcagtccatctcctccaggcggcgcaggttgtcctcgaaggagccgaactgcgggtccaggtagaacatgaggttcgcgcggtaggtgagcctgttctgtttccttgcttcgttgtacgcgcgcatctgcttgtagttgaggttcgcgtcgatggcgctggtgatgccgaaggagttcaggcgctgccctatgagttcgaggctctggaggtgctgctcttcagtcagcgggggcttggccgcaaacattggcatgagggctgcgttctcgtacagcatgccgtcgagctcgccgtcgtcgtagtggccgatctcgccgccttcgggctgcggggtgtccttcgtatagccgacttcttcgagggcgcgcgagttcgcggccaccgtatgggccgacatgtgcagaaggatgagcgggttgtcgggcgcgacctcgtcgagctcgcggcgcgtgatgacctcctggctgtcctcccagatgagctcgttccagccgtcgccctcgatccattcgcccgcaggagtgctggcgaccttctccttcagggcgtcgaggatggcctggcggctggtcacgccgttgaaatcgaggttgagcatgttctcgccggtccacttgcagtgcatgtggcactcgacgaagccgggggtgaggatcttgccggaggcgtcgatgacctcggtgtgctcgccgatgaactgctggacgtcggtggccgtgcccacggcgatgaccttgccgtccttggcggccacgccgccgtcctcgatgatggggaagtccgtcttgccttccttcacctcgtcgcacgtgatggcgacggtgtagatcttcggatgctggatgaccaggtctgcctcgggataccaagtgctcataacaggttctccttttccttcgatactatcgcggaaaagcggaagagcgcctttgcctgcatgcggcaatgcggccgcaccggtcggcgttatcgtgaaaccatgaatcatccccgctgcacagcatagagtaaaactcgtccttcctgccaccggccgtaaggacaatatcgcgggtatgatcgtactttcggccgattcccttccggcgggggcgtggggtaggatgggccgcaacgtaatccttcctcggaaaaatccataacgtgctgcaaagggcgacaagggcggccatctgcctgctcgccaggggttttgtggcaataccaatcggaaacgagagaaggtgtcatcgtggagaacacgatcatcgacgacgatgcgaccatcgtcgcagacgcacccgcatcatcgaaagcacccgcgacggccgtgtcccgcaaggagatcctgccggcgttctgcatcaccgtcgtagccgccatcgcgctgtacgcgctcatgagctacgtgcagcccctgctcatgaacaacaacttcatctacgacttcggcaccatgatgaccggctgcatcgagggttcgcccctctaccgcgtggcctggttcttcgccgacctgaccgagggctcgttcatcgcggcgctcccggcctccatcggcatgatcatcatgggcttcgtggccgccgcgctcgagcgcaagaagtcggcccacgccggcaccggcgtggcgggcaacggccacatcttcaccaccatgttcgtgacgacctgcctgtcgctcatcctgggccagctgctctacggcggcctgttcgccagcggctggattcccacgttcgccaccgtgctcaccgtgcaggtgttcgtgatcttctacgggtccgacctgaagaaggtggcaacgtcgctcatcctgggcactatcgtcacctgcccggtgtgctacgccctgctgtacggcatcgtgtccccgctggggctgccgctgttcatcgccgtgtccgccggcgtggccatcgtggtgccggtgtgctcgctcatcttccgcctcatgccgtggatgaccatcccggcgccggccgagggcgcgaaccccacggaccagaacaagagcaagttcttcgtgcaccagatcttcggcgacatcggccagctgaccatctggggcagctcgtgggccacgatcggcatgtacgtgggcggcatcatctcgtgggtcatgaacccgctgcatcccgcatacggctccggcaacttccccctgctcatcatggtgcaggtggtcacgggcgctctggccatcctcatctggtaccccaagtggaagaagacgggcatggccttcacgttcgcgggcatcgtgttcgcgtccgccgtcgtgagcacctatcctcccagctgggccatcgtcatccccaccatcctcatcggcgccgtggtgttcgcgccgctggtcgagtgggtgctgaaggtgttccgcttcaagggaacctaccatcccatctgcctgatccaggttgctatcttcacggtatgcaccgcatggtcgttcgccgtcatgtacctgatcatgccgatgctggcttaactacccggtcgcagcgcgcaccgacaggcgcgctcgacatcttattcctcgagcccctcgccgcattcagtccccgcggcggggggcttttgcgctgtgcggttaaggcgcggcgggggaggacgtccgaagaggcgccttctgcgaaaaggctttagctaaggtgcttcggctgccgaggagcgctcctcgggtccttcgctccgggggggggtggctggcttcttgacgatatccctcgacttcgcgccttctgtgttctgcttggtgcggcgctgcgcagaggctagcgtgccgcgtcgtgcagtagggcgacgagcgccgtgcggttgggcacgtgggctttggcgaagatgttctggatgtgggatttgacggtggagaggctgatgcaaagccggagggcgatctggtcgttcgtgaagccctcggcaatgagcattgcaacgtcgcgctcgcgcgacgtgagggcggagagcagcgcgtgctgcgaaaaggcaggttggctcgcgttggactccccgtggccttgcagcggggtgacgcggacggtgaatgcgcaggcgtcgaagggatcgtcctcgacctgcatgcggaagcagagtccttgggcgttcgtgaaatccaggtagcgttcggagccttgggccggtgttcgggcggtcatggcgaacaacgcctcccttcattttgacgctccccttccgggagcgacccggaaggggagcagggggtgatacttggtttccgctttctcgcgaaacttcagtagtctgtcgcgctcgtgcccgtccccctgtttcacctccttgcggtattccttcctcggaaatgccgggcaaggcgcacgtgctggataaaataatgaggttttggcttgaccggcgccatcctccgccagaggtggtttacgcctcctaggcatctcaccccataagtattagatgtttttagatcaggtttaggtatactcgccatggacgtgagagagggctatgcagccggtttgacgtggggttgtgcgcttgatcgagaagtcgattggtatcggggggaaccatatggaggctgagggcgcccgctcttgcggcatgcgcaaagttgtccacgacgtgcgggagcagccgacgcttttcgtgggcttcaccgcctataagacgttcgccgtcctgctgttcctggacggcttcttctttcccggcacgttccaggtggccggtttcgagctctccaccatcgtgccgtttctgttcatctgcgcgggcgtatgcctgttcttcgcgttccgcttcaagaagatcaaggtgttcgacaaggatgcgtacctctggtttctcgtgggcagcatggtgctgggcgtgttcttcctcttcatggaaacgcatgcgggcatcgcggacgatgcatttcgtttcgcgacgctggcgctgggcatggtgctgctggccgtgggaaccatgggcatccatattgagctggggcgcatcttcggcatgctgggaatgacgcccacgctgacgttcggcattgcctcggcacttgccacgggggtgctgtcgctgggcatcgcgctgctcgacccgctgctgcggtgggttatcgccttcgttttaccggctttcgtcgtgctgctgttctactgtgcgaagggcaaggcgttccccgaccagaaggtgctgtaccgcgagtctacgaacgacctgcttattccctaccgcttcatggccacgtccgtcacgcagggtttggcgctgggcataccgctgggcttcttgagcttctcgggctttctctcgcagatgctcgactctgttgggtacttcttcgcggcatcgctcgccttgctggcggtgctggtgctgcagatggacttcaaccgttccatctaccagatagggtttccgcttgcgggggcgggtttgctggcggtgggcgtgctggggccgacgtcggttatggcaggcgtgctgcaggtgacgggcttcctgtacctcgacctggtgctatggggtttgggatcgtatctcatcaaaaactgcgaccagccggccacctgggttgcctcttgtcccagcacggcgctcatgacggggcgcgcgctgggcatcgtggtgggcagcgtggccctgcaggtgctggcgggctccgagcaagtcgtggtgttcttctgcgctctggccttcttggtgctgatgatggcgttgctgctgacgaacaatgcgaacatgcgcacaggttgggggttcgtgcgtcccggcgatcccgacgagcccacggacagctatcgcacctgcgaggtggtcgcgcaggacttcgggctgacgcagcgcgaattggagatcatgtacagcctgatagagggaaagtcgcgcaaggagatagccgaggatctgtacatcacctcgaacaccatcaagacgcacctgcacaacctgtacggcaagctcgacatccactccgagagcgacttgaaggcgtttgtggcgaaacgcgagcggatgttctccaccgaagaggatgccgtgcccctgccgcccgagcaggtatgagggcgggtgcggcaacgctcgacaggtggacgtcctacgccttggcagtgaggccggcgggctcgggcagctcggccgtgcagtgggggcagcgcgtggcgcccttggttacctcttcgagacagtacgggcagtgcggggccctctcctcctcggcttgcttgccgtgcttcgccagcgagcgggccttgttcagggccttcaccatgaggaacaccacgaacgcgatgatgacgaactgaatgacggcgttgatgaagcttccgtaggcgatggcggaatcgcccgctcccagcggcagatacagcttcaagttcgagaagttcacgccgccggtgaacgcgcccacgatcggcatgatgaggtcgctcacggccgagttgacgatggcggtgaacgccgcgccgatgaccacggccacggccaggtccatcacgttgccctgattgatgaaatccttgaattcttggagaaacttcttcatggaggccctttcgttgtagatcgtgacgcttcgtcctcggaaattcatttcagtatagaatgcgacccgtgtgcaaacgagaagttcatggaatcgttgaccggcgcacgccggcaacccctcgcggccgcgatcgggaacccggcgctcggacgggtatactatggggctgtgcaatctcgcgcgttgctgctcccggacgatcggaggacctcgtgaacaaagtgaagaccatggtgaagacggcgctcggctgcgagccggcgcggtaaggagcgtcatgaccaagatccactcgcataccctgccgatcgaggctgatatcgtcgatgcgttctgcctgatgcagaaagggttcaccgaccagttcgtgtactacgacaagcagcgggcgtgccgttatatggggctcgggcgctgcattgcgctgccgacgctcgacgaggccgagagcgagctggaggggccggtggaacagccgcccgtgtacttctcgttcaaccgcttcgatgcggagaacccggcccctgccgacgagctgttcgaggcgttcccgcggctgaagttcatgctgccggagatcgtgcttattgagaacgagcggggcacgcttctgcaggtgaactcgttaggaccggtgtacgcggggcgcatcgagcggttcgcgcgccaggcgctggccgcgccgccgcgccgtcgcatgacggtgccgtaccggctggagcccgactcacgcgaggcatggcgcgcggccgtgggcgccggtttggcggccatcgagacgggacgcgtggacaaggtggtgctgtcgaggcggcagcgcctggtggccgagcggccgttctcatcgaaggacctgctggtgaacctgatagacgggccggcgcgcggcacggtgctcctgtaccgctacgctgacgtgttcttctgcgggtgcacgcccgagctgctggtgcgcaagcgcggcgccgagctggagagcatgtgcttggcgggcacctgcccggccggcggctccgaggatgagcgcgcacggctggccgccgagctcatggacgacccgaagaaccgcgccgagcacgactacgtggtgcggttcatccgcgaggtgttccggcgcacgtgctacggcgttgacgtgcctgccgagccgggcatcctgccgctcacgcacgtacagcacctgtgcacgccggcgcgggcgcgccttttggagggcgtggacctgtggtcgatgatggaggacctgcatcccacgccggccgtggccggcacgccggtgggcgaggcgaagatgctgctgcgcgaggtggaggcgtacaaccgcggcttcttcgcgggcgcgtgcggctacgtggacggcgccggcgacggcgagttctcggtggcgctgcgcactggcgtgttcgacggcgagatcggctgggtgtacgccggttgcggcatcgtggagggcagcgtggccgacgacgagtacgacgagataggcatgaagctgaagacggtgctctcggcattcgacgggggcgaggcgcgatgacggccgacccgcaggcgacggcgctgttcctgggcgcgttcttcgacgagctggcgcgctggggcgtgcgtgacgtggtggtgagccccgggtcgcgctccacgccgctgtccatgacggcgttcgagttgtcgcggcgcgcgccggagcggatgcgcctgttcgtggacgtggacgagcgcggcgcggccttcttcgcgctcgggctggcgaaggcgagcgggcgtccggcggcgctcgtgtgcacgtcgggctcggcggtggcgaactactatccggcggtcatggaggcggagtcgtcgcgcgtgccgctcgtggtgctcacgggcgaccggccgccgaggctgcagggcctcggcgcgccgcagacatgcgaccagctgaacgcctatggcaaccacgtgcgggcgttccggcagatgccgcttccctcgggcgacgatgcggcgctcgcgttcgcccgccaggccgcgcgcgaggcggtcatcgcggcgggcgaggggtgcttcggcgggcccgtgcacttgaacttcccgttcgacgagccgctcaagcccgatttcggcgtggaggggctgttcgaatcggcgcagcgcgcgaatgtttcacgtgaaacatctgttcctgttgcgagacagctcgcgctcggcgacgccgagcatctggccgcgctgttcgcgggaaaacgtgcgctcgtgtacgcgggcgagggtacctgcacaggcgagctcgaagccggcaaggtgctcagctgggcgcgagctttccgcttgccattgctcgcggatccgttgtccggtctgcggtcttcggacgaccccctagtcatcgacaactacgactccgtgctcggcccgggcggtacggttcccgatggccttgcgcccgaggtggtcgtgcggttcgggcgctatccggtgtcgaagaaggcgacgcagctggttgccgcggcgcgtccggtgcagatcgtggtcgacccgctggagacgcgcgactgcaacgcggccaccgacgtgttcgtgcgctgcaggccatcggagctggcggggtcgctcgggttcgcgtacgacgtgcagacgatcgattgcgatcccgacgacgcgcagcgggccttcgcgcgcgcgtggatcgacgcgaacgacgccgcgcgcaagcgcatcgcttcggtggacgatgcggaggccggcttcgagggcgcgttcgtccggcgggtcgtggagcttgcgccggagggatcgtgcctgttcgcagccaactccatgagcgtgcgggcgctcgacacgttctacctgaaaagtgccaagcgcctcgccatcctgtgcaaccggggcctcaacggcattgacggcacggtgtccacggcgctgggcgcggcgcagcacttcgcccagaccacgctggtcacgggcgatctcaccctgctgcacgacctgaacgcccttgcgctgcagcgcgagctgcgcttgcagcgggaggcagcggcgtgcgtctccgcctcgctcgacgcggcgtccagcgaggcggccagcgccgtaacgcccggccatgcgaccgatgcggcattcgacaacgtcgcgcccggcgcggttccgagcatcgtcatcgtgctgctgaacaacaacggcggcggcatcttcgatatgctgccccagaaatcggaggacccgtatttcgagcggctgttcctcaccccgcaggacgtggatttccgggcggctgcgcaggcgttcggcgtgccgtaccgccgcgccgacaccgtgccggcgttcgacgaagcctaccgcgcgctgctcggcacccccggcatctcgctcgtcgaggttcgcgtgccgctttcggggttgaaggatcgctatgccccgtactggtagaaggcacggcgacgctttccaagtgagtggcgctataaataaccaaaagagtcatggacaaaatgcaaggctatggcaagggtcgtttggacagcgcgagcgaggccgaagaaagcaagcatctgaccttgcgtattgcttggctgccaagtctccaacgtcgaggtctcgcttgtgcggcccgattttcgaccatagccttgaattctgtccactatcttctgtccgtatcggcaccgcagggaaagaggccgcaccatggcgaaacgagaggggttcttccagcatgatggcgcgcgctaccgcttcgccgtctgggaaagcgaggctgccgaagccgcgcctgtcgtgctgctgcatggctttgcccagagcgccgcaagctgggatggcatagccgagctcttgggccgcacgcgctccgtcgtggcgctcgatctcgttggccacggcggcagcgaccggccagagggtgctgatgcctatgcgctcggggcgcagggcgagatgctgctggcgtacctcgcatctccggttggcgttgctgccctcgccgcgccaggaaggtcaaacggaggttccgcatcggctgcgcagggctctcggaaacccttggtggtgggctactcgatgggagggcgtgtcgcgcttgccgccgccagcagtcagccggaaacgttcgcccgttttgctgggggcctcgtgctggaaagcgccgggctgggcccggttgacgagcgcgagcgcgaagacgctgccgagcgcgatgcgcgcaacgccgcagccctgcgccgcgacgggctctcggcgttcatggatgcctgggagcgcctggacctgttcgccacccagcgcgacctgcctgcctcggcccgcgaacgcatgcgtgccagtcgtctggcgaacgatgccgaagccctcgcccgcacgttcgagcatgctggccagcacgccatgcccgcgcgcgtggacgtccttgctgcgctcgcctcgctgcgcgccagcggcgcgccggtgcggtatatcgctggagcgctcgacgtgaagtaccgcacgcttgccgagggcttggaggatgaagggctgtgcgaggtgcgcatcgtggccggagcgggccacaacgtccacctcgaggcgcctgcggcctacctgcgtgccctcgagggattccccggatagcgccgcgccccttagcccgcgcgcccggcgaaggggcgcgggtacgaacggcggcgggagtgggatggcgcaagggcctctgcgcaccgtgccattccgctcccgggacccacggtgttcctcaagcgcggggcgtcgtcagcttcaacaggctctcggcctgcgccttgacctctcctacttctagatcggggtgctggaagagccagagcctgacgatgcccacccagcccgaggtaacgtagtggaacaggaattccaccgcctgctcggacatgtcggggttcgcctgctcccagctttcgtgataggtggcatgcaggtgggcgagcacgcgatcgatgaggtttccctcgccacggttctcgaacaccgccttcgccaccacgcgatgctcggccacgaagtcgataatatccgaagagatggcgtacacgtcgggcggtagcttagccaagcgctgccccaagccggcgaacagatcgtcctgcatggccagcaacaacgcgaacggatccgagtagtacttgtagaacgtcttgcgcgaaatgcccgcgtcgccgcagacctcgcttaccgtgatgtccgacacggccttgctctgcagcgcccgctcgaacgacgcgaacaggcgctctttggtacagcgttgtcgggaatccttcggttcgacgtacatcggacctcctcgctcgggctttcggcgggtgcgggcaccattatagtacgaccggaccgggcttttttcgcctccgcctgccgctgcgagattcgccgtcctcccgtacgttggctggtgcggtcctgcaaagacgtgccgggggaaggagcgcctgctccgtcttcaggttttcgttgacggccaccgttctttttcggaattattctgcgttcggctgtttcaggcttcggggcgcgttagtatatgctcatcttaccgaacatttttccctaacagacgtgctcggacgatcggggcgcgcaacgaaaggacggccatgggcgataccgcgtggcaggcgggcaaggcataccgcgagatcatctacgaaacctgcgatggcatcgccaagatcaccatcaaccggcccgagcgccgcaacgccttcacgccgctcacggtgaacgagctctacgacgcgtttaccgtggcgcgcgacgacgcggccatcggcgtgatcatcctcaccggcgccaaccacgaggggcgctccgaggaccaggcgttctgctccggcggcgaccagaagatccgcggcaacggcggctatgtgggcgaggacaacatcccgcgcctcaacgtgctggacctccagcgcctcatccgcgtggtgcccaagcccgtcatcgccatggtgaacggctacgccatcggcggcggccatgtgctgcacatcctgtgcgacttgtcgctcgcggccgacacggccaagttcggccagaccggccccaaagtgggcagcttcgacgcgggctacggcgcgggctatctggccaacatcgtgggccagaagaaggcgcgcgagatctggtacctctgccgccagtacacggccgcggaggcgctggagatgggcctggtgaacaaggtggtgccgttcgaccagctggaggcggagtgcgtgagctgggcgcgcgagatgctggccctgtcgcccacggcgctgcgcttcatgaaggcgtcgttcaacgcggccaccgacggcctggccggtatccagcagctcgccggcgacgcgacgcttctgtactacaccaccgacgaggcgaaggagggtcgcgacgcgttcaaggagaagcgcgcgcccgacttcacgcagttcccgaaatttccgtagggtcgggcagagtcgtcagggaagcgtcgtgcagctcggcggggcggcttcccgggagcaagacaggatgcgaggcaggaatcaggaacgggtaggcgatgatcagcgcattcgagagcatggttcgccgatacccgcagcggacgtgcttcacgtacgtcgacgaggcgggtcaggaggcgccgtattcgtaccgcgaggtgcgcatgctcgcggctgccctcgcccgctacctgcagtcgaagggcgtgcagcgcggcggttgcatcgcggtcgacctgccgaactgccccctgtacgtgatgctggtcctggcagccgcctacggcagcttcaccatcgtgaccgtgaacaaccggctggccccgggcgagaagctggcccgcctgttggagctggagcgctgcctgggtgaacgcgtggcgttccgcgtggacgaagagaacgcggcgggcctgttcgaccacgcagccgccctgctcgcgggcgaggagcgctccgatccagccgccgtccgccctgcgcgtccgagcttcacggcgcggacctcggccgccacggcggcgccgcgctccacgcgcggcctgggccgggcgacttccaaccgtgcggcgcgccggcggcgcgacgagacgcagcggcaggacgcgctcgaggagatcatccacttcgccgagcgctctgcccacgtgttcgacgcgaaggcgcgggcgctcatcatgttcacctcgggcacgaccggcaagccgaaggccgtgccgctggcctggtgccaggtgtgccgcgccgccgaggcttcgaacgccgccctcaacagccccggcgtgggcatgtggcaggcggcgctgccgctgtaccacatcggcggcttccaagtggtcgtgcgcagcctgctggggcaggtgcccttcatcctctaccgccgcttcgacgccaagcgtctgctggccgatgcggcgcgctcccacgtcacccacgtgtcggtggtggacaagatgctgcaggacctgctgaacgaggacgaggcggacacgctgaagggctaccggtgcattctgctgggcggcgctgcgtcgaacccgcatacgcttggtcgcgccaccgcggccggtgctcgcgtatacgcgagctatggcatgacggaaacgtccagccagattgcccatgcgcaggtcacgccttcgttcgacggggggttgcggctgctgccgggctacgaggcgcgcatcgtcgaccccgacgcgcagggcttcggccgcctggcggtcaagggccccggcgtgttcgagggctacctcaacgcgcgggcggcgcacacggtggacgggttcttcctcacgggtgacacggcggcgctggcggccggacggctgtacgtgaaggagcgcaccaccgatatgttcgtgtcgggcggcgagaacgtctacccggccgagatccgcgacaagctcgtgcgcgtgcccggcgtcgccgaagcctacgtgttcggcgcgcccgacgccgtctggggccgccgtcccatcgcgttcgtggagcgcgagcgtcccgccgccccgcagcgcacggagccggttgcgccgcagcagttcgccgccaccgtgcgggccagcctgagcacgcgtctgtcgaagctctaccagccgcgctgcctcttcgtgctcgacgagttcccccgcaccggcatcggcaagatcgaccgtgcggcgctccaggcacgctacgagcagcgcatcgaggtggtgcgcgtgacgctgcaccgcattcgcctgccgttcctgcagccgtttaagacggcgaagggcgttctgcgcgaccgcgagtccgtcatagtggaggtggaggatcatgccgggcgcacgggcctgggagaatgcgtggcgttccccacggactggtacctgcccgagacgctcgaccaggacgtgcgcgtgctcaaggaggtgctggcccccctggtgctgaacgaggcgtacctgcatccctccgaggccagcgcgtcgttcgccgcctgcgcggaggcggccgcgttcccgctggcgcaaggtgcgctcgagccggcgctgtgggatctgtacggcaagatcgtcggcaagccgctgtggcagctgatcggcggcgcagtgccccacgggggagctgcggcgggccaggcgtctgtgccggcgggcgccgtggtgggcatgggggcggctgccgacacggtggctgcggtgcgccgttgcgtcgaggcgggctatcgccgggtgaagctgaaggttgcccccgggggctcgctgtcgtccgtgcaggcggtgcgcgaagcgtatccccggctcatgatcacgctggatgcgaaccagagcttcgcggagcacgacctggaggagctgcgcgccctcgacgcgtgcggccctgcctggatcgaggagccgctcgacccgcaccgccttcccggcgtcgggccgaccgacctgttcgaccggctggcgcgcctgcagcgcagcctgcatacgcccatctgcctggacgagtccatcgcccgcccggccgatctggcgcgggcgttgcagcatcctgaactgggatgctatgcgctcaagattgccaagatgggcggcgtgcagcccgcgctcgacttcctgcggctggcgcaggtgcgcggccttggcgtgtggatgggcggcatgtacgacaccggcgtgtccaagcgcttgcacgccgcgttcgaaacgctgcccggcatcgacgcgcccggtgacgtcggcgccactgcacgctactttgccgtggatgtcaccgatccgccgtacacggccgagcgcggccgggtgacgctcaaccgcaccggccatccgaacggcctgggctgcgacctcaaccgctcctccttggccgacgttctcgtggaccgcacggtcatcgagcggcagcgccgtccccttcgttaacggcattcaaaataatgcataacgctctgacgtaatgcagggcggtggagtatcatgatgcggtcaacccgacgaggaacggtggtcccatgagcgcttccgcatcgcaccaatccgcatcgacgatcgaggccgcctcggcggtcgtgccagctgcatctgccgacatcccccgcccgcagggaggcctcggcatcttccggctcgtcaccaccgtcatcacgctcatcttgggcggcggtgtgttctcgctggcgggcgaccaggcggctaacggcgccagcggcgcggcaatcctcacggcgtggggcatctcggcggtgggcgtactgtgcctcgtgctgacgttcttcgcgctctcgcgcatcaagccgcagctcaagggcggcatttacagctacgcaagcgccggtttcggcgatttcctcggtttcaacagcgcgtggggctattggatcagcgcgcttctctgcacggtgagcttctcggcgctcttgttcggcgcgctgtcgtacttcttccccattttcggggagggcaacaacctggcgtccatcgtcggcgcgagttgcctcatctggttctacgtgttcctcgtgtcgcgcggcatcaaggaagtcaccggcgtgaacgccgtcatcaccatttccaaggtcgtgcccatcttcgtggccatcacggccatcatcttcctgcagaagttcgacctgggcatcttcatggcgaaccttgcgacgggagccgatcccagcctgccgttctgggagcaggtgagcggcaccatgatggtgaccatctgggtgttcgtgggcatcgagggtgcggtggccatctccgggcgcgcgaagaaggagcgcgacgtgggcaaggccaccatcatcgcgttcgtgtgcgtgctgaccatctacctgctggtaagcgttttgagcatgggggtcatgccgttgtccgacctggcgttgctggagaacccggcgctcgcgggcgtcatggaggtggccgtggggcagtggggcgccgtcctcatcaactgcggcgtggtgctgtcgctcgtgggcgccatgctgggttacaccgtgctctcgagcgaatcgccctacgaggcggccgagcagggcgtgttcatcaaggcgttcgccaagacgaacaagaagggcgcccctatcgtcacgctcgtggtcacgaacatcatcatcgaggcgttcctcgtgatcatgctgttctcggacagcacgtaccagttcttctacaccatatccgccggcatgatcctgctgccgtacctgctgtcggcagcgtacttcgccaagctcacgttcacggagccgcaggcattcaagggcaaggtgggcggcagcctggtgttctggcgcatcttcggcatcgtgggcgttatctacagcttcttcctggcgttcgcgagcggcgcggtagggctcaccatcatgtcgcttctgtacgcgccgggcatcctcatgtacatcaaggggaagaaggagcggggcgagccgtacctgcgcagcacgctggacaaggtggtggtgttcatcatcctggccgccgctgtggcatccatcgtcctggtagtcaccggccaagtcgtgctgtagggccggaacgagcgcggtgcgcggctttgcagcctaccggttgaaactttgccgttcgcatcgtaccagctgcttgccgcgcccgcactccgtccgcttccgtatcgctttccggctgctcgggcaaatgacccgttcccaactgcgggcgtgtcctttacactgtccagcagaggtttcgcccgtgcgcgcgggggtgcgcacggcggctcgggagacggagaaagcggacgacggaggcggcacgtggagcagttggaggagcgcatcaggcgcgacggggtggtgaagtcggagggcgtcctgaaggtggacagcttcctgaaccaccagttggacatcgagctgttcgacgccatgggggccgagttcaagcgcctgttcgccgatgcgcccgtcacgaagatcctcacgatagaggcgtcgggcatcggcattgcctgcgtggcagcgcggcacttcggcgtgcccgtggtgttcgcgaagaaggcgcagtccatcaacctggacggcgacatgcacaccacgcgcatccagtcgttcacgcacgggcgcgtctacgacgtcatcgtgtcgaagaagttcctggggccggacgaccacgtgctcatcatcgacgacttcctggcgaacggctgcgcgctcaacgggctcatcgagctggtggacgaggcgggcgccacggtggagggcatcggcatcgccatcgagaagggcttccagcccggcggcgacggcctgcgcgagcgcggctaccgcttggagtcgctcgccatcgtggacgccatggacccggcgaccggtgagatcgagttccgccgatgaagccgttcgcaaccgaggagctgttcaagctcgacggcgacatcccgcttttgcgcgccgtgccctacggcgtgcagcacatcctggccatgttcgtggccaacctcgcgcccatcgtcatcgtggcgggcgcagcaggcctcggcaccgaccagacgggttcgctcatccagagcgccatgctcatcgccggcatcggcacgctcatccagctgttccctctggggcgcatcggctcggggctgcccatcgtcatgggcatcagcttcacgttcgttaccgtgctctgcggcatcgtggccacgtacggttacagcacggccatcggtgccatcatggtgggcggtatcatcgagggcgtgctgggcctgtttgcgaagtattggcggcgcatcatctcgcccatcgtggcggccgtggtggtaacgtccatcgggttctcgctgctgggcgtgggtgccacgtcgttcggcggtggcagcggcgtgccggacttcgggtcgccgcagaacctggcgttgggcaccgtctccctcgtgtcgtgcctggtgttccaagtgctggcgaaggggaaggccaagcagctatccgtgctgttcggcctggtgatagggtatgtggtggcgctgttcatgggggcggtggacttcagcgggttcgcgggcatgcagttgttcgcgctgccccagctcatgccgttcaccccggagttcaacctgggcgccatcgtgtcggtcacgctcatcttcctcgtgtcggccaccgagaccatcggcgacacatcggccttgacgatggtgggcctgaaccgcgaggtgaaggagaaggagcttaccggctccatcgcgtgcgacggcttcgtgagctcgctgtcggcgtgtttcggctgcctgcccatcacgtcattctcgcagaacgtgggcctggtggccatgacgaaggtggtgaaccggcgcgccatcgccaccggcgccgtcatcatggtgctggccgcgttcctgccggtgatcagcgtggtgttctcgtctctgcccgaggcggtgctgggcggctgcaccatcatgatgttcggcaacatcatcgtgagcggcttccagatgatcgcgcgtgccggcttcacgcagcgcaacatcaccatcgccgcgttgtcgctggccgtggggatcggcttcacgcaagcgtcggcgctgttcgcggtgttccccgagatcgtgcagagcgtgttcgcgcagaactgcgtggccgtggtgtttctggtggccgtggtggcgaacctcgtgctgccgcgggacgcgcaggcggcggatgaggcggatgcgatggatgtcgcggcgggcgagcgcggtgatgcggcggagggctctccagttgtggcggctgctccagcgggcgggccgacaggtgcgctcacgccctcggccgcaccggcaacggctcccgaccgggttccaaccccttcttccgcgcctgatacagaggagggcgacttggcgcccgcgtaacctgcgttcagggcggctgcctgcgccgagtcgtccgctaacccatggccgcccgcctagcggatcttctccagccggggcgtctgcagcgccacgtagacgaacaggcctcccatagcggccagcgttgccaaagtgacgaggactctcttcatgccatgctccttctcgtaagggccatcttcgcctcccacgataccggccccaccttgcggcaaccttgcacatgcctgtgctttcgcttacgttctcgtcatgttggcggacgggccgtccgtgagaacgttgcaggacagtgtcaacttctgtatagagtgtagtttttccctgcgacgggcgtgggggatggtacaaattacgaggacagtcaaaaatctgctgttcgagcatgcggttaggcaagccgcacccagcagacattgaaaaccgaactaaggagacctgctttaatgcctgttgcgttaagcctttttcttgtccttttcttcctgctcatgaacgctttcttcgtcgccgccgagttctcgctcgtgcgcgtgcgcaaatcccaagtggaaatcctcgtcgacgagggccgctccggcgccaagtacaccaagctcgtggccgacaacgtaaacgcgtacctttccgcttgccagctaggaatcacgctggcctcgctcgcccttggctggctgggcgagcctgccgtctcccagcttatcgagggcccgctgctggcgatcggcctgcccgaggcggccatccacggcatcgccatcgccgtcggcttcatcgtcatcaccgcgttgcacatcgtagtgggcgagctgataccgaagtctttggccatcttctccaccgaacgctacgccctgttcacggccacgccgctcgtgtggttctaccgcatcacgtaccctatcatgtggctgttcaacagcatcacgaacggcgtcatgaagctgctcggccatgacattgccaacgagcacgaggtgtacaccgacgaggagatcaaactgctcatcgacgagagcaccgagagcggcctcatcgaccccgagcagaacgagtacgtggacaacatcttcgacctgggcgacaaggacgccgaggctatcatgacgccgcgtaccaacgtcatctgcctcgacctcgaggattcgctcgaggagaacctggcgctcatcatgcagtacaagtacacgcgctatcccgtgtgccgcggcaacaaggaccgcatcgtcggcttcgtgcacgtgaaggacctctacacgctgccgcccgacagcacgatggaagacctgcgcatccgcacgatccaggccgttcccgagggtattcccatcgcgaagctgctgcagatactgcaggcgaagcacacgaagatagccgtggtcatcgacgagcacggcggcacgtcgggcatcgtcaccatgagcgacatcatggagcagatcgtcggccgcatcgacgacgagtacgcgcacggcggctcggacgccgcggtgcgcctcgacgacggcagctacctcgtggacggcgccatggccatcgacgaggtggaggagctcattggcttcgagcccgaggaggcctccgaatgcgagacgacagggggcctgctgctgtcgctgttcgaccgcatccccgaagagggcgattccgtgaccatcgagcatgacggcctcaaggccacgttcaccgtggtggacatggaccgtcaccgcatcgacaaggtgcgcgtagtgttggagcaaaagcccgaggtcgaaggttcggaaaaggaccgctaaaccctcacgcccgtgaatcgctcggcgttcttccagagcattttctccaagtctccgtcggagaagccgagcgacgtgaacgtgtcgtactcgtgcgccgggtcccacatggggaagtccgagccgaacatcacgcggtcggcgccccacaggttcacgagctcgcgggtgcgccggttgccgaggaaggccatagagctggacacgtcgatgaacacgttctcgtcgtgcagcacgtcgtagccgatctcggggacggaccagccgccgaagtgggcggcgtccaccacgaggtcggggaacgtgtgcaggatgttcttgagccggcgcggatgcgagaagtccgtgcggtagtcgcccgtgtgcacgatgagcggcaggcgtcctgcgatcatctcgtagatgctcatgaggcgcgggtcgtccatgttcaccttctgggtgtcgggatgcagcttcatgccgcgcaggcccaggccgacggcgcgctctatctccacctcggggtcctcgaggtcctggtgcatggccatgaagccgatgagctcggggtggaggcggcactgctcggcgatgaagtcgttgatgctggccacggcgctgggcttggtggccaccgagtgcacgacgaagtgcgtgaggggcgcccgatcctttgcggccagcaggtgcgatgccgtgccctgcccgtacatgtccacgagatagaactcgcccacggcgccgaccgcccgctcggcgatcttctcgggatagatatgggcgtgcacgtcgatggcggtcatggctgggctccttgctcgcttgggtaggcggctcgtcacgaaccgcgcgtatggtttcgctgtcgattgtactgcatccccgcagcgcccgcgccaatcagtctggccgaaccgctgggcttcgcaatgaaatccgcttagggaagcactgattaacgcaacgatactcttcttgattgcgctaggcttacagcgtccgcacacgacccttttaacatgactgattaagtcatggacgaaatcagaggctatggcatgctcgaacgagtttttgccggcacgaaaccgagaaacccctggtggcgaaaagccgcccccggagttcgccgttgaaatcatgccacagcctccgatttcgtcctgccccttctgctgtctcttctgccggacgcttgggaagcgcaattaatcagcgtttccttagctgagttcactccttgatttgcgtgtattctgtggaggtaaagataaggcttgccctctgtatgaaacatgagtaatattcaatcttgccgcttttcctgtttgcagtataccggacaggaggggcaggcgccaacgttgcggggtggagcagtctggtagctcgccgggctcataacccggaggtcgtaggttcaaatcctgcccccgcgaccatgaaactagcaggccggaagcaacgcttccggccttttctctattcaggggacagactccatggttcttctcgagtcttgattgcgactgacagcgcttctcggtctgcgaggcatcgtttcgagtcctggtctgccttcaacgcgttttcgagagcttcgcgaatcatggactttgccctctccagttcttcgttcgtccgaatgactacttggggaatactcgctttttgaaggatgcggctttttgttttgtcccgacggatctgttcttccctatcgtggtgtgaaccgttgacttcgatttccaatacgaaactcttgtctatggtgcgatagaagataaagtcggcatgggcgacggtgctcataaagcgaagttcctcgacattgaaaggctcgaggttcgtgaatatctgtttgagcgggtagttgcggaggtagcctatctgcgatgtggcgtccatgctctcgagcgcgtcgtcgataaactcgctggttcgcacttccgaatactcgtcgtgttcgtcggatccgtgctcgagcaagtaggctctgcgctcttcttccatgcaggggtacaccaaatcgaacgcagagcatatggcggactgccgaatttctccaccgcgatattcgatgtagcgcttgagatcagcaatattgccgacagcttcgacaactttgggtgctgctatgaggcagaagaagtctttcgcgcgcgatacggccacattgaccaaattcgggttgtccatgaatcgattaggcgcattggatcgagtgacgaaaacgatagcgggtttttcgcgtccttggaacttatgggcggtggcaacggtgacgccatcgggcctctctttctgtccctgtttcatcccttcgacttggttgcggtaagggctcacaacccctatctcatgcgtttcgaactgcttcttcaaaacggggagcacttcctgctcgaacgctcctgcctgcacgcgattgaagtcggcccggcggtcgtagttcaagtctttgctgatgttgcatgaaagtgcgcttgcgactcctcgtcctctgctgtctgacatgatgatgagctcgccgttgtagaactgttggttgcagaaaccgataatgtctgggtgacaacggtagtgctcccggaggagcgtgcggggagcatgaagctccgcttggtctatacatgcgttgaggcaatcaagaaggttgttgtcgacgaagttatatcgttgaggcaagccggtcggagcgaaaaggggccgcgctttgcgcttgtcggcagtgtctaggacgcaaggcagctgcttcgtgtctccgacgaccacggcgttctccgctgtggcgagagcgaggaagcccgtgacgagactcgcctgagaactttcgtcgatgatgatgtaatcgaaaagctttccctgcttccctctttggtttcttgcagcattcgtggtgctggtgatgacgggatattccgcgcgaaacccggaaggctcgctccagggatcgtcgaataggcgcctacccttccgaagcttgtcagcgtagtgttcgtgaagttttgcttcgagaagacgccttgacttcttctcgatgtcttcgaggcaaccttcgcctcggtgcattttgagatatacttcgtggcttttgatggcgttcttgcactcctggatctgagcttcgaataccatgcgattgagactgatttccctatcgaccgtgatatggtcgaaatcatgccagctcccaattccccacatccagacaattctcgccctctgggcgaacgtcatcttcccttctttagaggataagtaccctacgaggtcgcggacggctcggaggcgcgcggaatttggtctcctccttaccttgagctcttcggtagcgtttccctctctgaaccgttcgtattccagttccaggtcctggagtcgcgcttcttgcttggccatgtcttgttttcgaaggtagatgtctcgggcgataacgatgttcttgcgaatcgagccagagagtgcttcctgcttcttttttgagagcgaccatgtttcgagcgcaggtgggtacgctgacttctggttgtcgacgaatgccgtgacgttgtctcggcggccgagaaaagcagcgatgaacccgaaaccttcttcgtccagtttatcaactacgttcttcgtcgcctcgttgttaggggaggttacgagaacggttttgtcctgcataagcaggttagcgataatattgaggatggtctgggtctttccggttcccggtgggccttcgataaggcttagttgattagacaaggcgttctcgacggcctccatctgactaaggttggatccaaacggatagatgattgtttcgggtggaacgcggaggggggcagccttttccgggtgtgccatgcggtctgcgggcgttccttcgagtatttggagccgcttgaactgccgaggaaggtattcgcgcttgtcaacgtcctcaacatcgggctttatggcctcggccaccgactggaggtagcggaacaagctgctagacgatgccagttctttttgttcgatttccgagggacagtacagtttggcgtagattctcccgctgctagccttcgagatgatttcgaagcgggtgccgaatgccgggttttgcgagctaagtcgattgagcttgattgcgtagtattggcgcaccccttttgcgaagagggcagtaccctcgaagggaacgttctcgctcgatacgattgcgacgttttccggattgtaatagaggggttcgctgtatgggccaaacgaaatgatatatttgccgcgatggtcgcatcccccgatatgcgcgtcgtttgttcgatccctgaaatccttgcccttattgcggatgaacaaccgatcggccataccggatcctttcggacggctcttctgctattgacgattgcgaagattatataccggtaacgccagactgctgcggggggatcgccagaatggctcccctatggccggtgctacaatctgataccgtattgcgttgctctgcgagaacgaagcgaaaggcgatgaccgaccatgaagattgcgaacgtgcgcgctatccccgtcgacctgcccctgccccatccgatggagtgggccaccggtcgcatgaccagccaggcgcatgtgctgatgcgcatcatgacggacgagggcgtcgaaggcatcgctgaggccatcccgcgcgagaacatctacggcgagacgcaggtgggcatggtgcacgtgatcaacgacctgctggcgccgctggttgcgggcctcgacccgttcgatgtggagaaggtgcacgaggccatggccttcattaaggggaacctggccgcaaagggcggcatcgacgtggcgctctgggacatcatgggcaagtcgtgcggcctgccctgccacaagctgctgggaggctaccgcgatagcatcgagccgagccggatactctggctcacgagcgacgaggtcatggtggaccaggcgcgcgagctgaacgcgaagggctaccgggctttcaaggtgaagggcgggctggaccccgatgccgacatccgccgcgtgcatgcgttgcgccgcgcggtcacgtccgacacgaggctctacatcgacggcaaccagagctacacgtacttcggcgcgaagaaggtgcacgatgcgttgcgcggcgagctggactacttcgaggagcccatcgccgccacgaacgagaaggaccgcgtgcgcctggcccacgccatcgacatccccatcgccggcgacgagagcaacttcacgctgcacgacatagctcaccagatagacatcgacgcgctgtccatcatgatgatcaagatcccccgcagcggcttcacctacggccgcaagatcgcggcgctgtgcgaggcgtaccaccggcccatgatgatcggcagccaatccgagagcagcctggggatggccaccctcgtccacataggctgtgcgctgaaaaccatcagctacccctgcgaattcatggacttcgacgaccccgccgctccgagcctggtcaacgagcgcatccgcatggagaacggccgcgtctacccgcccgagggccccggcctgggcctcacgctcgacgaggacgcggtggagcgctacacggtgcgggggtgagggcggccgcgcgccctcacgccttcgcgccctcgttgtggccgtatcgtcaggataacccctcggttctcaccttgaccatcgtcgacagggcgtccctgatctggtcgtgcaggtcctccagctcgaatgcctggagaactgccttgtcgaacgcctcccggtcggcttcgtaaagctcttcttgaaggggcttcacggcccttctcttcaggggctcgaaagcgtcgaggatcgcctgcctcgattcggcagctactagggaggggtcgagcatcgagaggccggccaggctctccttccggttgtccagggctccgtcccccataggccctccggaagactccagcatcagcaggcctgtacatgagttgagcagggcgtgggcgagcggaaggtcgacatggtcggagagggcccgaaggcagatgagccgctggttcgcgaagcaggtgtctccccccgcctgcgcgaagaacaggcggtcgcccgggttcatcatggttgcgaaatggaagctcttgcccgccggcagagagtaccaatagggggcattcgacttcgccgatttcgtcacgcccgcttcgtgccttcttatatgttcgagggtcttgagatagccctccctcgcaagctcgtctttcgacttgtcgcagatgagcacgtactggttcggttcgagggtgtacgaatgcgtgccgcgcaggttcttgaccagcggaaagcagaagggagggtcgacgaagcaggggtcgtccgaatagagggcgccgtcgtaccccgatttgacgccgcggaaaacctcgaacaaagagccgatggggacaagcttcccggtgagcggggacagggacgatatcccgaagcagagcgcgtacagcgttatcccccatgcgtggaagcgccggatgtcctccagggagtagcgatgctgcgctacgaaggcgctgcggtcgccgcctgaaaggatgctcgccacgatcgcggatcgtttcgccgggtcgtcgaggtcgccaatgctcgcgtggacaacccccatacgcacgtttccggtgacgtcgcccggcttcttcttcctgagcaccaacagcgcgttcatgactttcgtcttgtggaaccagcgcgcctgcccgttaacgaatatcccttcgatctggtacttcagtgcaagcatctcgaagaagctgacccccgcttgcgagaagagccacgtgttcgaggtaagcaggcatgccgcgcctccgtcgttgagcaagcgctcaaggtagaggcagaaatagcagtacaggtcgttgcggtcatgaagcttgatgcccgcagcctgcgcctcctgtttgagctcgtccctgatctgggaataccgtccgatctccttggtgttgaagtcgacgtaggggaggttgctcgcaatggtgtcgaagcggggcacggctttgccgacttcttctcccgtggaagggtcgatgaactcgaccatggaccccggttcgatttcgaacgcgtttttctggaagaccagaagaggggaatcgacatgctcgcgcggggaaagggcgagcgtggccacctgaaggggaaaatcgtggatgtccgacaaccaggttgtgcggtaagcccggtcggctgcatcgtccatcaccggctcggtcagcttcatcttcctttcccagagggccttgccaatcgttcccgttccgcagcagcagtcccatgcgtggccggtggcgtttctcacgccaagctcggccatgagcttggcgaggggctcgggggtggggtactggccggagatctgccgcttggccgaggagatgctctcttcaagcagccggtgccgataacggctgtcaagctgctcaaggtcgcacatctgaagcaggccgttgaactgcacgaggtcggacagggtggcgtcgggcagcgagtcgcagtacgggggactgctgaagatgtggtagaacccgcagcggcttgcaatgagggcgaagcatcgcgcggcatcttcaaccgtgcatccctccgtaatgctttcgacctcgcgtgcgtcctggtagtagatcttgatgaggttcgcgaagaggagtttgttcagccagccgatcaggagcattttcgcataggcgcgataggcgtccacctcgtcgagggtgtactccttcgccacggtgcgccaccaagatccgatatcgatgtctaccaaggcatcgactgcggcccttctcttgagtgcgctggccacggcatctttgttttcgttgatgatcttgggcatgatggagtcggtgatgacctcgcccagttcccgctgcttgatttttcccgacgctatgaagagctctatcttgtcgacgagggagtggaggaacgccatccattcgccttggaacgcgttgatcgacgccctgtcggtaatgtgctccgagatggtccacgattcgagaatctcgaaggagccccctttcgtcttcgcatgaagctcggcgtgctggaagttccacaggatgcatgaattgcatcccagcaggtccgccttgcggtgggcgtcggcgacgaactcctcgtcgtctatcttgacgtcggggcactttatctcccagccctggaggatggtcgagcgttgccgatctgagaagagcaggacgtcggggaacttgacgcggccgtgctcgttgatggtcgactccccgccggcccgcttgatgtgcatgtccttgccgtggaggtggtcgttgatggcgctgataagctcgatggcgtatgaccgttcgttgtcatggacgctctgggcgctcataggctcaacctcgtccctcgttgcttatgacgaggccgggcaggcgatcgcgttttcctcgtccatgcgggaccgtgcttcttcgaggcgccgacggcagacttcgatatagtcgatgggctcgtttttgaagcgggcgacgccctcgttcttctctatgccgatatagcggcgcccctcaaggcaggcggcaacgcagaaagagccgcttccgcaggcgttgtccagcacgacgtcccccgggtcggtataggtgcgtatcaggtacctccccagctcaaccggcttctgcgtggggtggtacacggggccttccgattcggcggtcttgaagtagacgatgtccgttgggtagcggctgccgtcgctctgcacatgcttgggatcgaagtcgccgtagcttccggtcagctggttcttgcggacccctttgtcgtacgattcgccttgggacatctggggatggtaggtcggctgcgattggtagaagatgcagatatcctcgtacttccttagaggctgcttcttcgcgttgaggaaattggtcgccttcgacttgatccagaccaacttgtacttgtacaggtcggctgcatggagcatgagcttggcggtgaaaaggccgctgctcgtcagggctatcacgccgcgcggctttatcaccctgcggtattcggtgaagaggacatcgaggttgatgatggagtcccatttgttctgggtggtcccgtagggcagatcgcagagcaccatgtctatcgattcgtcggggatggccttgatcttctcaaggcagtcgccttcgatgatggtgttgagaagcggctcaattgagcgggtgtcttctgcttgaacgatccgcatgcagtcctccattcgtagactcacgattatatctcccgtggctgatgttgtgctcctaatcggagggaaacatcagaggtgcaagctcctgccagtgcggggtgctgcggcttcacagcgcctcgcaacgctgtagcaccccgcagcgtccccgcagctcggcagccgctccgcggcggcctcgcagtgcagcggcatcctcgcgcctccgcaaccaaggggcatcctgccctgccaatgtcctcgctggttgaaaagcgtgggcgggtgcgaaggagcgggggtataatgctgcggatcgatcgagggcaaggagcgtgttttgagcgagcaggtggctacggcaggtttggacgaaggcgtaggagaaggcgcgaacggggacggtcggcggaccgaccgcacggggttcctccagggtctcggatgctaccttctgtggggcgtcatgcccgtgtactggaagctgctgtcggcggttcccgcgttcgaggtgctggcgtggcgcatggtgtggtcgtgcgcggcggtggtggcgctgtgcgtgctggtcaagcggacgcgctttctctacctgttccgcgacccgcgcgcggtgcgcacgtttctggcttcggggctcatcgtctcgtgcaactggggcgtatacatctgggccgccaacagcgggcatctgctgcagacgagcattgggtactacctgtgcccgctgttcactatcgtgctggggatggtgttcttcaaggagcggctgacgcccatgcagacggtggccacggtgctggcggcgctcggcgtggggtacttcatcgtggcgaacggcggcgacatctggattgccttcgcgctggcgctcacgttcagcgtgtacggcgcggtgaagaagaagggcggctacccggcgctgcccggcatggcgttcgagtcgctgctcacggggcttatcggcgcggtggccctgatcgtgggcgcggccgctccgtggatctggcagctcgtgcccgccacgcccgacccgatggccgtcaccggcccggtggccgacatggcgctgctcgccggttgcggcgtgctcacggccatcccgctgctgctgttctcggcggcggccaaccgcatctcgctcacggtgatcggcttcatccagtacgtcagccccaccatcgcgcttgtgctggcggtggccttcttcggcgagcagttcaccatggcgcacggcatctgcttcgcgctcatctgggcgggtatcgctgctattggcgttgaagccgcatgggcgggcaggcggaagcgagcggcagaggccgcgccgcccgtacccgccgccgtgtcctcgccgaacccgtcgtccgcagccatgttcaccgacgcgccccctgccgagcgctagccggcttgtcgggggtcgcgcctcccctacgcgtctttctcgaagaccaggtcgattttgcgtatacgggcgttgctgtcgacttcggtgatgatggagccgacgtagcggtagccgcgcgccgcgtaatcatcgatgatctcgcggtgttccgagatgccgaatccaaccatgattacttcacgcttcttgtagtcgacgctcacgtactcgtactccctcacggcgcacccctttcggtcgactcgcctcggggcatatcttagagcctgctgcgctaagccgcaaggacgcgcaaaagacaggcaacgtgcgcgctccgccgacctgtttgctgtacaattgcaacgttttgccgtgggggcaatatcgtacaagactttttcggaggggtgtggcatggccgaggccaaccaaccaaacagaggcggagcgacgagcggggccgtgcgggggagtagagcggccgagctcggatcagacgtcgccaagcgcgagcggttcggctcgcgtctgggcttcatcctgatatccgcgggatgcgccatcggcctgggcaacgtatggcgctttccctatatcacgggcgagtacggcggcgcggcgttcgtgctcatgtacctcgtgttcctcgtcatcctgggccttcccgtcatggtcatggagttcgccgtgggccgtgccagccagaagagctcggcggtggcgttcgacacgctgcagccttcgcggaagtggcactggttctcatggtggggctacatcgggtgcatggtgctcatgatgttctacaccacggtgggcggctggatgctgtcgttcgtggtgaagatgggcacgggcgcgttcaacggcctggacagcgcgggcgtcggcgccgtgttcaacgacatgctggcgaaccccaccgagctggtcggctggatgctcgtggtcatcgtgctgggcttcctcgtgtgcagcctgggcttgcagaagggcgtcgagcgcatcacgaaggtgatgatgatctgcctcttgggcatcatggcggtgctcgtggtgcgtgcggtcacgctgccgggcggtctcgagggcctcaagttctaccttatccccgacttcggcaagctgttcgccggcaccacgaccgccgaacaatgggcaacgttcggcgacgcggtgtacgcggctatgggccaagcgttcttcacgctgtcgctgggcatctcggccatggagatcttcggcagctacatcggcaaggagcgctcgctcaccggcgaggcgctgcgcatctgcggcctcgacactgccgtggcactcgtggcgggcctcatcatcttccccgcgtgcttcgcgttcgccgtgcagcccgacagcggcccggggctcgtgttcgtcacgctgcccagtgtgttcaaccagatgccgatggggcagctgtggggcgcgctgttcttcgtgttcatgagctttgccgcgctgtccaccatcatcgcggtgttcgagaatctcatcagctggtcgatggacaagtggggttggacgcgcaagaccgccgtcgcgcgcacggccatcatcgtgacggtgctcagcctgccgtgcgccctcgggttcaacgtgctggctggcgtgcagattccggctatcggcgacatccagtccatcgaggacttcatcgtgtcgaacaacctgctgccgctgggcagtctgttctacgtgctgttctgcgtgacgaagggcggctggggctgggataacttcctggccgaggccgacaccggcaagggcatccgcttcccgcgctggttgaagctgtggctgaagttcggcatacccgcgctcatcttggtgatcttcgtgatgggctacgtgccgaagatcaccgtgtggctggggatggcgtaggtcgagacgacggtttttgcacagtaatcaccggattattgcatcggggcctttcggagcgctcttttttcggaagcagagcaacagcgacatggggaaatgttcgcaagtcttcacgggcgggatgcgaagagcgaattgccagtgtcgaagatgcaataatcggtgaaaagcgtgcagattggcgtgcgcgtcgggctcaaggcagcatcgtcgccgcaatctcggtgggcacggtcggcgcaaccgggcctatcggttgctcgcggcttggccggccaaggtttccaggagctgctgcatcttcgcgatgacgggcaggtcgcccaggccatagcgggcggcaagctccttcatctgggggaacgcgatctgcgtgcggcccgcctcgtcttcccagatggagatgcgcaggggaagctcgatcgctatgcgctggtcggcttgcatgagcgcggtgccaacttggggcgagccgaacaccacgaccgtggtgggtcgcaggtcgaggcccgctccttcggcgttctgcgcgtggtcgaacgtggcgaacacggggatggaccgcgccgccagctcgtctgtgaggcggcggaccgtctcgtctacgggcaggctccctacggtcaggtgcaggttgcgagattccggttggcccatggaaactccttcgatggctgcggttggaggcgcggttgcggcggcggcagttgcgtcggtcgcagctgcctcggcgatcgcgcggcggtgcagctccaccatagcgcgctcctgcgcgcttgcgcccggttagcgcagtttgtccggaaacggttgcctgggcaccgtgggcgccgggctcgagagccttataatgcgtgatggttgttggacgggcgctcagcgcccgaggacgagggagttcgagatcatggccgaggcgatggcgggaaagcgacggttctccattctgggcgattccatcagcacgttcgagggatgcaacccgacgggcttccgcgtgttctacgagggcgagcgctgcgctgccacgggcgtgcgcgaggcgcgcgacacgtggtgggcgcaggtggtcgacgcgctgggcggcgagcttctggcgaacgggtcgttctcgggcagcatggtggagggcgcgggcttcccggccggcgacagcgcggagcgcgtcgcggccctcgcgcgcgacgggcaggcccccgatgcggtcctcgtgttcatgggcatcaacgactacggctggggcggcgccgacgcgcaggcggccggacggggcaacgcgctgccggcctgcctggacgtcgacgcgctcggcgagcagcgcgagcccggtctggccgcctccgatgcggtcgagcggttcggagctgcgtacgggtcgatgctcgcgcgcctgcgcacggcctacccgcaggccgaggtgtggtgctgcacgctctgccccggtcgcgtggtcggccgcgacggctccacgttcgcctaccgcctgcgcggcgtgcccttcgacgcatacaacgacgccatccgcgccgcggcccgcgcacgcggctgccgcgtggccgatgtgcgcgcactcggtcgcgactacgaggccttggacggcacgcatcccacggcacggggcatgcgccaattcgcagggttgatgttgcgcgcgatggaggctgcggacaacgccgcgggctcggcgctgggcggcagctcggcgttgggcgtcgtcgcgctccccggcgtcgccgcgctgcgcgccgccgcccacgacgccccgccctcggccgagcgctgctcggagccttcctgcataggctgcccccatgccgcctccaccggcggcaagtggctgcttgtctgcgaacgggggatatgagggcgcttgccctgcggagcgcttcacagggcggatcagcagtctctcggcggtattcctctgccgcttaggcgttgtttggaattgccgcccaccctccttgacatcgccccgcgtcgtactaaaatctcgttttagcactcgaaggcttggactgctagcacacagggcagtccgaccgcttgacgaaggaacgtacccgaaaggaagcgacgccgccatgcgcaagttcaaaacagagagcaagaagctgctcgacctcatgatcaactccatctacacgaaccgcgagatattcctgcgcgagctcgtctcgaacgcgtcggacgcggtggacaagctctacttcaagagcctcaccgacaagtccatcgagctctccaaggacgagcttgccatccaggtgagcttcgacaaggacgcccgcaccgtcaccgtgagcgacagcggcatcggcatgacgaaggacgagctcgaccgcaacctgggcaccatcgcgcactcggactccatggcgttcaagatggagaacgacgaggtgcagggcgacgacgtggacatcatcggccagttcggcgtgggcttctactcctcgttcatggtgggcaagagcgtgcgcgtggtgtcgaaggcctacggcagcgacgaggcctgggcctgggagagcgacggcgtggagggctacaccatcgagccggccgagcgcgccgagcacggcaccgacgtcatcatcacgctcaaggacaacaccgacgaggactcctacgacggctacctgtccgagtacggcctaaaagacctggtcaagcgctacagcaactacgtgcgctaccccatccgcatggaggtgacgaagtcgcgcgagctgcccaagcccgaagatgccggcgacgactacgtgccgcagttcgagaactaccaggagctcgacacggtgaactccatgatccccatctggaagcgccgcaagtccgaggtcgaccaggaggagtacaacgagttctacaaggccgacttccacgacttcgccgacccggcccgcaccatctccgtgcacgcggagggcgcgctgtcctacgacgcgctgctgttcgtgccgagccgcgcgccgttcgacctgtacagccgcgactaccagaagggcctcgcgctctacagctccaacgtgcttatcatggagaagtgcgaggagctgctgcccgactactacaacttcgtgcacggcgtggtggacagccaggacctgcagctgaacatcagccgcgagacgctgcagcacaacagccagctgcgcgccatcgccaagaagatcgagaagaagatcacgtcggacctcgaggacatgcgcgacaacgaccgcgaaggctacgaggcgttcttcgagaacttcggccgcggtctgaagtacggcatctacgccagctacggctcgcagaaggacacgctggccgacttgctgctgtactactccgcgaagcaggacaagctggtcacgctggccgagtacttcgaggccatgcccgaggaccagccggccatctactacgccgccggcgattcggtagagcgcctgaacaagatgcccatcgtgaagacggtgctgggcaaggggtacgacgtgctgctgtgcacgcaggacgtggacgagttctgcttcaccgccatgcgtgactacggtgcgaacgaggacggcgagggcgcgaaggagctcaagaacgtggcgtccggcgacctcgacttcgccaccgaggatgagaagaaggaagccgaagaggccacgaaggagaacgaggacctgttcaaggcgctgaaggacgcgctcggcaacgaggtgacgaaggtggccgtgtccgcgcgcctcaccgacgcgcctgcgtgcgtgaccaccgagggccccgtgtcgctggagatggagcgcgtgctgtcgaagggccccgagggccccgacggcgtgaagtcgcagcgcgtgctggagctgaatgccaagcacccggtgttcgacacgctgaaggccgcccacgaggccggtgacgccgacaaggtgcgcctctacgccgacctgctgtacaaccaggcgctgctggttgagggcatgcccatcgacgatccggtcgctttcgcccagaacgtcgcgaagctgatgtaatcaggttccgacggcctgccggccgccggaacgactcgacgctgcgaagccccctggcacccgatcttgccgcgatcccggaggttcgcgtaccgaagtacgcttcacctccgcgatcccgccaatctcgggcaccagggggcttctcgctgacttactacgccaacctgcacggccattttcgcgcctccggcgcgaaggggcgccctgcgggcgccccggctgcggacgctccggctcctacctgcgagctccttctcgcgctggcgcatgagcgtgtggccgctgcgcgcccgcacgggcaacctgcgcggcagttatgcgccctccgggcgcatgggcgggcagctgcgcttcccgcccatgccacctgcacggttgttctcgcgctggcgcgcgaggggcgcggctcctgcggagcgcacccgtattcgcgctccgcgcgaacggatgtttcacgtgaaacatccgagggaaggcgcgcctcgccctcctttgttatcgacttgtttcccgttctcgcacgtgccgcgcgctactgtgcggaaagcgctatcatcggcgcatgacgaagccgagcgctaggaggacccatggcagatgtgattttcaaacgggcgagcgtgcgaaggttcacggacgatccgatgaccgatgacgaggtgcgcgccctgctgcgtgcgggcatggcagcaccttcgggtggcaaccagcagccgtgggagttctacgtggcccgcgaccgggccacgttgcagctgttgtccgaggccagcccctatgcgaaaccggcggccggcgctgcttgcgccatcgtgccgtgcatgcgcacggagggcctgcgctttcccgagatcgccgtgcaggacatgagcgcctgcgtggagaacatcctgctggaggccgtcgaccttggcttcggcgccgtgtggatgggcatcgcgcctgagccggagcgcatggccgccgtgtccgagatcgtgggtgcgccggcggggctggagccgtttgccgtcatcgcgttgggctatccggagtccgagccacgcgccaagggcaaggaccgctatgccgaggaccgtgtgcactggttgagctaaacgaggcggcgtaggcaggcgaaggcatgtgccgtgcgtgccgtggatgccatgtcctgcggaggcggcatcgatgatgaaactttgcaaatttcgaaaattttctttcagaatttgcgaaatccactatcccgcccgcacggctccttggtcgcagcggttgccccaggagtcgatgagctgctcgtcgcggtagacgcagatgatctcgcagtggttcgcgcacttggcgcactcgatctcgcgcgtcttgaacgcgaagtctcctacggcctggaagtcgaacgcctcgcagtcggcggtgcgcgaggatgcgcccgcgcccgtcgaccccgtgccggcctccgccgcactcgcctcggcggccagcagtgccacgccgaacgcgcccatcaggtggccgtcggggtccacgagcacgctcatccccaacatgtcctcgaacgcgcgcaccacgcccacgttcttgctcacgccgccctggaacaccacgggtgcgacgatcttcttgcccttgcccacgttgttcaggtagttcgacgctaccgcgcggcagagccccgcgataatgtcctcgcgcgcgtagcccacctgtatcttgtgcaccaggtcgctctcggcgaacacggtgcagcgcgccgcgatgttggccggccgcttcgatgccagcgcgatctccccgaactcctccacctccacgccaagccgcgccgcctggctcgacaggaacgcgcccgtgccggccgcgcacagcgtgttcatggcgtagtccacggctatgccgttctccacgcagatgatcttcgagtcctgcccgcctatctccaggatggtgcgcacgtccggatgcaggtacgtcgtgcccacggcgtgcgcggtgatctcgttcttcaccacggccgcgcccagcatggcccccacgaggcgccgtgcgcttccggtggtgcccacggcgcgcacgcgcatggtcgcatggtcgatctgcgcgcccaggtcggccaccacccgccgcgccgcatccgtcgggttgccctccgtccacaggtacgaccgcgccacgatggcgcggtcggcgtccacgatgacgcccttcgtggagatggacccgatgtctattcccaggaagcattccgctcgccctggcgagacgagcggaatgcccgacgctgcggtgccctccggcgccgaaccttgccgctccaagccctcctcacgtgcagaaacacgcttcgtctgcttttcacggcaatcttcggcgccggagggcacctcgccgacgtcggtggtcaggccagtttcttcctgctccgtcatatcgtcttctccttcttcatggccagcatgtcgtagaacgcctcgagccgggtgtccagcccggtgtcgctggtctgcgagtcgtagctcaggtacaggatgggcaggcccgtgtcgcggctgacctgctgcagcacggggatgcagtccacctccggcgtgcaacccgacgacttcaagtgcaccacgccgtcgaagccctcctgcgcgtacctcagcgcggcggcgatggtcatgctggacgtgggtcccatgtcgtagcgcacgtagtcggaaatgcccgtgcgcaggttcctctcgttgtagcgcaggttgcggttcgtcatgttcagctgccggtgcacctccacgcccaggtcgagcagcttgcgctccagtcccaggttggaatgcgggtcggccgcggtgaagtactcgcccaccacgcccacgcgcacggggcgcgccgggcggcacaccggcagcccgcgcagcgactccagcccgcggcgctgcgcctcggcgatatcgcgctcgtttgccgtggcgcgcatctcggcgtggtaggcggccagcgcccggtcgaacgacccgtgctcgacctcgaacccggcatgcgccaggtagaagtcctgcgcctcgtccaggaactcgatcatcttgaacgcggccagcatcccgcgaacgccgtgcggcaccgacaggttcgggttcaccttcttcttgcacgcttcgatgtagtccgtgagcggcttgcccgtgacggtggcgaagttcagcatctcgaactcgtagcccatgtcgcgtaggatggactcctgcagctcgccgtagtagcccagccggcaggggccggcgaactgcacgagcacgtccgcgcccagctccaaggcctcgatgtagtcgcccaggatgtgcttgaagggggcgcataccgaatcgccggagttgcggctgcccagctccaccgtgcgcttggtgggctcgggcaggggcaggtagtcggcgtcaagcacgtgctccacgaagaacttgaacacgatgtcgtagtagctgtagcgtaggaaggccacgcgcgttcgggcgtggcggtcgcgcttcgggcggcggcgcggatgaggcagcacaagtcgcggcgggcgcttgcgctcgaagaacacggcggtgcgggcgcgcagcgtgtcgtccgagccgtccgcccggccgatctccagggcgcttccggcctccgcatccgggattcccgcaatgcctgccgtgccgtcgcgaaacctcgcgtcgtcctcggtccctgcgatttccccggcccctgtcgtgccgctgttcgacctgccgcggtcccgggcgcttccctcgaggttagccatgcacgtagccccccttcttctggtagcgcaggatgtccatgaagctctcgatgcgggtctcgaggccggcggtgccgctctgagcgtcgatggtgagattcaggatgggcttgccctggatgcagcgcatgatggcgtcgtcggtcatggagtcgggcccgcaggggaatgcgctcaccagcacgatgccgtcgatgcgctcgtgcagcagcaggatagcgccgacaagctcgcggttcaccacccagggcatggtgtccgagaagtcgaagctggccttgagcgcgcgcccgtggtcggcctcgtcggcgtagagcaccgtggcgcccaggcgttcgagcgcatccgtcacgctgccgcccaggtaggggtcgtgcgccaggtaggggtgtgccaccagcaggatggccaacggccgccccgcgccctgcgtggcctccagcgaggccagcagccgctcctgcgcgcccgccgccgtgcgatcggcgcgctcctgggcgtgcgatgccgccctccaggcccgcttcgcttcgcgcgggctggcgccgaagcgcccgcccagctcgaggaacgcgtcgcgcagcgacgagcgcccctccagtgcgtctgccaggcatgaagccacgcgcacgccgcggtcgcggaaggtgttcgccaccaggtcgggcagcgcctggaacttcgtgcagaacccttggcgccgccccaggttgcccatgctcggcacgaaaagcgcgtcgcaggagcccagcaggctctcggcgtgtcccaggtaggccttcgacgccaggcagcactcgtccacggacaatgcctcgcccgcctccatgagcgcgcggtccgtcgggcggctcagcaccacctcgcgccccagctcgccgaaaaacgtctcccacagcgtgccgtagcggtagtacagcagcgcccgcgggacgcccacgcgctgcacgtcggcgcagtcgccctgtttgaggatgcccatgcggccctttcgctcgccccgatgatggctccatggtatcgcttcgcagccagggggtccgccgacccaggcgttcgccacaaaccttccaagcagcgggatgcgtcgcgggccgggcaatgcgcagggggcggcatgcagcctctcttcgggctggcggccgctatctggtgcagtcgggctgctgtcccgcgccacagctctgcaaccgtaaggtttcaaaagaagttgaatgagcttggctgcatgaaaaggtgacatttgtcgctgtaaagttcaaaggatagggtaacgaggagcgtttgggggcaaagtcgttgaatatcaagcagatccgctactttgccgcggtcgtcgagcacggcagtctgtccgcggcggcaaagggtcagtacgtaaccgtgcaggcggtgtcgaaggccatcgccgacctcgagcgcgagctgggccagcgcctgttcgtgcgcgagagccgcggcgtgcatcccacgccgttcggcaaggcgttctatcaaaaggccttgccggttctggatgatttcggcgagctggaggccttcgccaagctctatcacgagagcgtccttcccgatgcgcttcgcctcgcgctgtgctcgcctgcgttttacggttacgagcaggcttgcgcgagcatagccttgttcgcgaaccggggcctcggcctcgattcgaccgtgatgctggagaccggcacgcaaggattgttctcgttgcgggcaggcgactatgatgcgctcatcaccatcggcacgctttcgactcccgataccgactgcatgccggttgggacggtcgcaccgggggtggttatgtccaagtcgcatcccctggccggtcaggacgaggtgagcttggccgatctttcggactatcccattgcagtgtcgcaggaattcgacagcttcaacgagtccatcgtcgcggtgtaccgcaggcgtaaggtggacgcgatgttcgtgccgatcataccggagaagttcgacgagcatctcgaggtccatcatggcgtgtgcctcatggtgcatatcccggcattgggcgagatgtaccctggtacggtcatcaagcctctggcctccggcgacgcggttgccattcccctctgcctggtaagcatgaaagaccgcaagtcgccggcttaccttgccttcgagcgttggcttgcgagcgagctgatcgtggtcggagggggagggatcgcctcgtcccctcgatgaggaagcgtgcgatacggtgttcgtatctctgccatggcaaatcgtagggcgacttgaaaaaatatttgaagggtttttctgatcggtgggcggcagggagggccgggtacaatggcacgctgttacgctcgttctcggtacgatagggtgcgtcgttgaacataaagcaaatcacatacttgaccgcggtcgtcgagcacggcagtctgaccgcggcggcgaaagacctgtacgtaaccgtgcaggcggtgtcgaaggccatcgccgacctcgagcgcgagctgggccagcgcctgttcgtgcgcgagagccgcggcatgcgtcccacgccgttctgccaggagttcggcaagaaggcgcttgatgttatcgccgggttcgacagcttggaggcgttcgcccggtcttacggcgagcgcggcggcctgcccgatcgacttcggcttgcgctgaacacgccggcctttcccggcaacgagatggtgcgcgagaacacggcctcgttcacgcgggcacgtctcggtatcgaggtgacgtacgagcttgccacgggagaggcaggattcgaagggcttgcggacggcacgtacgatgccatcgtcaccgtaggggcgttccgccatggcgatgtggagtgcttccccgtgggcaccgttccggcaggcgtcatgatgggctcgcggcatccgctcgcccagaaggacgtcgtcagcctggaagacctcgcgcggtatcccatgggcctttcaagctggttcgacgacgcgaacgacaccatcgtcgagcactaccgcgaacaggatgcgcacttgaatttcgtcgagctggcgcttgcggatgtcgtgcggttccttagcgagggaggcatcatcttcacgacgggcattcccgcgctcggccgcgttgacccttccctgacggtgcgcgtgctggcgccggaagacgccgtgcccgtgcccatctgccttgtctgccttaagggacgcggtgccatgatgcgatccgtggtggagaagctgcgcttgggcgacggcgggcttccgttcctgaagtagcgcgtccgaaggctccctttaacgacgggctgcatctaaactcccagaacgcaagcccggcctggggaccgcctcgcaggacaagggctctgccctacgaggcggtctcgccgtaaggcaagggcagagcccttgccttacgctcgacccgggacagacgacgaggcgaaactttcataccgcaccttctcgctacttgcgctttttaagccccatccagatgagcgcggccagcgcggcgcctgcgagcggggccgcgatgaatacccacacctgcgaaagcgcgccggcatcgccggagacggccatcataagggccgggccgaagctgcgtgccgggttcacggacgtgcccgtaagcggaatgcccatgatgtgcacgaacgccagcgtgaggccgatgatgatgccggcgtagggcgccgtgcgctcgtcggctgtcgagcccagcacgctgagcacgaagatgcaggtgaggatcacctcgacgataagggctcccaccagggatattcccacggcggacgcggctccgtagccgtcgcagccaaggcccgtggcagccacgcctcccaggtcgcacatgcttatgacgagcgcgagcacggccgcggccacgatgccgccgacgaactgcgcgacccagtagcccacgaggtccttgcccgacaggcgcttgtccaggaacaggccgaacgatacggccgggttgatatggcaccccgacacgttgccgatgacgaacgccatcgccacgatggaaaggccgaacgccatggctatgccgagcgtgcctagcgtcgcgcctgccacggcggcgctgccgcagccgaacagcgtgagcacgaacgtgccgaacgcctctgcggcgtactttttcatcgatgatgcttccatattgaggctccccttgctttcgataagcgaatgcttgcgcgggctcatgcgctgcacgggcccgatgcgttcttgcctgtgcgcgcccgcgatgcgcggttgcttgcgggcgcgccgattcctctgccggccgttacttggttttgccgatgcggcagatcgtgctgccgcacacggggcacgtgcccttcgtgatgggcttgccgttcttcgtggtactggccacggggtcagccatgaccttcttctccttgcacttcatgcagtacgcctcgaccgccatgggtggtctcctctcctttgaaaatagttggcgctgttatcgtcgtttgaccgtaaccccatgtcaatacggttaaaatgtagttgaaagggttgacagcgcacgttggccgaccgttctttgacacgcggttgccagcgggcgtatgatcaaggcatgccgttcgtcgaaaaacagttcagcccgaaggtggtgctggtcgccatgctggtgggcaccttcgtggcctcagtcagccagagcatgctcacgagcgcccttcctgctgttatgcgcgagttcggcgtggatgccacgctggggcagctgcttaccacgtcgtatatgtacacgttgggcatcgtggccgcgttctcggcgttcctcatcacccgctgcaacgtgcgctggctgttcctgggcgcgctcgccctcttcgcggctggctgcgcgctcgcgtacaacgccacggcctacccgctgctgctggctgcacggctcatgcaggcgtgcggcacgggcgtgctcatgcccctcatccaggtggtggcgctggagatctacccgaaggaccagtacggccaggccctgggcctggtggggctggtgttcgggttcgcgccggtcgtgggtcccacgctgtcgggcatcatcacggatgcgctcggatggcgcaccatcttcctgctgctgggtttcgtggccgtggcgtcgcttctggcctcgtcgcttgtggtgcgcgacgtgggcaggcacgagcgcatcgcgctcgacgtgccgtccgtgctgctgtacacgttcgggttggtcgtgttcatggtgggagtgacgggcctcgagcagttcgggttcctcgatgcgcgcgccttcgggcccacgctcgcgggcgtggcgctggtggcggtgttcgccgtgcggcagatgcgcctgcgcaagccgtatttgaagcttaggctgttcggcaaccgcgtgttccgcacgggggtgctgctgctggtggtggcgcagatggccatgatggcgtcggctctgcaggttccgctctacctgcaggagatccacgggttctcggccacgcagtcggggctcacgctgctgccgggtgcgctgtgcatgccgctgctgaacccggtgacggggcgcctgttcgaccgcttcggcggcaagctcgtgggcatcgcgggcttctcgcttctcatagcgggcacggcctcgttcatgttcttctcggattcaacgcccgtggtgctggtggcggccctgtacctggtgcgcatggtgggcgtggcgttcattctcatgcccatgacggcgtactgcatgacggacctgggcggggacgaccttccccagggcacggccatcgtgaactcgctgcggcagatctgcgggtccctgggctcgtcggtcatggtggccgtggtggcgcacgcgtcggcgggcgcggcggtggttgccggggcgggtgtgagcatgcacgggttcagcgtgtcgttcggcctgcaggcagcgttgctgggcgtgtcgctcgtggggaccatcgtgttcgtgcatggcaagcgtcacggcaaggatgcgaagggcgcggctgcggcctgacgggcggcgccgcggactcgggcggcgcacctgcggcgcgcggcctggcgctccctcggcggggcacaccggcctgggcgggttgccgcaggttccgcgcgctcgagtccgcggcgcgggagccgtctaccaggctaccgtcacgccggcccagtcgaggatgcccttgtccatgttgtacacgttggtgaagccgttgttgatgagctgcgcgcaggttttccgggcgcggttgccggtgcggcagtaggcgagcaccggggcatcgcggtcgagcccttcgagctccggaggaagctggtcgaagctgtcgtagcgcatgttcagcgaatcgcgcagatgcccgtcgccgtactcctgcggcgagcgcacgtccaggatggtcacgccgccccggtcgaccaggtcctcggcggcctcgcttgagatcaggtggtaggcgcccgagtcgagcgcccgttgctcctcggccgtgatgatgactttgaccgagccttccccgtctgccatgctgtcctcccgcctgcccttcccgacacggcgagcgggggaaggacgtaaatgtatctaagataattacagtttatgacggtaacagtaattctcttcgcggggcctgtcaagcggaagttcccctgcgcggtgaaaaaaccgggcagccgcttgcgcgggggcgggggggggccggcggccgcgccccgcttccgtataatgacccccatgagaagcgtttcagacatatatgcggccgcccgcgcggcgggccgccagccggtctcgttcgagatattcccgccgaagggcgatctcacgctcgagacggcgcacgaggtggcggccgagctggccgacctgctgcccgatttcgtgagcgtgacgtactcggcgggcggcagcggcaaccggcaggccacggccgacgtggccgccatgatccacgatgatttcgacatccccacggtggcgcacctcacctgcctgggtgccacggaagagtccatctcgcgcgccatcgacgacctgaaacgcaagggcattgccagcgtcctcgcgctgcgcggcgaccgcacggccgacgcatcggcggcggaggggccgttccgcttcgcgaaggacctggtcatgcgcctggcagacgaggggttctgcgtgggtgcggcggcgtatcccgaagggcacatcgaatgcacggacttccgcgcatccgtggcgcacctcaagcagaagcaggatgcgggtgcgtgcttcttcgtcacgcagctgttcttcgacaacgcgtacttctaccgtttccgcgaggcggccgacgcggcgggcatctccgtgccaatcgcgtgcggcgtcatgccgtttttagggaaagcgcagatccagcgcatggtgttcatgtgcggcgcctcgctgccgtcgcccatcatcaagcttctggccaagtacgaggacgatgcggtcgcactgcgcgcggcgggcatcgagtacgcttgcgcccagctggtggatttgcaggagcacggcgcggacgggctgcacgtgtacaccatgaaccagcccgacatcgcccgcgcctgcgcgggcgcgctgcgtgcgacgtggcgcccggcgggcgaggtggccgtgcgcggcgccggggagcctgtcggcgggcgcgcctgatggcgacggagggcctgcgcgtcgaccgcgacgaggcgctgcgctacttgggctacgacgggcaaaagctcgacgccgacctcgcgcgccgcttcgacgaggccgtggccgcctgcgagcgcctgcgcccgcgctgcctccatgccgtgtttcccgtggaccatgcgaggtcggatgccgggcacgtggcgttggaggggtgcggcctcgtgctggagggacgcgacattgcccgccatctggacggtgccggcgaggcagtgctcatggcatgcacgctgggcgccgagagcgagcgggcgctgcgcctgcgcacggccacgagccctgtggacgcgctcctgtacggggctgccgcgtcggcgctcgtggaggcggcggccgacttggaggagtcccgcatcgtggccgaggccgccgcgcgcggcctgcgcacgaacttccgcttcagccccggcttcggcgacctgccgcttgccgtgcagcccgcgttccttgcggcgctcgatgcgccgcgccgcatcggcctcacggccaccgcgggcaacctgctcgtgcccacgaagagcgtcacggccgtcgtgggcctgttcgagggcgagccgtcgaacgcctcggcgcgctcgacgtgcgcttcctgcgcgctggccggacgctgcgcgctcaaagaccagggaaggacctgccatggatgagaacaagcccgctgcttccgcccccgcccgctcgggcgcggggcgtgccgctggcgctaccgcccgcaccgccgtttccgcccccgccggcctgcccgacccgctcgcggggctgcgcattgccgacgcgcacctcgagcgcgtgctgcgcgggcaggacttcctcgtgcaggacggcgccatgggcacgctcttgcaggagcgcggcctcacggcgcacggcgagctgcccgacctgctgaacttgcatgacccggacgccatcgtggacatccacgccggctacgtgcgcgccggggccgagatgatcaccacgaacacattcggcgccaacgcgcacaagctggagggccgcgcgacggtggccgacgtctaccgtgcggcggcggccaacgcccgcacggccggcgcccgctacgtggcgggcggcctcggccccatcggcgtgctgctggagcccctgggcacgctgccgttcgaggcggcctaccagatattcgccgagcaggtgcgcgccgtggtcgaagccgggtgcgacatcgtgctcatcgagaccatgacggacctgcgcgaggcgaaggcggcggtgctggcggcgaaggacttctccgacctgcctatcttcgcctccatgacgttcggcgaggacgggcgcacgttcctcggcacgcccccgggcgtggcggcggccgtgctgtcgtcgctgggcgctcatgtggtgggcgtgaactgctcgctgggacctgcggagctggagccggtggctcgcgagctggtgcgctgtgcgcgctgtcccgtcgtggtgcgcccgaacgccgggctgccgcacgtcgtggaggggcgcaccgtgtacgacgtggagcctgcggagttcgcagccgtcatggagcgcatcgtggaggcaggcgcgagcgtggtgggcggctgctgcggcacgaacccggccttcaccgcggagctggcggcgctcgtggcgggccgcacgccggtgccgcgcacgccgccgtccgcgttcacggtgacgagcgcccaggaggtcgtggagctgtcggaagggcgcgcggacgcggtcgtcatcggcgagcgcatcaaccccacgggcaagccgaagctgaaggcggtcctgcgcgagggcgattacgactacctggtgggcgaggccgtggcccagcaggaggcgggcgccgccatcctcgacgtgaacgtgggtctgccggagctggacgagcccgccgtgctcgcggcggccgtaggtcgcctgcaggccacggtcacggcgcctttgcaggtggattcgagcgatccggcggccatcgaggcggccgtgcgcgggtatgccggaaaaccgctcgtgaacagcgtgaacggcaagcgcgagaatctggatgccgtgttgcccgtggtggcgcgctatggctgtgcggtagtgggcctcacgctcgacgaggacggcatcccgcccacggcagaagggcggctcgccgtggccgagcgcatcgtggcggccgcggaggcccacggcatcccgcgctgcgacgtggccatcgactgcctggtcatggcggcggccacgaaccaggacgaggtgcgcgagatcctgcgtgccgtgcgcctcgtgaaggagcgcctgggcgtgcgcacggtgctcggcgtgtcgaacgtgagctttggcctgccgcagcgcggcctcgtgaacgccacgttcctggccgcggcgctcgcggcggggctcgacctgcccatcctgaacccgctgaacgcccgctgccgcgacaccgtggaggcatggcgcgtgctgaacggccaggaccgtggggcggcggcctacgtggagcgctacgccggggcgcccgacccgtacgcggtgcgtggcgcgtccggggcacccgggggcgttgcagatgccggggccgcggcgcccgaaggggagcgcagtcccgtggcggggccggacggagcggcaggcatgccggtgccgcccgccctcgcggacgcggccgaggaggtgcgcgccatggagcgcctcatcctcacgggacgcgcgacccccatggcagccgcgaccgagcggctgctggagggccacgacgcgctcgacgtcatcgacggcgtgttcatcccggcgctcgacgccgtgggcgagcgcttcgagcgtggcgagttcttccttccgcagctcatggcctcggcggaggcggtgaaggccggcttcgacgtggtgcgctcgcgccagggggaggctgccccgaccgacgacggcaaggccatcgtgctggccaccgtgcagggcgacatacacgacatcggcaagaacatcgtgcgcatgctcttggagaactacggctaccgggtgatcgacctgggtcgcgatgtggctcccgagcgggtggttcaggcggtgcgcgagcacggcgcgcggctcgtgggcctctcggcgctcatgaccaccacggtgaaggccatggagcagaccatagcgctcttgcacgagcaggtgccgggcacggccgtgttcgtgggcggcgccgtgctcacggccgactacgcgcgcgagataggcgcggactactatggcaaggacgccgccgaggccgcccgcatcgcggagcggttcttcgccgcgcacccggcaatatgaaaacgagatgcttttgcgggtgcaaccttcaggagttcttgctatgatgtgtgccaaggcttattcccgaggaaaggggtctgctatgggtgtgaaatcggcggaggcgctcgacgtttcgttcgacgagctgccgaactacctgcacgccaagcattcggtgtacatggaggtcggcggcgcaacgtattacctgaccgatgtgaacgaccgctactggcgcgcacaggacacggcccagttcaacgacaagggccactacgtggacgcgagcgagctggtgcccacggtgagcgagttcatgacgctccccttcgtggacggcaagtcgataggggatgtgttcgaggaagcaaccttctacgcctcggaaaaaaccgaatagtgaaaacagggacggccgcgcaagcggccgtcctccgttgagcgtgacaaggggacggggataatgtcacgtctccgggagttttgcggccccgcgcccagcgaggaacgggacatcatcctccccgtccccttgtcacgcggcgcatgccgttggctccgatgcgcgcctatgccgggcggatgacgagctctttgataaggctgtcgtccaggctgcatacgccgtcgttgcagttctcgatctgcgcgagggcgtggatgatggtgccgttgtagtcggcgtagaagttcactgtgcgctcgttcacgattctcgggtcgcgcatggtgaagccgccgaacatgaacttgttgtggaacgacatctcgatggcgttgcgcccgtacagaaacgtgttctgccgcttcaccatggaggggcagtagtccacgaggcggctgtcctcggtgaagcatgccgcgagccccttgtggtccttgccctgcatcgcggtgacgaaatcgttgatgaccatgtgcgcctcctagtagactttctcggaattgagcagggcgtcggtgccgccgtccacgaacagcaccacgccgttgatgccgctggcctcggggctggcgatgaacgccatggcgttcgctatctcgatgggctccataagcggctcctcgccgaagtgcgtcggcacggggatggcctccatggccgcgcgttgctcgggcagcatgttcgcggtcatggccgtgcgcacgttgcccggcgcgatggcgttcaggcgcacgccgcgcgaaccccagtcggggctcatgcgccgcacccagcgggcgagcgcgtacttcgtggaggcgtagtacacgtgcccgacggccggatcaacgtccttcacgagctccaggatgcggtcctcgtcggcctggttgttcagcatgcctgccacgtccatgcgcgccgcgccctgggcgatggagttcgacgacgtgataacgcagctgccgcccctcttctccagaaggtcgcgcacgcctttggccatctcggtggcgccgaagtagttgagcgagatgatgagcgagatgggcaccttgccgcccgatacgcccgcgttgcagatcatggcgtcgatgccctcgggatagcgctcgtgcagctcggcgatggcgccggcacggccctccttcgtggccaggttcgcctcgatgtcgccgtccttgaggtcgatgttgaccacctcgtggcctcgttcgcgcaggatctcggccgtcttcgcgccgatgccgctcgacgcgccggtgatgacgtagatgcccatgcgtccttcctttcatgcggggccgcgcgcagcacagcccttatcgatacgcattactattacggggtaaatcatataccatggcccacggcgtcctgcctgcgccggggccaacggtagccgaggcgtcatccgcggcggctccctttcggccggcggcctcggcggctgtcgaaaccgttggaggggcaacagctgcggggtggcgggcacctcgggagcatgggcggcgggcaggcgatcggctgtcgggcgtcgtgggcgggcagagaaggggttcgaaagcctacggagacggggtgcctgccgggacccggctgccacctcgggcctgcgaaccggccggggcggggagctctgctcctgcgtgtcgttcaaaataaggaacataagttcttaaattcccgatcataagctctaaatccatgctatactgcccctaaccgccccatgactcttggaggatgcccatggttgcttggcacgagctgtttcccgtaggccgcgagccgtcgatggaggatgttgccgactacgtcggcaaccccttatgggatgcgttcattaggttcgtcgacgaggcctacggcgcccagccccgtatcgagtacagccgctgcggggccgcgccgggctggaacgtgaagtacaaggcgcgcgggcgggcgctctgcacggtgtacccgcacgacggtttcttcatctgcatggtgtcggtgggatcgaaggagaagcccgaggccgagggactgctgcccgcgtgcgatccgtacgtgcgcgcgctgtacgagagatcggccgacagcagcatgggccgctggctcatgatcgaggtgacgagcgaggccatcctgcgcgacgccgaggcgctcatgatgctgcgcgccgcgccgaagaaggaggcgcgctcatgatgcgcgaccccgagcagaccatcggcaacctcgtcgaccaccagaacgcgtcgtttatcggctcggtggacggggacggcttccccgagatcaaggcgatgctcccgccgcgccggcgcgagggcatccgcacgttctacttcaccacgaacacctcgtcgatgcgggtgcgacactatcgcgcgcacccgcaggcgtgcctctacttcatggaccggcggttcttccggggcgtcatgctcaagggcacgatggaggtgctcgaggactcgtgggcgaaggagcttatctggcaggacggcgacacgacgtactatccgctgggcgtgaccgatcctgactactgcgtgctgcgcttcacggccgatgcggggcggtactatcagaacttcgggtcggaggacttcgtcgtgccggagcctgctggcgaggaaccgggcgcaccggaggcgtgacgcgcaggccgcttgacccaccaggttgcggccacgctgaacaggagcgtctgcgcgagtatctcgagcgttcctccgatgctgatgcccaggggcgcgtccgtgggcgcgaggtagatgaaaccctcgatggagtcgggcgaaggggccggcgtgttgaagatgccaacgatggctatgaccgcccacacgacgagccagccgtgcttgcgctccatgaacgcggggcgaatgagccagagcacgagggcgaacagagcgccgcgcacgatctggaacacaggggccagcccgacgatggggtcgtccagggggcgcatgccgatggcctctaccgaggattggtagtcgaacaggaacattgccgcaaagccgcacagggtgtaggtgaggacgtgcgcgaccgtgaccttcgtgccgaaggcgagcttctctttcatgggtatgcctttctgttgggtgatagacgggcgggtgcaggcggccgcgctcagcggcggttcttctcgcggtagcgggcgagggcctggtcgtagccgccggcagtcttcttgaagtagacggtgtagcccgccgtgacgcccgcgaggatgaacaggtacacgatggcgaaggccgcccagacgccgggatcgtcgagcgggaaccacgggcccgcccaggcgcagagtgccagcacgggcaggccgcaggcgccgaagcccgctatgcgcgccgggtaggcgagcttcctgaacacggcgccggtgaaccaaagcgcctggagagccgccatcccgaaggcggcgccgaacacgctcatggtgaggttgagcccatagctcggcccggcgaacaggtagcccatgcccgtgaaccacagcatgacgatggtgaacatgatgcacgcggcggaggcggcttggacgatgatcttcttcatggcgaactccttcgaaatgagacacggggacggggttgacgtctcatgcggtggctacagcccgagcttccgcttgatggcgggcgcgtactggcgcgacacgatgacggcctcgccgttgtccagcatgagctgcaggcgcgcgttcagggcgggccggattgacgcgacgtggtcgaagttcacgagcatctgcttcgatgcgcgcacgaactcggtgctcgccagccgctcctccagctcgtagagcttgaacggcgcctggtacacggcatcggccgtgtagaggaacgttttgccgtccacggtctcggcgtagcagacgtcgtcgacgtcgagccggtacgtcgccccgtcgcgctcgccgacgagcacgcggtcgaacgcgccgagcgcagacacgatgcgctgcacgcgctcgtcgatgcgcgggcatgcgatggcgacttcgacgtcgtcgagcgcggggttctcggtgatggtcacgttcatggtgcgcgccttccgtcgtcaggttgcggtggttggccaacgacgccagtatgcccgaccgcgcggggcccgcgcaaggccgtcggggcccagttgcatgcggggccgcgcaagttgcacggacgcgtcgtgtggtatgctcgggaagcaaggcgaggcaggcgaaggggagggcgcatggacgtggaggcgaacgtggatctgggccggttcgaggcggccgtcaaagtggtggacgtgcatgcggccggggagccctgccgggtggccgtgggaggctttccggagcctgcgggcgccacgatgatcgagaagcgccgctggatggagcggcacgccgatgacttgcggcgggttctcatgctggagccgcgcggccaccacgacatgttcggcgcgttcctgtgccggccggtcgacccccgggccgacgtgggcgtgctgttcatggacacgggcggctacctcaacatgtgcgggcacggcgccatcgccgtggtcacagccgtgctggaggccgggatcgtggaggcgcgcgagggtgggaacgaggtcgtgctcgaggcccccgccgggcttatccgtgccacggccttggtgcgcggcggtgcggtggagttcgtgtcgttcgagaacgtgccgtcgttcgtctaccgggacgatgtcgcggtgcaggtggaagggcgcaccgtgccgctgaccatcgccttcggcggcagcttcttcgcgcttgcggacgctggcggcctgggtctcggcgacatcggccccgagacggctcccgcctacgcgcgcctcggcatgctcgtgcgcgacgaggtgaaccgcacggtggccgtgagccatccggcgctcgacatcgacacggtggacctcgtggagttctcggcatcgggggcgcctgcggcacccgatgccccggcggcgctgcgccatgtggtggtgttcggtgccgggcaggtggaccgctcgccgtgcggcacgggcctgagcgcaaagctcgccgcactccaccgcgcgggcaaggttgccgtgggagagccggtggtctgcgagagcgtgatcgggacccgcttcaccggcaccatcgaccggacgacgcaggttggcgaccgtgcggcaatcgtcccgcgtataacgggcagcgcctacctcaccggcttcggcacctgcctcgtcgacccgaacgactcgctcggccatggcttcctgctgccgcgttgaccttaccgtgctgtcgcccggtcagaacaggctgccctgcgtgccgatgggctgggcgggcttgtacgccttgacgatgtcggacatgcgccatagcaggccgtgctttttgcagagggcgcggaacagggagcgattttcgtttgcgcgcgggctgttgcagaagtagcgctcaccgtacgcagtgcggtagcgctcgggcagcgcggggtcgacggcggcgatgcgctcgaggaagtgctcgcgctggcggtcgcgcatcgtgacgcccgtcatgtggaagacgaaccgcgcgccggccgccgccgcgccctcaacgacgccgcggatcgtggcgtcgtcgtccgtcacccagggcagcgtcggcgtgaacagcacgccgcagaacacgccggcgtccgccagctcggccagcgctgcgaagcgctcgctcggcgaaggcgcgtgcggctcgatgatgcgcgcaagctcgtcgtcggccgtggtgacggtgaccttcgcgatggcgccgcccacgcgcccgatggcgctcagcaggtcggcgtcgcgggtgacgagggtgctcttcgtgtccaccgaaacgccgaagccgaactcctccaccagctcaagcgctccgcgcgtcacgcgcagctcccgctcgaacgggttgtacgtgtcggacatggcgccgatgcccacgaccccgcgcacacggcggctgcgcagctcgcgtcgcaggatggccagcgcgtcgaacttgacgctcacctggccgaagtcgtcgatgcggtagcactcgcttcggctgtcgcagtagatgcagccgtggcagcagccccggtagagattcatgttgtagtcgataccgaaccactcgtcgccgtgtgcgcgcaccttctggaggatcgaccgcgcgcgcacgacggggcaggggcttggcgcggcatcgctcatgcggatgcgggcttcacggggtggcgcagcacggtgcgcaggttctccggcttcgtgcggcgcggatcgcccaggtagatctcgtggtgcaggcgcaccgagggaactccgccgtccgcgtcgagcgcgtccatcagggcctcggcgctcggcgggtcggcgatgtcccccgcgcgtcccgtcgtgcggacgaactcctcgagagcggcaaccgtggcgggctcgtcgtcgtagggccccttgtgcatgatctgcgcgcagggtccttcggcgaagcgcacgagccgcgcacggccgacgtcgagcccgggcttcttcgccgcgacctgctcgcgtgcccagcgatatacctccggcctgacgaagtcgggctggcggatcatcgacacccagttgagcgcgtccttgtcctcgatgcgccctccgtcgaagccgcctccccaccacagcccttcgagcggcggcacgacgtagtcgaagtagccttccggctgccagtcgcccatcttcgccatcttcacggtgaacgagaaggcgtacaggaggccgagtgcctcggcgtagtcgccattctcctcgttggggttgcccgagccggcgaccgcgatgaacgacatcgccggcacgtcgatgagcatcggcttcgtcttcggcaggtagaggtccttgtattccttcttgaaatcgaatgctgcgcccatggggtcctccttcttcgtcgttcagtcggcggctgcgcctttccagcgttcgagcgtgggcagcagcgattccatgtaggcgcgcgcctcttcctcggtgaagggcgcctcggggccggccatgttctccacgcagatctcaaccatgtcctccatggtgcattcgcccaggtaatcgccgttcgcatagcaccacttgcaatgatgttcgctgggcgagccgtccgcctccgtgcccagcaggcttgcgtccgcgaggggcatgccgcagctctggcacacggcctgcaggggcatgtcgagcagcttctcgatgggcacgttaaacgtggtggcgatcagtttgagcgcgtcgacgcctggctgcgtgtctccgcactcccaacgcgacaccgcctggcgcgtgacgaacaggcggtccgccatctccgcctgggtgaggccgtttcgctccctgatctcgatgagcgtgtccttgatcgccatgaagggctccttttcccggtgtcgatactcaggttccatggaaccatggcgcacgcggccccgtcaagcaacagccggttgcccgacggggccgcgcgttcggcgcgggcgttatcgcagggccacgtacacgtcgatgtcggcgcaggacatgtcctcgcccggaaggtacgcctcgaagtccacggtgtacgcgcgctgcgccgtcagctcctcgtcggcccagatctcctcccaggccttggccacgctcgccacgcagtcgccgccgcggatggcgatcttcgcgtagcggcctgcggcgatggtctgggcttccatgccctcgggcgcgtcagcgggcgtctcgcagcccacgagcatcgtgtagcccatgtcgctcatatcgtaatcgtagtacagcccgaagcagccatacggctcgacgcgcgtctcggggatggtgcggtccatgccctcgcccatgaagcgtccccacagctggccgatcgcggccacttcctcgggggagttgttcgacgtgcggatggtggggcccacgatggtgcgctcgggaagctcgactatctcatactgcatggttcgtttcctttcgaagcggtgaatgttgacaaggagcacgataccgaacataaccggacagggcgtgtccggttatgcgggaaagttagaaaagacaaggggagacaaggggacggttctcttgtcttgctcggcgatttcagctccgtcgtggatacgaggacgctataattaaaatgatgcaaagcatcatcttcttcattcagggaagggagatgcgcatgccgagacaagcacgtaggaaaagcgagtcgggcctgcaccacgtgatggtgcgcgggataaaccagacgcagctcttctacgacgatgaggaccggcgggcgttcatggagcgactccgccgctataagctcgaatgcggttttatgctgcatgcatggtgtctgatggggaatcatgtccatcttcttgtcgaggaggggaggatcgatctgtcctcgatgatgaagaagattcttctgagctattcgcactacttcaacaggaaatatgatcgaaggggctatcttttccaagatcgttacaaaagcaagccgatcgagggcgacgaatatcttttgtccgttgtccgctacatacacaggaatccgctcgaggtggggcagacgacggcgtactggacgagcttcgacgaatatatgaagacgccccgacttgccgacacggagcgcgtgctcgatatgcttgacgctgatccgagcaaggccaagtcggctttcaaacttctcgtggaaggcgaatcggatggcggcctgccgccttgcgggaccgacaaaccggcgtgggtgagcgatcgggaggcgatgttgctcatccgggagcttgccggtgtctcggaatgcgccgaagtatgttcgctcgacaaggcaaggcgagaggaggcggtgcttcttttgcgggcgcgcggtctctccatcaggcagatttcccgactcacgggattgagcaaggggatcgtcgagcgagtgaaagcgggaaaaggccaacttcctcgcggctagctggagcaggcgaaaaggataagcaggacaagagaaccgtccccttgtcctgcctcccttgtcctgccttggggcgtgtccggttatgcgggaaagtttgggaaatcgtcgcagcgtcgcgcgttgggcgctagggtcaatcctctgcgtagcgctgggcgacggcttcgccctgctcgcgcagccaggcgcgcacatcagcgggttcgagcacttcgagcagctcgccgaatgacagcaggtagtagcgcgtgcgctccccgatgtcgcagacgagcgtcaccagccagctgccgtctgcctcgcgctcgatcgtctccggagcgaactcctcgcgcacccgtgcttccgcttcgggggcgaagcgcatgaccagccggtcgcttcccctcatgtggccgccctcgtcgaacgcgggcatcgggcgcgcctcgaacgtgtcgggcgtgacgctgatcgtctcccaatcgatgcggaacagcttgaacgtgcgccatgcctcgcgttcgcggcaccaggcgcgcaggtaccacgacgattccttgaacacgagctgcgcgggctccaccgtgcgctcggtgcggttgccggcggcgtcgaagtacgcaaaagacagcgggtgccggccgatggtggcgctgcggatggcatcgaacgcggcgcggtagttcggcggcgcgccccagaacgagaagtccatgtcgagccagtcgacgttctcgcgctggaacagccgtccgaggcgcgcagccgtctcgtcgctcgcctcgtctgccgcgccggtgcggttgagcgccgagagcgccgccatgatgtcgctctgctcgcgctcgctcagcaccgagcggtccagcacgtagccgtccatgaggtgcacgccgccgcccttgccgcgcgtcatgtacacgggcacgcccgccgccgacagcgcgtccacgtcgcgacgcaccgtgcgttcggacacttccagcttggccgccagctccgccgtggtggaggtgccgcggtccatcagcaggtagacgatctcgaacaggcgctggggctgcatggcggtttcctaagcgcgctgacgctgcgcggccgcggcgttcgcgcgggccagcacgtcgtccacgacggcagcgtcgcggcacagcagggcggggaaggggacgggcgcctccggtgcggggtcgaaggccgccaggggcaggaagagccatgccacgtcgcgccaggcgccgcaggtgtagccggcgttgcgctggatgcccatgagctggaagccgaacgcctcgtgcaggcgctcgctggccgcgttcggcaacgtgacgcgcgcgtaggcgcatttcatgccctgcaggcgcacgagctcgatcagggctccgtaaagcgcgcttccctgcccggcgccttgggcgccgtgggccaggtacaccgacagctcggcgttccaggcgtaggccgcccgctcggcctgggcgtgcgcataggcaaagcccaccacgcgtccgtcctgttcggacacaaggtacgggtagccggcgagcacgcctgcgacccgcttgcggaacgcttcggccgagggcgcctcttcctcgaacgtgacgggtgtgtccaggaagggcgcgtacacggcgaggatggcgtccgcgtcgtcggcggtcgcgaggcgtatgcgggtgggagcgggtctcacgtgacgtctttccggtcggggaggggcattgtcccgcccatactaccacggagccgtcgccgtcgcccatggcagggcggtgcaggcgtcggccaagaggggcgctcgctctcggaaaacaccgtccccgaggaacgaaagcgctggtgataacaagcgttcaatcccctttcccccgcggggggaccatgcgaacagaccgtggcgctgttgtgttgttcggttgcgtcgtcttgtcgttgcccggctgttacggaatactcggtggggaaaagggcagaacagccgccccggaaagcgcggcgcgttagaagcacggcgcagggttgcggcaggaaggaagcgaaacggcgaaaccatggggaagggttcgggcatacggcggctgcgccgacggataaggcacctgccgacgtggtcgaaggcggccgcgcttgcgctcgtgggcgtcgtggccttcttcggcgtggcgatcggggcgggggctgccgccgagcgccccgaggagccggccgtgtcgctgggtgcggccgacgccgctccggatatccctgtcgccgtggcggacgaagcggtcatgccgcccgacacggcgacggcatcggcacccgcggcgagcgacgtggagccgacggtgctcgacgcggcatctggcacggccgacgtcaacctcttcgacgcctcgggggcccagcgtcccgtcgacccgtccgaggtccccgacgtggctacggcgctcgaagcgttccgcagcgctggttgcgacgccggcttcgtcgtatacgatttcgcctcccagcgcggccttggctgcaacgccgatgcggccttctcctcggcgagcaccatcaaggcaccgttcgtcacgtacgtggcccaggccctggtcgacgagggaagggcggcgctcgacgacgtggtcttcgaggacacggtcatggagggcacgggcatcatggcctccgacggccagagcacctacgacctggccacggtgctcacggacaccatcgtctactccgacaacaccggttacgcgctgctccgcaaccgctacggcgaaggcttcgaggcgtggacggcggcggccggcgtggacgctgcggcctggggtggcgagtggtacccctcctacacgccgcgcgacttggcgaagctctggcttggcgtgggcgggtacctcgggggcgggggcggcttggcctccttctgcgaagggctgttcgcgcagaccggcacctcgttcatccgcgaggtgctcggatccgaccatcaggtgctctcgaaggccggctacgagatcgacacgcccctgtacgacatgggcgcgctcaacgacgccggcatcgtcgagtccgtcgcaggcgactacctggtggccgtcatgtcggatgccgactacgatgacgcgtacttcaccgacaacgagccgctcatccttaacctgatcgccgcgctcgacgaagcgcacgaccggctgctcgcagcctaaggacttcttatgaacccgaacgcgtacccggccacgaacgtcccgtccgccgaacccgccggtccgcagcgccggcgccccgttactccgtttgccgcacgcgcagtgctgggctgcctgctggcggcgcttctggcctgcgggctcgttcccttcgcgccgcgggcggctggggccgacgaggttgacgaggccgccgtggccgaggccgagcgctccgtggaggaggcccagagcgcgctcgacggcgccgagtcgagccggcagggcatcgccgccgaccacgaggcgctcgtccaggaggtcgccgagctgcagaagcgcatcgacgagactacggcccaggctctggaggcccagcaggaggtcatcgacgggcgcgcagccctggccaaggcggcggtctacgagtaccgcgggggctcggcccagtcgctcgtcatgctgctgctggaggcgcagagcttcgacgagctcgtgcgcaacctggtctacctctcgagtgtggtgcagtaccaggtggatgaggtcgaggcgcagaaggagcgctcggcccgcttcgacgcgctcatggaagatctgaacgcgcagaaggacgagcaggaagggaagctggccgagctcgaggagaagaaggttcaggccgagcagacggtgtccgacgcctcgacgaggctgcagggggcgcagagcgaatactcctccatgttggaggagctgcagcgcaagatcgaggaggcggaggcccagggctccgcgcctaccgagccggtggccgtcgacgagtcgaacacgaacacgtcgcgcccgggcgaccagatgacggacgtcgcgcccgacccgtcgccctctccggcacccgacggcggctcggggtccgatccggcgccggaacccgcgcccgatcccggcgtcggctggtccacgggagtcgcctcggcgtacggcggttccaccgacccctacacgcccaatcccggcaccacggccacgggcgccgtctgcgacgactggtccatgggcgtggccgtgccgatggcgtggccacggtactggcagtactacgggcgcaccgtcgagatctcctacggcggcatgacggtgctcgccaccgtgaacgactgcggctacatgggcggcggcagccgctccctcgacctgcagcccggcgtgtggaaggcgttcggcttctcgtcgtgcaacgactggggcctgcgcaccgtgagctaccgcttcctgtaggggcgtggcaaaagcccggggatgatttcgcacggagacgatgtcgtgttagggggggcgacgccatgctccccgacgccagggttctgcgagattgccgagaatgcgacatcgtctccggggatgacgcagcaggatgacgcaggacggggataatgtcgtcaaatccgatacctcggatttgacgacattatccccgtccccctgtctcgtttgtgctaaactgcaacgttacatgcgatgacgaagacagcgccgtgcggcgcggttgccatcagagacgggtgccaccggctgagagcacccgggcggccagtgcggcgattcccttccgagcagcgcgtttgaatgcggatgcggcccggcggcagcggggcggcaagacgtgcagtaggacgcgacgggtgctcccgttaccgagcgcaagagcgggcggctttaagccgcaccccgtgtcgccgtagggcgggcgggtgtgcagcgaaggcacgccaaccgaggtggtaccgcgagagccttctctcgtccttggaccggggccgtgccccacacgacaaggacgagagaaggctctttttcattgcgccggctgcggcgggcgcggggagagacggaaaggaagcacgaggacatgggtatcgtggacgaagtggcggcgctgcgcgagcagacgctcgcccgcatcgcggaggcggccgacaccgccgcgctcgagcaggtgcgcatcggcgtgctcggcaaggccggcacgctgacgggctatctgcgcagcatgggacaggtgccgaaagaggagcgcgcggccgtcggcaagacggtgaacgaggtgcgcgaggcggtggaggaggcgctggccgcacgcaaggcggccctcgatgccgccgagctggccgcggccatcgacgcggcggccgtggacgtgacgctgccgggccgcgcccagcagatgggcacgcgccacctcatcaaccgcatcaccgacgagatctccgagatattcctcggtctgggctacacggtggccgagggccccgaggtggagaccgactactacaacttcgaggcgctcaacgccccggccgaccatcccagccgcagcctggccgacacgttctacgtggtggaccgctccggcgacgaggccgccgtgcgcggtgagtccgacgtgctgctgcgcacgcagacctcgggcgtgcaggtgcacgcgatggaggacaacgagctgcccatcttcgtcatcgcgcccggcaaggtgtaccgtcgcgatgtggccgacccgtcccacctgccccagttcacgcagatcgagggcttggtggtggacgagggcatcacgttcggcgacctcaagggcacgctcgactacctgtgcaagcagctgttcggcgaagagcgcaggacgcggttccgcgcccactacttcccgttcacggaaccgtcggccgaggtggacgtgagctgcggtatctgccacggcgaaggctgccgcttctgtaagggcaccggctggctggagatcctcggctgcggcatggtggacccgaacgtgctgtccatgtccggcatcgaccccgagaagtactccggcttcgccttcggcatgggggtggagcgcatcgcctgcctgaagtacaacgtgccggatctgcgcatgctggtggaaggcgacatgcgcttccttcggcagttctagggtttctggcggcgacggcggggcggcgcccaccaagcgagttccgcagcgcagcgaggactgttcgagcgactgggcgccgccccgccgtcgccttcacatggttgacgttgttgcggctcgcctgatgaccggtgttcggactcgggccgaagggggtcaggcaggcgtgggcatggtgagaggggttgacctgcgcgttttgctttcttgggaggcgcgaggggcgggagtggttcggaatagtatgcgcgacgcgcatagacgataggaagaacgatatgaaagtatctttgaagtggctgagcgaatatgtggacgtgccttcggacacgaaggcgttctgcgatcggctcgatctgacgggcacgggcgtggaggcggtggagaggaccggcgcggcgctcgacggggtggtcgtggggcacgtgctcacctgcgagctgcacccggacagcgaccacctgcacgtcgtgacggttgacgtgggcgcaggcgaacccgtgcagatcgtgtgcggcgcgccgaacatcgcggcgggcatcaaggtgccggtggccaccgtgggcgcggtgctgccgggcgacctcaagatcaagaaatcgaagctgcgcggcgttcccagctgcggcatgtgctgctcgcagcgcgagctggggatgggcggcgatcatgcgggcatctggatcctgcccgaggacgcgcccgtaggcatgcccatcgccgatttcgcgcagctctccgacacggtgctcgacctggagatcacgccgaaccgtcccgactgcctttccatggtgggcatggcgcgcgaggtgggcgccatgtaccgcaccgactacgagagcccgctcgggcgcatggcgggcaagctcgtgctggacgcctcctcggcgcccgtcgacgagacggtgaggatcaccatcgaggacgcggtgcgctgcccgcgttacaccgcgcgcgtcatccgcggggtcaaggtcgggccgagccccgactggatggtcgagcgcctggcggctatcggccagcgctccatcaacaacatcgtggacgtgacgaactatatcctgttcctgttcggccagccgctgcacgccttcgacctggacaagctcaagaatgcggacggcgtggcgcatatcgtggtgcgcgcggccgccgaaggcgagcgcctgactacgctcgacggcgaggatcgcgcgctcacgtccgatatgacggtcatctccacgccggagctcggtgccgtggcgctcgcgggcgtcatgggcggcctggacaccgaggtcacggacgggacggtggacatcctgctggaggccgccacgttcgagccgggccgcacgagccgcacgagccgcaacctgggcctgttcagcgagagttccatgcgctacgagcgcggcgtggacgaccacggcatcgaggagcgttcggccgcggccgccgcgctcatggtggaggtggccgggggctcggtgagcgccgccgtccgcaacggcgagggcatcgtggacgagtggccggcgccctcgacggcgcccgatttgcgcttccgcatcccgcgcttctgcgccatgatgggggctgacatcccgcgcgccgacatcgaggacatcctgcgccgtctcggctgcgcggtggccgacgatccggcgggcaatgccgacgttctgcccgtgacggcgcccacgttccgcccggacctcgagcgcgagatcgacctgtacgaggaggtgctgcgcctgtggggcatggaccgcatcccggccacgctgcctggcggccccggccgcgtgggcacgcgctcgcagatggagcacgtcatgggcacggtgaacgccgtcatgcgcgcgagcggcctcaacgagacgatgacctactcgttcgccgagccgggcgacctcgaccgcctgcgcatgccgcacgagggcctgggcgagcctgtcgagctcatcaaccccctgaacgccgaccagtccgtcatgcgccagagcatcgtgccgggccttctgcgcagcgtggcctacaaccagagccgcggcgtgaagaacgtccagctctacgaggcgggcgccgtgttcttcgcggccgaggggcgcaagcagcccaaggagcgccgacgcctggcgggcgtgctggcgggggccatgggcgatacgggctggaacgccgcgccggccccgttcgacttcttcgacggcaagggcgtcgtcgagagcctggcgcgcgagctggcgctgccgaagctgcgcttcaagccgctttccgccgaggaggccccgcacctgcagcccgggcgggccgccgcggtgctgtcgggcggagccgaactcggttgggtgggcgagctgcacccgctggccgtggaagccttcgaggcggacgcgccggtggtggcgttcgaactggacgtggaggcgctcgcgaaggcgtcgcgccccgcgcgcgactaccgcgacgtgcccacgttccctgccgtgaccatggatgtggcgttcgtcgtggacgagggcgtcgcgcacgagaagctcgtgcagtgcatgacctcggcgggcggcaagctgctggaggacgcgcgcctgttcgacgtgtaccgcgacgaggagcgtttgggcgcgggcaggaagtcgatggcctacgcgctcacgtaccgcgcgaccgaccgcacgctcacgagcgacgaggtggacaaggctcatgagcgcttggtgaagaaggtgtgcacggccaccggtgccgaggtgcgcggctagccgatcggccataatggtagggtaagcaagagggacgggattcggggcccgtctgcatcgggcggcgggggaatcccgtcgcctgctgtctgggagggcaacaggtggaaaagagcatcgcagtcgcgacggacacgaacagcggcatcatgcaggaagaggccgagcagctgtgcgtgcacgtggtgcccatgcccttcgtcgtggacggggaggagtgcttcgagggcgtgaacctggacgccgagcgcttctatgcgcgccagaccgcaggcgcggacatcgtcacgtcgcaaccgtccatcgtcgatctgggcaagcgctgggccgagctgctcgaagcgtatgacgaagtcatctacatccctatgtccagcggcctgtccggctcgtgcgagacggcgtgccaggtggcccggcactgcaacgggcgcgtgcacgtggtggacaaccagcgcatctcggtcacgcagcgcgaggcggtgctcgacgcgctgcgttggatcggcgaaggtcgcacggcggccgagacatgcgcgctgctggagcgcacgaagctcgacgccagcatctacctcatggtggatacgatggcctacctgcagaagagcgggcgcatcacgccggctgccgcggccatcggctccgtgctcaagatcaagccggtgctgcagatccaaggcgagaagctcgatgccttctcggttgccaagtcgttcaaggccgcgaagcgcaccatggtaaaggcgctctcgcgcgacgtgagggagcgcttcggcggcgtggacggcgtgcacctctacgtggcgcatacgaaccgcgacgaggacgcccaggcgtttgccgacgaggtgcgcgcccacttcggcacggacgacgtctacgtcgaccgcctccccctgagcatcgcctgccacgtgggccccggcgccctgggcatcggctgcgccaagaagcagttcgcgtagggctgcaggttgccgagctgcccatcttaacgatttttcggcaacggcgcagccgaggattccttttatgcggcctgtcagctcggtgaagtgtccattttgtcgaagatgccgatggcttccagcaggctctggttctgggaggccagcacgccctcgcgcgtgtagacggtgagcgtgtaggaggtgaagccgtacgcagccgattccccctgcaattgctggctcgacacgctcatgcgccacaagacgccggcgctccctgccggacagctcccgatgcgggtaacggtgcgccggtcgaagcggtggctctcttccacggtgcgggacagctcgtctccgaggccggccgcctccaacagcgatgcgcatacggcctccgcctcatcctcgccggcgagcggggccatgatgcccatgcccacggcctgcgggcgccttccctccagcatgagctcgggtgatgtctcgcccccttcgacggcgaagaaaaggcgcgtcctggagcccgcgggcgagcacggcgtttcggcggaaatgctctcccaggctcccgtgggggctcccatctcgtattcgaacccgagtctctccagcgtggcagggatccaagccgggttgagcaagaggatggcttcaagatcgtaggccgagcagactggagcggagttggaagagggcgctgccgccggtcctccgtcgcaggcgtcccctgatgcggggaggccttctccagcatcgggctcctggtcgcgcgcttctttgccgaatgcatcggctgcgaacggaacgccctcgtcgacgggcctttgcgcaggggcggcgcatccggcgatggctgcgcaggcgagggctatcgccgcgcaccgggcgatggtggtcggtcgacgctggttcggcatgaggcgtcctttccgttcggcctttcggcgcgccatcgggaggacgggcgcctaccccctatacacgatccaagcggtcgaattgtcgggactttccttccgcccgctgccgctcgcggcgttgcgcggtacaatagcccgcgagcgaaaggaaaccgcatgtatgacggagtggagcagcccggtcgcaacgacgtatgctggtgcggcagcgggcgtaagtacaagaaatgccacctggccttcgacgaacgtctcgagcagctgtacgatcaggggtgcgagctgcctgggcgcgagctgctgaagtcggcggacgacctcgagggcatcaagcgcagcgcggccatcaacgtcggcgtgctcgactacgtggccgagcgcatcggcgtgggcaccacgacgggcgagatcgaccgttgggtgcacgactacacggttgagcatggcggcatcccggccgatctgggcttcgaggggtatccgaagagcgtctgcacgtccgtgaacgacgaggtgtgccacggtatcccgtccgacgacgtcgtgctccgcgagggcgacatcgtgaacgtggactgctcgaccatactggacggatactactccgactcatcgcgcatgttctgcctaggcgaggtgtccgaggaccgtcggcgcctggtggaagagacgaagaaggcgctggaggcgggtctggacgccgtgaggccgtggggcttcctgggcgacgtgggcgcagccgtgaacgctcatgcgcagtcgtgcggcttctcggtggtgcgcgagttcggcggccacggcatcggcctcgatttccatgaggatccgttcgtgagccatgtggccgaggcaggtacgggcatggtgctggttccgggtctcgtgttcaccatcgagcccatggtgaacgccggcggacccgatatcgacatgggcgatccgaacggctggaccgtgcgcacggccgacggttccgacacggcccagtgggaggtccaggtggccgtgaccgaaggcgggtacgaagtgctgtcctggtaggaacggcaagggctgcgtgcggaatcgttttccgtccgttgacgggcggcgacctttcgcgctttcccggggcgcacaatctgccccatggaaaagaacactcccaaggacgcgggacgacggcgcatagggcgcattgtcgtaatcgccgtgatcgcgctggcggcggcgtccatcgcctggtggctgctcgtgtacgggcgcgacgtgctcgcgctgctcaccgacgggcgccgggtgcaggagcaggccgcgcgcctcgggccgctggccccggtggccctggcggggcttgtggcggtgcagcagctatcggccgtgctgccggccgagccgctcgagctggccgccgggtacgccttcggcttctggaagggcgcgctcgtctgcttcgcgggcagcctcgtgggcgccgtagccatcatcgtgctcgtacgcctcgtgggcgaccgggccctcgcgctcttcctctcgcgcaagcggctggacgacctggagcgcttcgcggcctcgccgcgcttcgagctcatcctgttcgtgtacttcctcgtgcccggactgcctaaggacctcatgacgtacgcggccgcgcttgcccgcgtgaagcccctgcgcatccttctcatcacttcggtcggccgcgtgccgtccatcgcggcgtcggtgctggcctcgtcgttggccgccgacggggattggcgagccgcaggagtcgtgctggccggcatcgtcgttcttgtgcttgcgggcgcagccgtgtatgcacgcgtcaggatgcgccatcgctcccgttcgcaaagtccctagcatttaaaacaaatgttcgtaaaaatgtgctatactgctagcgaaacgaaggagccagtgcaagcgctgtttcgtccgccgcggcagaaggcgggcgcagcccatagatggcggcggtgttccgcgccgcccgtaccacgcttgcaagatcctcccagcccaggaaccgaagggaagcgaggtgtcttgccatgttcgcatgcgcgtctacggcagggtgcgcgaaggcggccgcgaaagcccgccatgatgaccatccctcgaaagcggggccgcatgttgccgtgactgcatgtttcgagggcaatgctgggccgcgccgtagcgaggggaggctgccatgagcggcgggagcctgtgggagcgtgagcacctgcgtccgcgcgacctgcccagcctccaggaggtgctcggcgcatgtgaccggtcccttctgcggcgcgtgatcattgaggatttcgccgaagtccatgcctgcgctgacaaggctcgtcgcaatgcgatggcgcagcggctcgacggctcgctcgatgccatggcctccctcgaggtgcggcgcgggccgacgagaggctgggtgctggccccgcgggagtcgtatgtgctcgatgcccgaggcggcacgctgacatggcggctccacgccgcgctcgtcccgttgctcaatgtggcagcagccgagcgcctcgtccgtgtcgctcaaatgcccgcgacgacgtatgcccaggcgaggaaagtcgacaagcgcctgcggtcccttgcggtgcgcgcggcggacgtgaagggcagcgcaggcgacgtggacgactggggcgagcgctgctacgcgctcgccccctgggaggaaacgctcggatgcaaggtgtggctcggcggggattggtgctgccgtgagcgctaccgcgtgctcgcaagcgcgttctgggaactcacgttctacggattcgagtacgacctggttcgtgcgcgcaccgcccgcgagaaggctgcgcggttgatgggcgggtccgatccgacaggcgaggaggccggcgcccgcattacggcgtcccccggaggcttggcggccgcttgcggcctgcagccgcccgaccgctttaccggcgaggcgctcggccgcctcgcccagcgcgtcgccgtgctgaaccaccaggcccactgcgccttcttcgagcagatgctcgatttggcgcgccgcatggagagggggtgagcagcatggacgtcttgcagctgtcgcacacggggagcgtgcggaccctctgccggctgatccaggggatggatcggccggtcgtggtcgcagacggggccgatgaggtcatggtcgtgttgtccccgtctgctttcgagggcgtgctgctgcgaagcgggcagggaggacggggaggtcgcacgtttggcgccggctgcgcctcggagggccgcgccgaggacgcctgcggatgcggagcatgccgtcttgcagaatgacggaaggcgccctcgggcgccttccgtggtcgttgccatgttggggggtggcgttagccggcgacctccaccagcgtgatctcgaagttcaggtccttgcccgccagctcgtggttcatgtcgaacgtgacgatgccgtcctcgatggcctccacgaacacggggaacgactggccggccgggccgcgcatgtacacggtctggcccacgggaagctggtcgccgttgggaatctggctcacgggcaccttctgcaccatttcctcacggcgctcgccgtacgcctcggcggcagggatgtgcacggtcttggtctcgccctgctccatgtccttcaccgctgcgtcgaagccggggatcatctggccggcggcgcaggtgaactcgatgggctcgccgcgatcgaccgacgagtcgaacttcgtgccgtcgtccagcgtgcccgtgtagtggaccttgaccttcttgccttcgttgctcatgaacgagctcctctcgatttgaaacaaagtagatccagtctaccccactgcagaacgcggcccctccgctggacgcaaaccctctccaagttgccacaagttcgcccaggggggagttcgccaagagctgcctgcgatgtcggagctgggatagcgcaggcagctcttggcgaacccccccccttttttttcttcgagggtgcggcgcgcgggcctcaacggctcggcagctcgctcacgtccagcagcgtcatctcgaagttgagcgccttcgcgatagcctcgtggttcaggtcgaacacggccttctcgtccgtgagctccacgagcctggccgggtaggtctggcccgtggggtcctccaggttcaccatctcgcccaccacgagcttcaccgaggcgggtatcttcgcgcgctccacctccatcacgcgctcgtcggtgcgctcctcgtaggcctcgttcgcgcccacgtgcacctgccgcgtctcgcccacggccatgccccgaacggtgtcgatgaacgccggcggcatccatccgtccaggcagggaaactcgacgggctgctccgtctggtcgatgaacacggagccgtcgtcgaagaaccccttgtacgccaccttcaccatcttgcccgtgttgtccacgtcgggcctcctctcctcgtgtattccgctcgcatgctggaaggtcgtccctccatcgcgctgctgcggctgttgcggcttcgagatgcggacgccggtttaacccttgcgctcggccaggtcggccagcgtgacgcgctgcgctgccagctgcgcgagcggctcgaggaagccctgctcgccagctgctaggccccgccgtgccagcgtcatcacctcgtcgaccagctcggccgcaggccttccgtacacctcggcctcgtatcctgcggccataagcgcatccttggccgcctccacggccgcgccgtccacgccttcgaacagcgcgtcgagcgcgtcgaggttctccgcatggtagaacagccctttgatcagcgccgcgtacgccaccacgtagggcacgggcatcgcgtcggccggcctgatctcgatataggtcttcagacgcacgtcgttgaagaacatggacacggcgtgctccacctcggcgcgcgtcatggtgcgctcggcgtatatctcgccgaaggtgcgctcggagtagcaccactgctccttacggcacggtatgaggatagcaggcgtgtccaaaaggtactcggcatagcggcgcaggtcgaaacccgggtccatcacgccgggcaccaggccgcagcggtcggggtcgcagaaccgccagatctcggtccgcaccagctcgtgggcgcgcggcgcgccctcgaacaccggcgagttgtcgcagacgagcgagaacagcggcacgagcgcgaacgccagccgcagcttccgcaggcagtccgccgtcgaccagtagtctatcgacacctgggtcgacgcgctgccccgcatcatgcgcggcccgaacggccccttctcgcccaggtacaggttcatgaacttgtagcgccgcttggggatgagctccaggtcgagcgccttggcggaggggtggtagcccaccgtgagcgcgcgctcgccgtgcggcgccagcgcgtcgtccagcgtgcgctcgaaccgctcgaacgtcgcccgcgcgtcctcgaggctcgcgaacgggcccgccgagagctcaacctgcgccgccggctcgatggtcacggcctcgccgggccgcgccacgcccaagaggtctccctccgggtcgcgcgtcgtgcgggggaactcggcttccagctggcccagcagccattccacaccgtagggcccgctgtacgccacggggctcatatcgtcgtgcacgagggtgtgctccagctcgatgcccagctcgccggctgtcccggccggcgtgatgccgctctcgaaataggctacgatggcgtcgatgttgcttgtgcgtgcaggctggtcgctgggggtttccggttccccgggggctgcgatggctgtgccgggaacggctgttttattcatgtagcaggctcctgtaaagcattggtccgtgcaaggttacgttactttgtatacaatacccttttggttgccgcgcttgtcggcaaaatggcatcaattcgcttttccactcggggacgaggctgcgcttggacgctcatatcacaaaaagaacagcggtcctgctgctgctcgacatcgttgcgacatacgccgcctactggctcgcatccttgctcaccgccgtcgaggacgaggtcttcgtcaacaacgagatctacttcatgctgggcatcctggcgcttatcaacgtggcggtgctcggcctgttccgcctctacaacaacctgtgggagtacgcgagcgtcgacgaggccatccagatcatgctcgcggtggtgctctccacgctcatcggcgccgtgttcctgtggatcatcgacgtgcgcctgcccatccgcgtgttcttcgtctcgtgcttcctgcttatattcttcatggggggcatacgcctggtattccgcgtcatgcgccagaagaagcgcgttctggggtcggcgcagcgcgcctgcgaccggccgcgcacgctcatcgtgggcgcgggggagacgggctcgctcgccatcggccgcatggcctcgaaggacccgctcatgcccggcgtggccatcgtggccactgacgacgacgcctcgaagcgcggcagccgtatccacggcgtgaaggtggccggcaccacggacgacatcgtggagctggttgatcgctacgacatcgagcagatcgtcgtggccatcccctcggcctcgctcgaggagcgcaagcgcatctacggcgagtgcacgaagaccgagtgcaagctgcgcacgctgcccaacatacgcgagctctcgctcgacgagataggcgacgtgcggctgcgcgacgtggacgtggccgacctcctgggccgcgaggagatcatcctgaacacccgcgccgtgtccggctacatcgccggcgagtgcgtgctggtcacgggcggcggcggctccatcggcagcgagctctgccggcagctgtgccgcgtggcgcccgcgcgcatcgtcatcttcgatatctacgagaacgacgcctacatgctgcgcaacgagctgctgtccgagtacgacgacatcgagatagtcatcgagatcggcagcgtgtgcgacgagtcccgcgtggccgaggtgttcgcgaagtaccgccctggcgccgtgttccatgccgcggcccacaagcacgtgccgctcatggaagcgtgcccgcgcgaggcgcttcacaataacgtgttcggcaccttgaacgtggtgaaggcggccgacgcgttcggcgccgcgcgcttcatcttcatctccaccgacaaggccgtgaaccccacgagcgtcatgggcgccacgaagcgcatgggcgagatggtgatgcagctgtacgcgcgcacgtccaagaccgtgttctccgccgtgcgcttcggcaatgtgctgggctcgaacggcagcgtcatccccgtgttccagcgccagatagccgccggcggccccgtgacggtcacgcaccccgaaatcgagcgcttcttcatgaccatccccgaggcgtcgcgcctggtcatccaggcgggcggcatggcgcatggcggcgagatattcatcctcgacatgggcgagcccgtgaagatcgtcgagctggcgaagggtctcatccagctgcagggcctcgtgcccgacgtggacgtgaagatcacgttcacgggcctgcgcgacggcgagaagatgtacgaggagctgctcatggacgaggagagcacgcttcccaccgacaacaagtccatcatgatatccaccggccaggagatcagctacgacgaggtggccgccaagctcggcgagctggaagccgccatcggcaagtcggacgaggaagccgtccacatcctggagtccgccgtccccacctaccaccacacgaagaactgcgcgtaggctcacccgatggggccggcggttgcctgcagcctccttatacggatggttctgccttgggcgtttgcggaggagcggtgcgcgaagccgggcggggaaaaattcgcaggacggatttgcgccatagcgcacgctagacgctaaactatacgagacggcaatgctgcgttgcgccgtatggtgcgggcaaggtgttcgagagggtttttctgacggggtaaggcgaggtggggcagtggcggtcgtctcggcatcgaacgaagcaatcggccttttcgtgaactcgcctgttttccaggttaacgtgggccagggtgcggcggttgcttctcttccaagggagctgcctccagcatgcgcgcacttcgtggacagaagcgcggagcgcggtctgctggaggatgcgtgtgcggactctgcctcgactaaggtggttgtcgttgacgggatccctggtgtcggcaagtctgccctggtgaaaaagtggggaaacgagaaacggatcgatcatttctccgacgggcagatctacctcgatttcgccgcctcggaagaaggaggcgcctctccggtggccgatatgctccgatccaagctttcccaaatgatcggccccgatgccgtgtcccgtacgcgtccttcagatctgcccgcccaataccgcagcttcacctgcgacaaaagcatcctcgtggttttggagaacgtgtccagctatgcggagatagagcccttcgttccgaattcgccgtcctcgctcgtactcgccacaagctcgagaaccgatatcgattcgctcgaaaccgagatcacccatgtttctctcggcgaactggacgtggacgattcgctcgaccttttcgtccgagttgcgtacggtttgtcgggcgaggaggtgcagcaagtccttccgcatgacgaggtggaggagatccattcggtgctcgagcattgcctcgggcttcccttggccatacgggcctgtgcaagcatcttacggcggaagcgcgtctcgtcggcgaaggagctgcaccgaaagctcatgcgctccgaacaagacgttttccgctgccgagagatggacgaggtatggcgagagtgttgcaaggccctcgatccgcgctgtctggacgccgcactcgggttcgcagcgcttccggttccgacggcttcccttggaacgcttgccgccatatggggtaccgacccttccggagcgaggtccatcgtggaggagcttcactgcttcgggttcgtctctctcgactctcctgcggatggcgtcggagatgcttccttgtcgagtgaggtgacgcttcttcgcgttatccgggcatacctgcaggctcagatgctcggggatgggtctcttggcgaggttcaagaaagcgtccatgccttgctgctctcccatttccgggtgttgtcccaagagttggatcattctttgaagcccgcgcgccttcgcctgtacgaccggattccctcgaacgatctggtgcgcgatattctcaaggggaggacggaattcgaggtgttcgaatccgagtccggtctcttgggcgctgttccccagatcataaatgcgcaccaaggcgtcgtgggggatgcttgggcaatcggcgatgcgctctggtccttctatagcggaacctttcgttatcaagcaggatccgagctgttctcggcttgctcgcgttctgctcggcaggcaggaaacatacttgcagcctcgcgcttgacggttatgtcgtcgggtatggaggcaaagctcggcaaggccgccgaggcgctcggttccatcgatgccgccattgtcgaatgcgcgccgctgggcaggctcgatgttatgtgcatgttccacgagttccgcggaatctgcctggctgagctgggatgcgaaggcgatgcggtagccgagttcacgtatgcccgcgctggcaacgagtcgctgggcaacaagcgcggatgctccatccaagaccttcttctctcccgaacgtatcggaggttcggaaaagcggaagaggctgaaaaggctgcgcgccgttcattggacgaggtcgacaagaaccgcgatcggcacacgtatgcgaaaagtgcgcaggagctctgcttcgcattgcgttcggcagggaagcacggggaagcgcttgcgtatgggaaagacgctgccgagatctttgcggagctgggtgaatatcggcgggctcacgacacgctgttcgcgatagccgagtcactccatgccctggcggatgacgatgatgcagaagccttcgccggggaggtccgcgattattacgaacgcgtcgggctttctgcggaatacgagcaggttagccgctttctggaatccttgcacacctgattaccgattcgccgacagtgtagagggtcttgcccatgcggtacgttccgcggaagtcgccttgtacgaggcagtaggcgagaatcgctgcgagtacgttccggtcggcatgtgctggtaccttgaacggaacctgcgttccatttctgtctgacaactggcccgatgagccttgttggaaataggcgcatcgggcaaaggggctggcatcttgccaccatccggcggcgtcgcggttctcgagcactaggcaagaggccgattggaccagtcggtagttcctctctgcggaagacgccacgagcagggtcgagtcggaccgaatgcccgaagggcctacggaggagggcgttcttctcatgtcgacgaccgtatcggaggtgcgggcgaagccgacccagaaggaaagcggcttgcaagttcttggaatcggcggctccaaggccaggggcagcacggcggtgctcgacggctccaggccgatcagacggtaagccagcacggcaagcctttccatggagcttccgacataaggagaaggcggcgttcggtcgcttttgcgcgccgcggctcgcttgcctgcaggttgtttctgcgaattcggcgatctcacgagccgtttcaactgccttattcgagcccatggcctgcacgattgccaggtcgccgttaagcgcgtcttcgggatagctcaaaaggcaggtgggggttcccagcatgctcgcataggttgatacggatccgtggtcccccgccagacagtcggctgcgaccaaggtcgcctgccagccgctctcgaaagggatgagcttcagcccgcctgcaagggcgtctcttagccaggtctctatttgccagggcccgtgtcccatccatatgttcggatggaggatcgccgcgatggcgaattcgtcggcagggagcagggaaaggagctcggagaacatctgcgggcgtgccgagaaagccgaaagcctaccccatgtcgaggagagcacgaccaatttcctgtctccgatgtcgagcgcatccctgaactcgtcccgacggtgtctcgcttggagcatggagtcgaatacggggtctcccagcacctccgtctggcagcggtctccgaacacgcgggcctcgtcttccgagaccaatcccactatgcgggggaggatggttccgggcccttcgtcgagccagttcgagtgcgccgtgttcgccccggcaacggatcggacgctattgtgcccgacaccgtgggaaagcatgatgatgggtgctttgatctcgggcaacgggtcgagagcgctttcgatgagagcgaggtcgtacgtttccagcacggcgttcttccaggggacgaagggaagccccctcttgtttatggcaagctcgagctcgttcgagaaaaccgaccgaggttcggatacagtgaaaagaacctgaatcctcggatcagagaagaggtgccttgccaaatccgccgatctgacaagggtggtaggacttctgaccattacgagcacggttttctcgaacgctacggtcctcggtcctcctccgggtttcagcagcggcgaggggggcttcgaacagtcgtcggggggggggggggggcttcattgtctaccttacgatgttcgtttggacaacggggctcttgatgaaaatacccgaggcggcgttcgaggcggtcgtcgtctgcgagctgccgagatgattctccatgagatcgcaccaagatgagaggagctggttgaagtcggggtctccctttgccaacttggccgcttttgcggcgagcttgtcgggatcggcccaagagcccatcgccttcaactcgttttcatccatatcttccttccgccctgcgagtttcttgaacagggcgatggtggccgcgcccaaggcggacccgaaagcagagaggctgccgctcgcgaggccgtcgaggcatgcttgcatgaggctgggcaaatccatggccctccctttcaccgtgtgtggatgttctttcattgtatggtcgcttagtcatcattgcaaggctctgatcgggcgggagcggcaggcacgccgtgaggatactgctcgattgcactaaggggagtttggcgccctgcgcaaagcttcggtagttcgggtaaagccgaatttcgcgataatgaatctcgtgccgaccggccgtgcgcccgccggcatctcttttggcggccgatggcaaagcggcccggagggggctcgctttgacgggaacgatggggtgaacgatggagcgagaaggaatcgtgtacgggtatgcgcgcgtgtcggcgaaggaccagaagctcaggcggcagatcgacgccttgacggatttccccgttgccgagggctgcatctacgccgacaaggcgagcgggaaggacttcgagcggccggagtaccgcaagctggtcaagcgccttaggcctggcgacgtgatggtggtgaagagcatcgaccggctggggcggaactacgacgagatcctcgagcagtggcgcattctcacgaaggtgaagcgggcgttcgtcgtggtgcttgacatgccacttctcgacacgcgcaacgaccagcacggcattaccggcgtgttcctggccgacgtggtgctgcagctgctcagctatgttgcgcaacttgagcgcgagaacatccggcagcgccaggcggaggggatcgcggcggctcgggcgcgtggcgtgaggttcggccggccggccatcgaggtgccgagcgcttatcggccgatcaagaccgcatacctatcgggccagatcacacgcaaggaagcggcagagcgcctcggcgtttgcccccggacgttcgaccggtggctgaaaagggacgccgagggggaagtcgcttagcgcttatggcaaccggggtgttgaataacccgctcggcatggttttcgttgccaaaacgtagactttttgtctcacgtaacacttgctcgccctcacatacaagggcacccatccgacctgctgtttctctttcgaatgagattatcgggcatctccgccaaaaagtctacgttcttgcggccgtcggtgcggcagtaacgtgcaccgacggtcgcagcatccgatcatgcgagcgagcatgggaggggacgtaatggcaacggaggcacggcagcgcgagggtttgccgacgggtttcctgtcggaagggccgtcgcgagacggcgacctgcgctggtacgccatccatgtgcccgagggccgcgaggacgcggtggcgggcaagtgccgacagctcctcggctccgacctcgtggaggactgcttcgttcccaagtacgagcggtacatgaagcgcgagggcgcctggcgcatcgtcgtgcaccccatgttcagcgagtacgtgttcgtttccacgcgcgacgtgcgcgcgcttgccaaggcgctcgggcaactgtcgttcccggcaccgctcgtgggcaggcggggccgcacctacgcgccgctctcgccgagcgtgcaggcgtggctcgagtcggtcctcgacgaggcgcacgtgctgcgcgcgagcgagggccgcatcgagggcggcgtcctgcaggtggagcggggcccgctgcgcggctgcgagggccgcgtgcgcaagatcgaccgccacaagcggatggcctacctccgcttcgacgaagggggcgagggcgactgcgtgctgcaggccgcgctgaacgtcccggtgaagaactagcacgaccccggtttcccgctgggagcccaacgccttgcgccttgggctcccagcgggaaaccgcagcgaacatatcctgagcaagcgcaggcggtgccatcggcgggccaagcggaaccaggggaatgaatactctcgatgccgcgggccgtaggcccgaatggtgaagctatgtccgcctgagcgaggaggccctccatgtggtatgtgattcaggttctttccgggcaggaggacaaggcgtgcgagctcatcaacctgcatgcggcggggcagcgctcgaaggacggcagacccgttctcaaagagtgcttcgtgccgcgctaccaggtggagcgcaagttccacggccagtaccgcaccctcacgcgcaacctgttccccggctacgtgatagccgtcaccaatcgtgtggacgagctgaacgaccgtctggtcaggatcccaacgttcacccgcatgctcggcagcgagaaatcattcatccccctcgatcggtccgagaaggcgttcatcaacgccttcaccaccgagaagcaccgcaccatcagcctgtcgaaggccgtgtacgaaggtgacaaggtggtggtaaccgaaggccccatgatcaaccgcgaaggctggatcaccgaggtcaaccgccgcaaaggaaccgcccgcatcgaagtggacatgttcggaagaaccatcaacgtagagataggactagcgattgtcggccgccggcctaaaaagaaatagcatttccctgttgcattgcggcagggattcgtcgttgctccccctgtcgagctagacgaagtagccgtgctttgcatgcacgaaacagtccgccaagcaaaggcggccgcgtgaccatcgaagaaagtgcgatggcggtcgacggggaaggagccctcgaggcgtccgacgtggcgtcctcgcgccggagctcgtggtcgaggccgaggggcccgtgctagccgccccgcgcgaggagggccggctcgcgtaccgcttcctgaagcgggcgttcgatatcgcgttctccctctgcgtgataatcgtgctgctggtcccgtcgcttctgctgtgtctggccattcgcatcgagagccccggcaaccccatctactcccagaagcgcgtgggccgcatcggcaaaagcggcgaggtggagatgttcgacatgtacaagttcaggagcatgcacaaggacgccgacgagcgcctggccgacctcgaggacctgaacgaggccgacggcccgctgttcaagatcaaggacgacccccgcgtgacgcgcataggcaggttcatccgcaggcactccatcgacgagctcccgcagttcctgaactgcctgctcgggcagctctcctgcgtgggcccgcgcccgcctttgccctccgaggtggcccagtacgacgagcgtgccacgcgccgcctgtccgtcaagcccggcctcacaggctactggcaggtgagcggccgcagcgacacgaccttcgacgatatggtcgatctcgacctcaagtacatcgaggagtgcgacgttgcgaccgacctcaaggtgatcgcccgcaccgtggttgtgatgttcactggcaagggggcgtgctagatgccctccatgaaagctcgctacgaggcgccggagcgctacccgatcctcaacgcgttcgtgaacgcgctctccctcgaggagaccgtctcggaggtggagaagatcgtcgccgcaggggtccccacccagcacgttgtgctgaacgcctccaaaatcaacctcatgcgcgaggatccgaggctagccgagatcgtgaacgcctgccccctcgtcaacgccgacggagcctccatcgtgtgggctgcgcggcagctgaatgtccctttgaaggagcgcgtcgcggggatagacctgttcctgcgcctcgtcgaggttgcggctgagaagggctacggaatctatctcttgggggcgaaggaggagtcggtgctcggcgtgcgggacgagctcaagaggaggtatccggggctcggcatcgcgggctaccgcaacggctacttcgacgaaccggacgtgcccggcatcgttgccgacattgcggcttcgggagcggacatgcttttcctgggcttttcgtctccgaagaaggagtactgggcgcacgagcaccttgaggcgctgggcgtcccctttgtcatgggcgttggcgggagcttcgacgtcgtggctggggtgacctcccgcgccccgaagtggatgcaggatcgcggccttgaatggctctaccgcttcgtccaggagcccggccgcctttggcgcaggtacgtcgtggggaacgtctcgttcgtccgatacgtatgcaaatgcaagaataaaagcaagaaggaagttgtgcagtgatcaacgtaattggcctcggctatataggactccccacggcgctcatgttcgcggcgcacggggtggaggtcgtcggcacggactgcgacgcggagctcgtggccaccttgaacgccgggaggaccacgttcaaggaggaggggctcgacgagctcttcgggcgggccgtcgcggccggcgccaggttctcgaccgagtaccaggagtgcggcacctacatcgtgagcgtgcccaccccctacgacaaggccaccaagaggatagacccctcctacgtcgtcgatgcggtggggtcggtcctggacgtggccccggagggcgcggtcgtggtgatcgagtcgacggtctctcccggcgcgatcgaccgctacgtgcgcccggcgctcgcggggcgcggccgaggggacgtcaagctcgcccacgcccccgagcgcatcatcccaggggacatggtgggggagctcctgcgcaacaaccgcaccgtcggcgccgacgacccggagacgggcgagctcgtgaagtcgctctacgcctcgttctgccggggcgagatcgccgtcaccgacatccgcaccgccgagatgaccaaggtcgtggagaacaccttccgcgacgtcaacatcgccttcgccaacgagctcgccaagatctgccgctccgacggcatggacgtgcgcgagatcatccgcatcgccaacaagcacccgagggtgggcatcctctcgccggggccgggggtcggcggccactgcatcagcgtggatccctggttcctcgtgggcgactatcccgagctcgcccggctcatcaggaacgcccgcgagacgaacgactccatgcccgagttcgtgctcgcccgcgcgagcgaggtcatgcgtgagagcgggataacggattcctcgaaggtcggcatctacggactcgcctacaaggaggacgtcgacgacgtgcgcgagtccccgaccctgcagatgctcgagagcatgggcagacacctcgcgggctcgccttgcaaggtgtacgacccctgggtcgagcgcgacgtcgtccccaaccaggtccactccatggaggagttcctcgagggccttgagatggtggtcgtgatggtggggcactccgaggtcaagggccggcccgaggcgttcggcgaccgcgtcctgctcgacacgcgcgacgtgatgggctccggcgagaacgtgcacaagctttgaccgttccaaaaaggttcgcctactccttgaaaagagaatgttaatcatgaagaaggtcatgctcgtctttggcacgcgaccggaggccatcaagatgtgtccgctcgtcaacgagctcaagtcgcgttccgacgatttcgaggccgtcgtgtgcgtcaccggccagcaccgcgagatgctcgaccaggtgctcgacgcattcggcgtggttcctgaccacgacctccacgtcatgaggcccggccagacgctcttcgatgtcacctgcgacgtgctgctcaagatgagggcggttctggagtcggaggagcccgacgcggtgctcgttcacggcgacaccaccacgtccttcgcggcggcgatcgcgtgcttctacctgaggatacccgtggggcacgtcgaggcgggccttcgcacccgggacctctacagcccctggcctgaggagttcaaccgccaggcggtcgacgtggtgtcccgctggtacttcgcgcccacggaggcctcgcggcgcaacctcctcgaggagggcaagcccgccgaccgcatctgggttacgggcaacaccggcatcgacgccctgcgaaccacagtgagggagggttactcccattcggttctcgactgggccgcagggtctcgcctcgtgctcatcacggcgcatcgccgcgagaacctgggtgcgcccatgcgctccatgttccgcgccatccggcgcgtgatggaggagcgtcccgacgtcaaggcggtctatcccgttcatatgaaccctcttgtgcacgaggccgcccacgcggagctcgacggcttcgaccgcctgcggatgatcgagcccttggaggttctcgatttccacaacctgctcgcgcgctgccatctcgtcctgaccgactcgggcggcatccaggaggaggccccctcgctcggcaagcccgtgctcgtcatgcgcgataccaccgagcgtcccgagggcgtggaggctgggactttgaagcttgtaggtacccaagaagacgcaatttgccgcgaattcgatcgcctgctttccgacgagagggtttatttggccatgagccatgcgtctaacccatacggagatggtcatgccagcgcgcggatagcggacgtgctcgaaggaaggcgcgtatgaggctcaagaaacgcttcatgctatccttgaagaacagcctcaggttccttcccgacaggcagtacatcaagatttactactgtgcaaagttcggcggctttccgaacatcgacgagccgtcgacgttcaatgagaaactgcagtggatgaagctcaactgtcacgatcctcgcatggtttctcttgtggacaagtgcaaagtgcgtgacttcgtcgaaaagcggatcggttcgcagtatttggtaccgcttattggcgtctataatactgttgaagaattcctcggtgccgacttgcctaatgaatttgtcgtcaagtgcacacacgattcccagagcgctcacatctgcatagacaaagcgaccttcgatttcggggcggcggctcgtggattagagacggcgctcaagcgcaattggtactggcaaggacgcgaatgggcgtacaagggcgtgaagcctcgcatcattgtcgaggagtatctgagagatcgagaacgagcaacgcctaatgattataagttttattgctttgatggtgtctgtaagatgatccagtgcgacgccgatcgttttgaaaaccacaaagagcagttcttttcacctgcttgggagtcttacggcgattggcatgtcagccatgtgccagaaggcgagctgcttgctaagccggacggttttgaagaaatgctgacgctgtcgcaaagtttatccgaaagcttccctcacgttcgtgtcgattggtactgcattgaaggaaagcctttctttggtgaactcactttttacacaggcggggggtttgatcctttccatagcaaggaagataagcttcgcgatccattagatagatatcttggcgattgcttggtactgccagaacaagcgcggactctttatgtataaaattttaatgataggcccagatagctcccgcgcgtccggcggaatggcgtcggttattcggtcattgagtaaaagcgaaaccttagcttcccgcttcacaattttagagtttccctcttgcaaggacggaagtcttgcatctcggcttttcttcactggggtgcagtatatgcgctttatcattaagcctttgaaggctgacatatgtcatatacatattgcatcatattcgagtacctggagaaaacttttgtatgggaaagccgcgaaactcaaggggtctcgagttgtttatcatgtacatggtgccgaatacaaaaagttttttgcgtcattaagcgaacgggggcagaaacgccttcggcatagtttttcgcaagcagacgcagtgatagttctttcaaattcatggaaatgtttttttgaaaacactctcgatctgaaaaacgttgttgtaataaataactcgatagactgcgcgaaatcgaactttaagcacggatttccggcaagcatcgcttttgtaggacgccttggcgttcgcaaaggcgcgtacgacttaattaaggcattgggcatgctacagagtaaggggatgaggttcttctgcacgtttgcgggtgatggagaaattgaaaagctgcaagaagcggccaagattgctggtgtttcgcaaagtacgcaattcactggatggcttggcgaggaaaaggtccaggacatcctctcgtcatcctccatcatggttctgccctcgtacgatgaaggctttcccgtctcgatcattgaggcgatggctgctggcaatgccgtggtcagtacctgtgttgggggtatacccgaagaagtatgccgtgcgggtagtgtgctgatcgggccaggtgatgtaagcgccttggcttgtgccctcgaggaactgcttgttgatcaagatcgagcttatcagatggcggatgcaaaccaagagtatgttttaggcaaacttgacaacaaggttgtccatacgcagttagccaatttgtatttgagattgctggatgacgatgctgagcagaatacctaacaagtttaaacatgacatgacttgcattgagcttttagctctgattgcctttaacttactgctattccagccgatcatcgagataattctgcctcctttttcttattatgatgagattttggcggtatcctcgctcctttctctgttcttttccatggcgatgcgcaaatctcgttttacgagggaaatgaagatcgcgctgtgcctgttatttgcgatcgtcgttattgggctttttggaaactttctttctggcatagtttccgatactttttttattctggtcgatatattagcttgctcaaagttctttatcatttactttgccctgaaatctattctcggaaacacttcttatttcgttagctatatggtcagagagagcaaggtccttttagtattgatgcttgcatgcttggtgattaatcaattcgtagacattggaatgacatatgagatgcgctacggcttgaaggctttccaatttgtatttattcatcctactcatatggtcaccctctctcttgcttgtatggcgtttatttattcggatgccagtaacgggtggaaaaaatatatcggtatcgctttggttctgatggcgatgtctctacgaagcaggtgggtagcgcttgcattggtgatcgttctgattattatatttgtaaaaaaggggtctacgcgcgctccctttgtcgtaattggcgtaggatcggtttctgctttcctcgtcgggcaagcgcagatgtccgtgtattacggtagcgcttccgagtctgcgcgaggtcacctgatgacaactgctctttcagtgtttcaaaactttttccctttgggtgctggtttcgcttctttcgggtcgggagtcacgaagacaatttattccccactttactaccaatacggcttgcaaaacgtctacggattggctccaaataatcctagctacttaacagatacattttggcctgtcgtgttggctcagtttggctttttaggactgatcatttggcttcttctgctaatcatgctcgtagtcgacttttatcgtttagggattgcctcggggatgctggtcctatcgcttacgatgatcgcggcgattctcatctcgactactgcttctgggtcgattttttcgatgcagatgatcacattgctcgttgcttttatgaccgctatgaaagccaatatagatagagaggcttgtgaacgtgcctaagcttggactttgcgcatgctatagcaaccataatttcgggagtatgctccaggctcttgccacatgcaaagccattgatgctctggaagttgagtacgagctcatcaggtacaaaaagaaaatttcccccctaagagttgtccagatcgctcgtaaggttattactgcagatgcttggctgggcttaaccgcagaacttaagtggagagcgtatttaagcaaacatagcgctcagaaggcgaaacaagaactgagatccgaatcctttggagaatactgtgatcgtagattcaccaaactaagccccgtatacgaagggtactctgccttgcaagatggctcaaagaagtatgatgcagtcttggttggcagcgatcaactgtggttgccttctgggtatagctctggtttttacactcttgaattcgcttctgagggggtcaggcgaatctcatatgcgaccagcttcggcatttcctcaatgccgaagtcttctgccgctagggccgcgcgattcatatccaaaatcgattatttgagtgttcgggaaaaaagtgggattgaaatagtggccagcgttacgggcggcgatgtcaagccaaaactggttgttgatcccactttgctgtttgatcaggctggatggctcaatatcgttcccgaaaaaaggatcgtcgaaggggattatatcctgtgctatttcttgggcatcaatcctgagtcaaggcgtatggctgctgagctcaaaaagaggacgggacttccggtggtgatgctgaaagattggcgttatcatcttgacgaagacgatcttatcaatgactttgatttttactcggccaatcctgacgattttataaatctgatacggcatgcgaattatgttctgacggactcttttcatggaacagtgttttcgcttattcatcataaaaagtttgcgaccttctatcgtgatatcgatgggggtaatagcagaaacacacgaatagacagtctgttctctcagctagatctccgctgctgcttgatggatcatgcggatccggggcgtcttgaaagcttggtggttgattttgcaaccgttgatgagagtctagacaattggcgttgcgattcttggaattttttgaaagaagctgtcgatggtctgtaggtcgaacgtttccattatggatgaatcaagttgctcggggtgcgggttgtgctcgttcgtctgtccgatgcgctgcgttgaaatgaaagaaaacgaaagaggctttattcttccggctgttggaaataattgcatagcttgcggcaagtgtttggctgattgtccatcaatcaaccctccggtttcagattatctcgatattgggcttgttgcacaatcgggcgtcagtgaaaacttggtcgcatcaaccgggggcggaatgcatctccatctcgcgaattcgatgatggcgctcggtggtgtttcgtacggcgctgctttttctgacgaatgggttgttgaacatatcgagtgccatactgctgaggaagtgatgaggtgtcgtggatctaagtatgttcaaagcagcttgacgaacaaggtgttcgccagtattaagaaaaacttggaacaaaatatccccgttctcttcaccggcttgccgtgccagacggccgcagtaaaaactgccttcggcgacaatgcgagcctttttcttgttgacttggtttgccacggggtcgcttcgcctatggcctggcggcaatatttgtcagatatgcaatttgggcgaatcgagtcaataagatttcgcaacaagacttacgggtaccatatgagcacaatgagagttgtctatgagagcggagtttatagcaaaagcggaagaatcgacccgtatttgcgagctttcttttctggcatcgctcacaggaaatcttgcaacgaatgtaagttcaagggaaggcgacgctattccgacataacgctctttgattgcgggcggtattgtgagctgactggagacaacgatgatgatcttggccatacaagtgttttagttaatacgaagaagggcgagaagctgttacttgagcttggaaaagaagaggtcgttttttcggcaattgatagagggatgggcgagcagttaaatggcaagatgatagagggctgcaccccgaagcatccgcgatcggattccttttactctcaaattctttcaaactctttttcttcggtggttcagagctatctgcctattaagctttcggactattgcatcgaagccgtcaaggggttggcatgcaaaacgggcatcctcacgtttcttcgaaaagcaaaagaaagaaaactgcttgtcaccaagcattaaaaagaactttgccttcagcctagcgtatgaagtgcttgcttttgcaattcctctaatcacggcaccctatctttcccgtattctgggtccagacggaattggggcctattcatattcttataatgtcgcatattactttggaatgtttgcgacgctgggaatgctgcgctatgggaccaggagtattgcctcagtcagggatctgcaggctacgaaagatcagttgttttgggagctcttttttacccagcttcttacggctgggtttgcactcgccttgtatttggtctatcttttcctatttggtgattcgcttagtgcaatatggatactttacattttgtcaaccgctttggatgtaacttggctattcaggggcgaagaggatttcaagattacagttgttcgcaattcagtaataaagtgcttaaccgctttctgcatctttgtattcattaaaggtcgtgacgatgtttggttatatgttgcgataatgtcgctcggatactttatttctcaggtgttgctgtggccctatgtgaagaagcatatcgcaagtttccacatcccaaagttttgtaagctgatacggcatttaaaaccaagtgtgattttgttcgttcccctgattgctacaagcgtatatagggtgttggacaagattctcatcggcttgctttcaagcagcgcccaactcggttttttcgattgcgcggacaaaatcatcatggttcctctaggcgtgatttccgcgcttggggcggtggtacttccgaggatgtcgtatttaatatcgacgggcgaagaacgaaagggggtcaagttcatccgttcgactatgtccttttcgatgattatcgcgatttgtctcatgttcggcctgattgctacaggcgatctatttgcagtggtctattttggcgacaattatacagagacgggatatctgctcgttgttatgagcgtgactgtgccgatgattgcttgggcctcagtgatcagggaacaatacttaattccgaaaagattagacaaacagtatatttcctcggttgcggtgggcgcggtcttcaacatcatgctaaatctatgggcgattccgaggtggaatgcgcggggcgctgcattggtgactatagcaacagaattgctcgtttgcgtaatgcttactgcttcagctagaaagtatttataataaaataaaaagaaacggcggctttgatttttcaaagctgctgcggaaatcaaagaacgacaagcaacagttctgattttgctccaatatggttattgggggcacaaattaaaatcaaaaaagagccgataacagcagtatttcaaactgcatattatcggctctgcgtctgtgcgtctggctcttttaattaaattatttttgttgttttttggctttattatatgtattagctaattgtccacaagctgctttaatctctctaccatgagaaactctcatggtaacttcaagtcctgtttgctctaattgatgtttgaacgcaaccatttcttgtttttgtggtgctctaatttttgaattactcgtcgggttgtattgcagcacgttaatcataacatttttgcccttaaaccattttgcaagttgccttatatctgaggaacggtcatttatacctggtaaaagtaaatacgcaaataccacttttcgattatgcctttgtgaataggacaatgcttgcttaacaacatcttcaatagcgtacatgtgcatatgaggaatgatacagtttctcgcagcctgtgttgctgcatgtaaagatattgtcaactgaatttttagatgttcttcgcgcaatttttttaattgattaactggaccaactgttgatacggtaatgccgtcggttggaaagttaagtccatttctatctcgaagaatatggattgctgcaatcaagttgtcgtaattgaataaaggttctcccattcccataaaaacgatacgatttactttttgacgtatcaatatgacctgctgcacaatttcagacggtgttagattacgaacaaaaccattgcgtccggactcacaaaaaatacagccaacagaacaaccaacttgcgtacttacgcaaacagtcccaccatctcgccgtttaataaaaaccgtttcgatatacctgttgtctttcaattcataaacatacttttcagtatcgctacttttatagacttttttgttgatattgatagattttttttgtgaaatggctgtttatataattccgtatataaggctcttgctttatcctctccaattacttccgacatttctttgtaagtaaatccgtatgggtcattcaatatttccgtaggtgtacttttaggtaagtgtttcatttaatatccttccttttcaaaattaaaaagtttgtttttcagagtttttgattatgatttctaatttttcaacatcaacgatatgtgttaatttacatttagggcagaaaagaggaaaatttcttaataccgtattataaaatacttgaaccctcgtctttccgttacaaattggacattttatccaatatttttcaagcataatatttctccttttgcgcaaaaaaatacaggtcaattctcaacatgagcattgacctgcatttatacatataacactacaacaaaattaaggcatagtttttatactatgtctatacatcgttagttttgttgtatagcatacgcaaaataagcatgacaaaaaagcccatattgaaaatgggaaaaatcttttttgatttcaatgcttatcgaatacgcatgctatgtaacataaacatttcccccttttaataatactatacaaaaaagcggatagttgtcaacatatacatatgaattattttggctaactaatagaacagtgtagacatatccaagaagaaaggtgaacagtaaaatgtaatagggtgaataattatggcaaaaagaccagtaccaaaatacgacttcaaggcttttggggcagcgataaaggcggcgcggacagggcgcaaggagagccgcaagaaagtgagcgacgaaatgtttatctcgccgcgctaccttgcgaacattgagaacaaggggcagcacccaagtttacagattttctttgagcttatgctccgctacaatatatccgtagaccagttccttttggaaacgccgccggaaaagaacacgcagcggcggcagcttgacgcgctccttgacggtatgagcgataagggcatacggattgtgagcgcaacggcaaaggagatagcggaagtcgaaagacttcatcgggcttgacgatagcggggcggcggcgcaagtgcttctccatgtcaaaggcgttcttcgggtctgcgtcggaaaggtacttgtatttcgggtgcttcgttatgtcgaatttgtccgaaaagaacgggcgcaccccgcgtagctgcaagatacatttccctccgtccatgaccgcgatttcatcttccgtcataagctgctttcccaatttctgatagttcagcccatgcgaaagctcccgccctctggtttcggacgtgttgaagctgtcaatggtttctttccctaaaatctccgatatttctttgagcgtcgttttctccttgccgccaagaaaaagcgtggtgtcgcagttgccgactatggtatcggcgttgtccttgtaaatggcttttagctgtgactggctctgcaagatgattgaagcggatatttcccggctccttatggtggctatgagcttttcaaacttcggtatctgcccgatattcgcaaactcgtctaacaggcagcgcacatggacgggaagccgcccgccgtattcatcatctgccttgtcgcaaagcaagttgaatagctgtgtgtagagaatactcacgacaaagttaaaggtgtcgtctgtgtcgctgataatgacgaaaagggcggtctttctgtcgcctatggtgtcaagctgcatttcgtcggtttccataagctcgcgcagctccttgatgtcaaagggtgctaacctcgcgccgcagctaattaaaatcgacttcgccgttttgcccgccgcaagtttgtatttgcggtactgcttgaccgcgaaatgctccgggtctttttcttccagacgttcaaacatgaggtcaaccgggttctggaagtcctcgtcgtcctcgcgggcttccgacgcatttatcatttcaagcagcgtcgtgaagttcttttcctcgtccggggcttcataccagatatagccgattagcgcggtgtagtagagcttttccgctttcacccaaaaatcctcgccggatttctccccgtcgccttttgtgttggcgataatggtattgaccaacttcaaaatgtccttttcgctccgcagataggcaaagggattgtatttcatggatttcttgaagttaatcgtattcagcactttaatctggtagccgccccgctgtaagagcttcccgcactcgattaagacggtgcctttcgggtctgtgacaacatagctgctgtgcatttgcataagcgacggtttgacgaaaaaccttgtcttgccgctgccggaaccgccgattacaagaatgttcttgttgcgggcatatttcggctgcttcgggcggctgttcatggtaagccgttccgtctgcgtgagggggatattgttctcaaatactgggtctgtgtatggctttatgtcctcggctgtcccccaacgtgcgctgccgtactccatgcctttcctgtacttcttcgcgttcttgcccttgacgtagataatcagccggacaatgaccgccccggcaatgccgataagtaaatctgccgggtggaagctcggcgcgatactggaaaaggcggcactaaaaccgtccccaagatgtagcagctttgcgctcgcgtccgcgccgggggagagccgtacagccgcgcccactttatcaaagagccagacaaagagcagataggggagattgaggataagcagcttcttgatttccggcttcatagcgatacctccctgtccttgttcttgacttttgcccgttccgcgtttctgccctgtgcggcttctttgagggttgagagcagctttcggattgagggcttcctatcttgtgtcagcttctttgcggaaaattccttaaaggctgcggtcagcgcgtccgcgtcccgccccttaaagaaaacaaggtaacggggcgggctttccgtcgtgtcctttttcagtgcaaagtcgataccgtatttttttgcggtactctcaaaggctttgatattgtcttttgtaatctcaatgttggaaacgcccgcgttctgcttcataagctgcttcaagctctgcttgccctgtggcggtttggcaagctgctttttgccctttgagagaatggctttcattgccttttggagcgtctgcgcggtcagctttccggtcttgatgtaaagggctatggtcttttcgtttacttcgtcctgcaatttctcgcgtcctcctttcgcgtttctttacggggcggcggtcagatacgcacccgcagcccgttcaagtcctcggctctgatacccacaagataccagttgtcgccgtactcaatccgggtaggcttccacttgccccgcacgaacacgtcaaagcactcgccgcaatgcaagcccccgtagtaagcgttgaggtcaaagcgaatgtcgtaacggtcggtgcgctcgtcaaataccaatgctcctgttctttgtgccataaaaaatcctccttttgttgtttacaggctttcgcctggtttgaatgaataatagtccgggtcgccgtactgcggcttcttcggtgccagtgcgccgcttgccatgtcatgggcgacaagggaagtgtaatagttgccgattgtggacggggcattgaaaagggctgctttcagatattgcttgatgttgcggattttggttgtgttctcccgcatacagtcaagcacaaagcggatatgctcgccgtccagtttcataaactttgacttcacaagctctgccgggtagtcgtcccccgcaatccgtacccgcttccttgcggtgcataccgtttcaagcatgaggtctacaatctcgtccagcctgtcaccgtcaaatttcatgtcctgtttgagaatgtcgtagtcgatattgtccttgatgatttctcggtatatctctactgcgctctgtgctgccgcttccgtttctttccgttccggcggcgcagccgcttccccgcaaggtgaggggttaggggaaaggataggaatggaatggatacttgataaatccgtatttgatttttctttttttggtaagtcagttctttgtatatctttatttaattgcgttggattttccaacgtaggtttttcctgtgttggtttttcctgtgttggtttttccaatgttggtaaatccggcgtaggcggctgcggctgctcgaatatcacatagtccgcgccccgcaagcgtcctttctcgtcgcgctcccttgaacggacgatatacccggcgcgttcaagctcccgtatggcttcgcggatagcgtctatcttctcccggttgataagggataagcctttcagtgtgtagtcccaatcttcgggaagtgacagcatttgtgacaacagcccctttgcctttaaggaaagctccttgttgcgtaggtggtggttgctcattacggtgtaacccttgtttcgttccacccggaaaactgccatagtaaatcactccttttgctgtggatttgttacgcagtagaagcgcggtttcgggggataaggtataaatcccttgccgcgccagatacgcgcccgcaaaaccgcttgtagcaaggctttttctgcccctactgcgtaacaagggcatgaaaaaagcggcgttcctgttctccctgtgtagggagtgggaaacgccgcttgtacggtgctgtatgaaatttttcaatctatggtaggtcaatactggtgtgcgctgcctgtttggtctatccgcaagagcttcaaagcatatcaaggctcaatccgtaagtagtaaatgggtagtaaattcaagctgctgtcttgcggaaatgcccgtaaactggggattttttgagataatcatttgatttggatataaaacaatatgtttccgattctctcccgtaccttgggattggggttttgatgtgcatctcggtgaaggtcttagctcgggttctgtcgattggcaaggtgagtcccccgcttcttttagttcttgaaatcatctttgggctgatagtttttggagcgctcctcgctgtattagcgaggcatagcacgagccatagagcgattataggatcactaataaaaaagtaggcttgcatgttctcagtttctgccctcgtgcgtctttatcggtatcccattattgggcatcttgctcaacgaatggtattgcgaagaggcgccgatattccgcgcagcgttaaaatcggccatagggtttcgttcccgcacaacgctttggggaccgttttgcatccaggcacaaccctcgaagactacgtcaaggtctatcaaaacgtgactattggtagagggaatatatggctcgactatcatgctgaatcgcgcttgcgctttacggttaaaatgggagcaatcttgtgtgctggatgcaagattatttgcagcgaagatgaactcgccgttggaaaaaacacggtgattgccgcaaatgccgtgctaacccgctcaacaggggacaacgagatatgggcgggaatccctgcaagaaaaattcgtgatctgggagttggttctgaacaaactacgataatcaactcgccatcaggcaaaacttttgaaattgattgattctttgacaaccaaaacccctgttcaaatccaaatctggcacaacgatttacgcctttgacaaggcagtttttgcaagcattattttcagtgccttcggggcgcgtctaggccatacgcatcagcttcccttggcgcagaagcgcagttttgctcaagagcctcacctcctggtttgcaaggatgatttgctagagtcttagatcctcgaacttcaccccgttgagccttatgccgcgcttgatgatgcgcatgtagccaagcgagagcaggcagcgcctcctcatgcgtttgaaggtcttgatccgtggctcatccgcttcatcgccttgatggggctgttgagccccccccccggcggtggcgttggttttgttgagcttataaccgttcagcacaccttcgcggttgcgcttcagggtcttggctgccgcttcatctcgaagacgccgcttctttgggcgaggcttatccaattggcgagcgagtcgcgcttgtctgcgcaccacggcatgtccgaccagccgcggaacaggtgcatgagctcatgggcgttgaggtcggggtcggcttcaagcaatcaactctcacaaccacgctcccggtcttcatgtaactatttcatttcccgccttgccaaacgtgcggttctttcttacgatgatccgtaatgatgtcgcggcgcacttttgtgcagatgcacgaaagtagcttcgcgcccggcaggttggacaacacgtccggcgcaacaagcaagcgagggatcgacatggccatcaagacgggtatcgtgggtgcggcggggtttgcgggcatcgagctggtgcgcctcgtgctgcgccatcccgacctcgagctcgcggttgccacgtccaacgagctggcgggcacgcgcgtcgacgcggagtaccccggcttcgccggcgccaccgacctcgccttcgccacgcacgacgacccggcgctcgccgcgtgcgagctcgtgttcctggccgtgccgcacacggcggcgctcgccatggcgccgcgtctcgtggcgggcggcgcgacggtcatcgacctctcggccgacttccgcctcaaggaccctgccgtctacgagcagtggtacaacaccccccacacggcatgcgacctgctggcccgcgcggcgttcggcctgcccgagctctttcccgacgatctggcacgcgcagcccgcgctcgcgccaacggcgagcccgcgctcgtcgcctgcgccggctgctatcccacagcaacctcgcttgcagcggcgcccgcaatccgcgtgggcttcgcggctccaagcggcaccgttgtcgtcgatgccatctcgggcgtcacgggcgcgggcaagaaggccacggcgcgcacgcatttctgcttcgcggacgagaacctggaggcctatggcgtgggcacgcaccgccacacgcccgagatcgagcagatcctcggtatcgcgggccaggggcgcctcgtgttcacgccgcacctcgccccgttgaaccgcgggctgctctccacggcgaacataccgctcgcgcccgacgcgcccgatgacgcggccttctacatcgatcagtaccgcgccttctaccgcgagagccccttcgtgcacgtgctcgacgccggctccctgccgaagacctcctcggtcgccggcacgaacaacgcccatatcggccttgccgtgaacgcgcccgcgcgcatgttggtcgccgtgtgcgccatcgacaacctgggcaagggcgcggccgcccaggccgtgcaatgcgcgaacatcgtctgcggcctgcccgagcgacgaggcttcgacgccgtcgccgtgcccgtctgatcgaaggaacccgctagcgaacagcccaagcaacgcaaccagaaagaagccgccatgaccgacacgcatgccgcatccgccccgtcatccaccagcagcgtagcgccgctgcgtgcggaaaccgccgcgcagctccccgacaccctcgcggttgtcgagggcggcggcgtcacctcggcgcgcggattccgcgcggccggcgtccatgcgggcttccgcaaagaccccaaccgcttcgaccttgcgctcgtggccgccgacaagccgtgcgcatgcgcggccgtgttcacccagaacgtgttctgcgcggcgcccgtcacggtgtcccgcgagcatttggaggactgcggctacggcatcgcgcaggccgtggtcgtaaactccggcaacgccaacgccgccacgggggagcgcgggctcgcggccgcccgcgaaaccgccgccatcgcaagcgacgtcctcggctgcgcgcccaccgaggtgctggtggcctccaccggcgtgatcggcgaacacctgccgctcgagccgttcgccacgggcatccccctcgccgccctcgagctctcggtagcaagcggcggcgccaacgcggcgcgcgccatcatgaccaccgacacgcgcccgaaggaggcggcggtcacgttctcgggcgacggcatcggctacgacggctgcacgttcacggtgggcggcatggcgaagggctcgggcatgatcatgccgaacatggccaccatgatagccgtgctcaccaccgatgcgccggtgcgccccgacgcgctgcacgccgccctctcccgcgcggcgggccgcagcttcaacaaggtcacggtcgattccgatacgtccacgaacgactcgtgcttcctgttctccaatggcggcgccacgtcgagcaccgttcccttccatccgggctctccggcgctcgcccgcttcgagcaggcgctcgaagccgtgtgccagaacctcgcgcgccagatggccgccgacggcgagggcgccacgcgcctcgtcaccgtgaacgtgacgggcgccgccacgccggccgacgccgatgccgccgcgcgagccgtcgcgaactccccgctcgtcaagacggctgtctacggccacgacgccaactggggccgcgtggccatggccatcggcaagtcgggcgccgccttccgccaagaagacgccgccatcgacatcatgggcctgcccgtgtgccgcggcgggctcaccgtccccttcgacgaggacgaggcgctccggcgcttcgagaaccccgaaatcgcaatcgacgtcgacctcggcgccggcgacgccgccaccacggtttggacctgcgatttcagccacgattacgtcacgatcaacggagattaccgctcatgaagtacgcaaaggacacgcgcccgaaaggcgtatcgcacaaggccgcggaagtgctcgtcgaggcccttccctggatcaagaacatcaccggtaagaccgtcgtcatcaagtacggcggctcggccatggtcgacgagcagctgcgcgccgacgtcatgaacgacatcgtgctgctgaagatcgtcggcgtgaatcccgtcatcgtgcacggcggcggcaaggccatcaccgaggccatggaattcgtgaacctgcccgtggagttcaaggacggtcagcgcgtcaccacgcccgaggccatggatctcgtgcgcaccgtgctcatgggaaaggtgaaccaggagctcgtggaggccctgaacgagcacggcaacttcgccgtgggcgtgtccggcgccgacgcgggcgtcatcgtggccgagcaggccagccccgacctgggccgtgtgggccgcatcacgcgcatcaaccgcccgctgctcgacgacctcgtgaacgccgactacatccccgtggtcgcgtcggttgcgctcggcgaggacggcggcttctacaacgtgaacgccgacatggtagcgggccacatcgcggccgccatcggcgcgcacaaggtggtgttcctcaccgacgtggacggcctctacgagaactttgaggataagtccacgctcatctcgaacctcacgctcttcgaggcccagtacatgatcgagaacaacgtggtgtccaccggcatgatacccaagctgaagtcgtgcgtcaccgcgctcgacgccggtgtgttccgcgcgcacatcctgaacggcaccacgccgcactcgctgctgctcgagcttctgaccagcaccggcgtgggcaccaccatgcactccacggaggaggcgtgcaagttcgactcccatcccctgggcaacttcgcctccaagctgctggagaaccgcgagcaggcggctgctcaggcagccgctgccgagcgcttcgccggctgaccgaccgccatcgccgaccgtcgaaggggtcggcccttccccttgctttgcgcggggggatgctgcagcaaccgaacggaaggaccgacatgagcctcgaggaacagcaggaactggaagagagctacgtcatgcacacgttcgggcgcaagcccgtcgagttcgtgcgcggcagcggcatggtgctcgaggacgacaagggccgcgagtacctggacttcattgccggcatcggcgtcatcagcctggggcattgccatccggccgtcgtccgcgcgctgcagcagcaagcggaaaagctcatccacgtgagcaactactactatatcgaaggccgcggggaagtggcgcgccgcctctccgacctgctcaaccacggcgctcccgccggcgcggagccctggcagagcttcttcgcgaactcgggcgccgaggccaacgagtgcgccatcaagctggcgcgcctacacgcccgcaagcgggcggaggcgcaggcccgcgccgccggggcaggggaagacgaggcccgcgccgccgcgtccgccgcgccgcgcgtcatcgtcacgctcgaccgcagcttccacgggcgcaccatggccacgctggccgccacggcccagcccgccaagcaggaggccttccagccgctgcccgacggcttcgcccatacgccgctgaacgacgtggccgcgctcgaggccctgttcgccgagcgaggcaacgagatctgcgccgtcatggtggaatgcgtgcagggcgagggcggcgtgcacccgtgcacgtccgagttcctgcaggctgcgcgccgcctcaccgaggagcgcggcgcgctgctcatgtgcgacgaggtgcagacgggcgtcttccgctgcggcacgccgttcgcgttccagcgcttcggcatcgtgcccgacgtcgtgaccatcgccaagggcgtggcctcgggcatgcccacgggcatgtgcgcggcccgtgccgacgtggccgcctcgttcgctcccggcgaccacggctccacgttcggcggcagcaacttggcagtcgccgcggcgcaggccacgttgcgcacgctcgcggacgagggcttcggcgcgcgcgtcgagcgcgtaggcgcctacttgcgcgcgcgcctgaccgaattgccccacgtcgtggaggtgcgcgggctggggctcatggtggctgccgatgtggccgagtgcgtcgatgcgaacgacgtcgtcctgcgcgcgctgggccagggcctcgtcgtcaacgccaccggcccgcatacactgcgcttcctgcccccgctcgtctgcgaggagcagcacgtggaccaactcgtcgagcgcctgtcccgtttgctgggcgcataggccgcgcgcgacggagcgcacggcccgggagtgcctgctggctcccagcccgtgtgcgtcccgcccgtaccgccgttccaccggccagcaacggccgcttcgccgaatttttcgtacttttggaaattcctgcttcgcaaacgcggtgtcatgaggtactatttactgcataaattttgccggtcttgcgcttttctgcataaccgtgcgaatggctgtgaaactgtatgtgatagtgctccgcaaggacagagagtcgagggcatgaggaaacgtcagcaacggcatgacatcatccgcgatatcattcgcgagcataatgtcaagacgcagcgcgatctcgccgatcagctgcaagccgcaggctacgattgcacccaggccaccatctctcgggacatcatggacatgggtctggtgaagtcgcgcgaaggctattacgtgctgccggaggaaatgcgcctccagcgtatggtttccgaactggttgaagaggtacacgtggcaggcaatctcatcgtggtcaagacgttctccggcggagccgccggcgtctccgctgcgctcgataaagcgagcttgcgcggcgcgctcggcaccgttgccggcgacaacacgatcatgatcgctgccgagagccccgaggccgctcttgaagttgagcgtgccatcgaccgactgcgacgacgttagtcgtctactttagcgcgagggacgcttttctccctcctttcccccaaggctgcccagcagcatgaagtcgtgagagccgcccggcgctcacgccaccgcgaaaagccgcgatgcacacgggaccccgtgtatccgcacgccgagaacggcagggcggagccaaggccaacccgtatctgcatcggagaaccgggcaacgaaccagctaaaacaaaaagaaaaagcaaacgcaggaaagggattcatcatggcagatcagaaggaaaaagcggtactggcatactccggcggcctcgacacgtcgtgctgcatcaagtggctccaggagaacaagggcgtcgacgtcatcgccgtcgtgggcgacgtgggacaggagcacgagggcctcgagaagatcaagcagaaggcgctcaaatccggcgcgctcgactgcctggtggtggacatgcgggagacgttcgccaaggagtacctggccaaggcgctcgctgccaacgccatgtacgagaacaagtacccgctggtctcggcactgtcgcggccgctcatctccaagcacctcgtggacgccgcccacaagttcggcgcgaagtacatcgcgcacggctgcacgggcaagggcaacgaccaggtgcgcttcgagtcgagcatcacgatgctggaccccgacatcgagatccttgccccggtgcgcgagtgggagctcaagacccggcccgaggagatggagtgggcgcaggcccacggcatcgaggtgcccaccaccaagaagtcaccgtactccatcgacgacaacctgtggggccgggccatcgagtgcggcgtgctggaagacccgtggaccgagccgccggcggacatctacaccatgacgagcgatccgatgcaggcgcccgaccagcccgaatacgtcgagctcacgttcgcgcgcggcctgccctatatgatcaacggcgaccagaagagcttcctcggcatcatctacgcgctgaacgagatcgccggcaagcacggctttggccgcatcgacatgatcgagaaccggctcgtgggcgtgaagagccgcgagtgctacgaggtgccggcgggcctcgcgctcatccaggcgcacaaggcgctcgaggacctcgtgctcgagcgggaagtgctgcactacaagctgggcatggagcaggcttgggccaccgccgtgtacaacggccagtggttctcgccgctgaaggaggcaatcgacgcgttcatggcctccacgcagcgctgcctgtccggcacggtgaagctgaagttctacaagggctcctgcacggtggttggccggaagagcgcctactcgctctacgactacgcgctggccacctacgacaaggacgacgcgttcgaccacacggccgccaagggcttcatcaagctgcagacgctctccggcaagacgtgggcctcgaaccgccggcaggaaggcgccccggccgagctcttcgacgccgagaagcagcagggtcccctcaagaagggcaagtacgaggacgtcaccccgctcggccagcaagtggtggccgaggccgaagccgtcttggcgtaagcgaaaggaaacccatggcactctggtctggcaggttcacggagaacgtgagcgagttcacgcagcgcttcggcgcctcgctgccggttgacaaagcgctctacgcgcaggacatcgccggctcgaaggcgcatgcggccatgctggcgaaggcgggcgtcatcgcgcaggttgacgccgacgccatcgcgggcgggctcgggcacgtgcaggagcgcatcgaggcgggggagttcgccttcgacatcaacgacgaggacatccatatgtccgttgagcgcgcgctgatcgcggacgtcggcgatgcgggcgcgcgcctgcacacgggccgcagccgcaacgaccaggtggccaccgacacgcgcctgttcgcgaagcagcgctgcgaggacctcatggcggccaacatcgcgctgcgccaggcgctcgtcaagcaggtcgaggcgcatccggacgtcatcatgccgggctacacgcacctgcagcacgcccagcccgtgctgttcgcgcaccatatgctcgcctacgtgtggatgctcgcgcgcgacttcgagcgcctggctgccgcccgccgcgccgccgatgccagcccgctgggcgcggcggccctcgccggcaccacgtacccgctcgaccgccagatgacggcggagtcgctcggcttctcgcgcgtgatccccaactcgctcgacgccgtgtccgaccgcgacttcctgctcgacctgtcctacgcgtgcagcgtgtcgtgcatgcacctgtcgcgcctgtgcgaggagatcgtgctgtggtccacggccgagttcgacttcatcgagctctccgacgcgttctccacgggctcgtccatcatgccgcagaagaagaaccccgacttcgccgagctcatccgcggaaagaccgggcgtgtggtgggcgacctcgtggcgctgctcgtcaccatgaaggcgctgccgctcgcgtacaacaaggacctgcaggaggacaaggagggagccatcgacgccgccaagacgctcgaggactgcctcgtgtgcgccgccggcatgatcgagacaatggccgtgaagcccgagagcatgcgcgcccaggcgaagaagggctacctggccgccaccgacgtggccgactacctggcgaagaagggcatgccgttccgccgcgcccacgaggtggtgggccacctcgtgctgttgtgcgagcagcgcggctgcgacctggacgaccttacgctcgcggacttccaggccgagagcagccttttcgaggccgacatcacctccgcactcgacctcgacgccatcgtggccgcccgcaccaccgagggcggcacgggccacgccgccgtggccgagcagttggcgctcgcgaagcaggtcctcgctgccgacgaggccgcgctctagccagcaagggcgtgacaggggggggcg
